United States Patent Application Publication US 2008/0114160 A1 - sequence listing, part 44

SEQ ID NO: 10415 - DNA, 10895 bp, Oryza sativa
tcatagaaaccggccccttttcccaccctcacatgataaaaaaagtagaaccaacacatatagtatcagtataggtgtcggttgtacttaaaaaaccgacacctataatatagatgccggttttttaatagaatcggcacctttgaaaaaaaccgagccggtctctttttaccacccatagcacatccttatccaccccaccaatactatcgacatccttatccatccaccacactgcgccagccatccctctctctccctctctgatttctcttgcccctcctctcacattgcgcccgacgatgacagagttgcggcggcggccaacggagaagctaggatggcgcggaggtcctcgccaacccgggggcccttcccccttctctcctcctccagggcggctcagcggtggagaaggccggccgatgcggacgaggaggcggctcggtggagaaggctagccggggcagcggctgacggctggaggaggctcgcccctctcgccctcctctgctcgtgctcgcggcggcgcaggtgaggtagaggctggcgcggagcgcctcgccccccttcccttctcgtcctgcacggcgtggggttgcggccgacgcggcgaggtagtggcgtggtcgctggatctcgccgaccccccctctcccgggggacctcccccctcctccagcgcggtgttgggtggcagccgccgtcgcggaggccgatgtggcggcgcggaggcgggcacggctaggtggtggtgtggaggccgggcgaggtggtggtggcggcggtggtgtaggtgccatcgtttttttaattagtataggtgccggttttagaaccggcaccaataagattgaggcaaaggtgccgaccaataggtgccggctggaaaactggcacctatagccaattcccaaccggcacctatagagatttctgtaccagtgactatctatactggaccaactagcaattctaacaagataaagcaaagcatgtaagtatgtcacatactcatccactagcaattattactattctagagtatctggaaacttatgtgcaagtatgacatatcatctagagtataatgttttagagctcaacatataatgatatcaaattatcttccttatatcatttctataatatttagggcctctttgactcgcaggattgaaaaaaacagagggatcagaaaaacacgggattctaataggaatataattcaagtataaaacagaggattgcaaaacgttgaaaaaacacaggaatgagtgttcgattggactgtaagaaaaacgaatttcataggatttggaaaaccgcaatcctttgaataaaatggtcacatagaaaaaattcctataggatttgaattatacgaaattccttcttaattaaaatcttttgattcaaaggacccttaacatatattcgtacgttcgaaaatcatgaaatggttaatgtgggagttacaacagctaactggaatatagagaaaaaatttctcgcatcaaaacattaagaggccccaaagctcgtaggcttcttcaataatttgctactccctccgtccaaaactatagttatttttagtatttaaaatttatcttaggatataacaacctctttaattatatactccctccgttttacgatgtaagactttctagcattgttcacatatatatagatattaatgaatctagaaatatagatatggacattgcttgaaagtcttacattgtgaaatggaggaagcattctttaaccaattacaacctctcactttttaattttatcactttcttactacctctgttttttaatagatgaagccgttgacttattcttatgaccattcgtcttatttaaaaaatttacgtaattataatttattttgttatgagttgttttatcacttatattactttaagtgtgatttatatcttatatatttgcataaaatttttgaataagacgaatggtcaaatatgtgagaaaaagtcaacggcgtcatctattaaaaaatagagggagtatttaatacctatatccaggggcggagctagtgtatattaggggggtgcccaggaacccggtcaaaaaatttttttagctacatcttatctattttcaccatgtatgcacccctctcaatacaaacttaggcacccgtattagtttaaactcgatctaagataggggaaattaaacaagtggcaccaccctttatttcgctatagctccgctatggctatatccaaatctatggctatattcaaatctagaacttgttatattttgtaacaaacgtgtattagtttttccactcaacactgcgacagttagtgcaaaactaagttcgtagtcggattgatcgatcactgcatgatgcagaacgtacgttagaagacaagttccgcttgtaccgttgcacagcaactcagcaagcactgtatgccgtacgtctccgcgattaactatagatagtaccaaatgactagcccttaccttagcttgtccttccgtgtggctaattaattcgttggggggtggtggccgtacgtcgtcgaagtcggagtcggcggccggcgtacgcgcgcgcgcgcgctcgggttggcgaccggtcttgggacggggattaaacttagtcggagtgggccgagtccgagtaggagacggatggaggccttcctcctatatatcgcatcacatcgatcccactcgtcttcagatcgctcccaccatactcgctattcgctagtcctcccgccgccgccgccgccgccgagaagaaggatcgaagatttgcgccgccgatcgaggaggaggttgtgggggagagcagcagcgcgagatggggagtcccaagacgtaccaaacgtacaggatgggtcaggaacagatggacaccatcctgtcctgggcgttgccggagaaggattacgagccggtcttcactgtgatctcctcccacaccgacgagcagaaggagaaggaccgcctcctggccatcggaaccgccgccatcaagaacaagttgctccaccacaagagggggctgcaggccttcgtcaaggacaacctcgatcgcttcggttacgtcgacatcaacgacagcatgttttatccctagatgccatgtctagttattaacggacgtgttcactgtcagactgacagtaatctatgaagtttaatttacacttcctctgtttcaaatttctttcttgatatctcttgtttatactattaaataactttaatttttaagtaattattattatcttgatgatgatcgtaaaagtagaagataattgtgttggactcgataatacgaggaatggttgtatcgggatttgataaaatcaaggtattctgtttttttgtttgttagtactatgagataagtgaaaaataaattatttaataacagtggtagttcacaacttcagctagcatgagtgcagcaaaaattgctctgtttgtggcatgcatgcatccaccatgttcacatagtttgttaaggccgatttcttggatgtttgttggctgagtttgtcgtcgacgcttgaaaccagaaagatcgttaatgcaagattactgaaattacattagctgttgtaaatttgaaattttagtttatttattttttaaaaaaaactttgaaaagtgtttctttattttattcacaatttttttattttgtgaatatttttgttttaaatatagagtctcctataatttattttaagatataatccaataaataccattggcaagcattcaaatataagaaatgctatcgacaagtgtgagtttcaacaaatatcatcgtacaaacgactttttccaaaaaaaataccatcgccgttagagtttcatccattctgcaccgttaagtgctatagtatgaatagtatatttaacggtgcggaatagacgaaactccaatggcgatggtataatgactttctcatctttatgtgagcgtacttaatctttatccatggctggtttggctgaggtcttaagctcttctttacacggcaacacctctatcctttcaatcccctggtgctaattccaatttccatttctcttgattttctttaattttccttgtcaatttttctacgagtgatagaagatgacatcaccttcattcctatgatttcgtcggtcaagcccacagtagatcattccttgccatttccaactacagcagcttttctgtcggccatacaaagatgggtatcttcgtctttaaaaaacaaaataaaaaaacctcatcagcattggtttattaaggtagtgtttggattcatgggactaattttagtccctatgatattgaaagttggaacactaatttaggccctgtttagaaaacttttcagcatgtcaaatcgaatgtttagatatatgtatagagtattaaatatagaaaagaaaactaattacacatattacgtataaattgtgagatgaatcttttaagtctaattacgccatggtttgacaatgtggtgctacagtaaatatttgctaatgacggattaatttacatgcgaaatctataagttgttttattattaaactatatttaatacttgaaatatgtatccgtatatccgatgtgacatgctaaattttttcaaccctaaacagtgccttagtagtttagaaagcatgcgcaacaaaaacgagactttctcatgatctcctgcagacgaacgcagccgtttgtggtcaaggtaggagcagtgctacgaccagctcgggctcgttcgtatggtgcaatggcattgttactagcagcttcccctcgttttcctcacgcacatttttcaaatgactaaaagatgtgttttttaaaaaataaatttatatatgaaagttgtttaaaagattaaaaatttagttactgcgaatagatttttctgttttctgtgcggaaccactatgtttcaaacctgaacatgcaaacacagttgagtggcaacgtcaacggagcaacggcagctgggaagcaatttaatgccgtgtggcaacagagcaggaacggagtgaggaagcgccgtttgagcaccgtcaagctgtcggtgcagctgtcggtgaggcagccgaacggctgctgctctgcttcacgtgctgtgcagctataaagcagccggctgctaacgaaggtgtcaccaaaacttaatggaagatatcaaattaaatcgggacttcgggagattagagcaaagctggtaatattaagcatgagaggatgctagagataaatcacacaaacacgacagtagtaggaacacagtgaactacacatggacgagtacagacagattttagaaacacaatacatatagagaacatatccatgacagacatggctatgttaattattttaaacggtgcaaactaaataccatttacctgttgtaaacttcatctgcaatggtatcacggagtgtattcattgccgccgctctgttaggtacatcgttccagccacgtagggtggagcatctgaaacgatggggtatccattgtacaatgggttctgtgtaaggaaatacatgtcggagctgtcaatcctgaagttatgtagaactaatgcacaatgtatgatcttggtatggtcgtcactcctaaggaaataaggtatttccctcaggattctcactggcttttgataactccaaatgtcctttccactatgttacgctacgaactgtgcatttagttaaaagtatcttcctttccatggggcaaggctgctcccttattacccgcaaattcatccaagtggtaccaaacatgtgggtaaggtggtaggaatctataccggctagcatatcccgagtccacaaggaaatatttccctgcaccaacaaattagcgaagtgattatttctggaaaatggacactaacatttgcaattgttgaacctaaaattcaaaacataccccatggtagccttgggaaaacaaacggatagccccgtactgcttctgttaggttgatcatgcacagaccctagccacccaacatctgcaaaaatgacacggtcgtccaatccaatagcgacgaacattcctagaagttatgtggtgacggttcctgtgttgaatggaatcatccactgccacaatgcaatgaatgtgtgctccatccactgcaccagccgcaccagcaaatggctggaattcttcatcattctggacacgataatgaactcttgcaaagttaggatctaccggcttatttatgtcagcagcataaaccgcattaagcactctatggatgtacttagagacagtagacccagatcttaccatcctattattagtggccctatttgaattgccccccgccatgatgtacaaaaatattccaagtgcttccattgggcatacctcaattgatccatgaagattgtatcgattagtaagtaacccaaacagagcatggatttgatctggcatcagacggaaaattgcttggcattgagatgggttttccattgtctccatcacccattccattccagattgttgcgatacccaacgtgctgccctcacacatagctttgccttcaaagccgcaaccaacatgtccagaaaggagtcctcctcctcactgtagtagccatccttagaaccatatgatctttcagaagtgctcatgttcctatatcaatacatgacaaagtaaatcatggttaagttagaagcctatgtgctgcaatgacaaaatgattctaagtaggtagaaatcgaaaggttagttcacattattaaagtactgcaaaaaaacagtgattaaaataggcaacatattagtgcaatgcaattgtaaattaagttagcaaaccacaaaaagttagctccttgtacaaaataagggcaatcaacaaaggcaaataaatatcagctcaacataatttattcaagcactgcagctcacatagttcaaattaatggtgctgaaattgttcaagaagccactcaacttagggcacctttgaattggaggattgtcataggaatttttgaggatttaatttcctaagaaatttttcctatgaaaccctttgattcataggaaagtataggaaattttccttaggattgcattcctatagctcaatttcataggaaaataagcaagaggttcaacctcttggaaactatccttttgctttgtttgtttcctatggtgctatcaaaaagggaccctcttcatatttcttgtgtttttcattcctgtaggattaggaaaacataccacttcaattcctacgtttttcctattcctgtgtttttcctatcctgtgtttcaaaggggcccttaaataaggcctacaacaagcacgatgctcgatatgaatcggagcaagttattaaacagacatcacagggaaattaaaagatgcatcacgaacagaacatggcaccaaagcgacataagcaagcagaagcagtgctaaaacattgctgcaccatcagcaccaccattagcaccgtcgctaccatcatcgtcatgaggactgaacctcttgtaccagccctcaacatggcctgagcaggttggtggtggcggtggagcaaacaacagggggtcaggagtgaggtctggtgcaccatgcagctggatgaagtacatgcgaccctctggtgtggtgcagtcctcaatgaagaactcacacaggtacccatcacgaaacatcctcaggattgtgtggtagatgggatcctgcatgctaatcccatcagccttgagcatctccatgcatgctctagcgctcttcgcttgcttctgctcctccctcctggccttactttcattggactgaaccctcaggtcagccagcctattaaatgcatctccggtggagtccctcctggtccccttgctgttgccacctgaagagtagctgggagtcatgattctcttgccccttctgcgcggacctaaggatggctccggagaaggtggtaggagtgccaggttggtgagatcatcaacatctaagatctgagcttcttggaggaccggtggtggtgccggcctgtgtccaacaacgccagacttgttgagcgtaactatcctaccactatacactgcgtgatgctcaggaatgaacttgagaggtacattcctaaacacacggacacctctcctcacctgcagcaaagccataacaatttggattcaatatgaaggtatgaaatacaaagagggcagctaataatgtgagaagtacatgcatttcagatagacagtgcacacagaaccaaaaaaacattaaatcacagttcagctgtgcagttcaatcaagtcaaaatatgcgttttctgtcataattggttgtgccctacacataacaggtttcaatttggtgcaaaaggagcataaacttcagttagatgtatgtattatgtttagttgtgcaaggtatgcagctagatgttttcaattcagctagatgttttctattcagatagatagtgcattgagacatggtactaatagtaagctgtaagatgatttcgttagaaataagacattagcatttgtaaatttcagcagaaccatatgaactcacatatgcctgtcaaatcaggtaagtccatcaatcatatatacaaatagtttcacagatgtatcaacttcctatagtacagtcatgttaagttcatctagcatgcatatagagatgtatgtagctcttgctaagattaacgatctaacttaatctaaatatcaggaaaaacatttgtactcagatatatctctagattcagttaagtcattcattcatctagcatgtatatttacaagtaggttctgtaacctaaatgttgtaagttaacctatatatgaggcaaactagatgtactcagaaaatgtccaaaatcagttcagtcaatccttcttctctacacctataaccatgtaaatcacatatgttgaaccttgcatattcatatatattcagattaatttaagtacagccatctaagtttagctgtcagatattcatagtagttttaattagctatcctgaattcaaacaaaggtgtttagctcacttctaatatagtaagttggcatcattttgacaacctacagtgcatctatacccaacaacatttctgtatgttaactgtatgtaattatcatggatgtgtcaatacaaggtgcacttagcataaaacatctgagtacgactttctagcaatttgagtgcacacatggacatgcagaaacttacaaggatgctcagaatttattatctgtgttggcagtacagctgaccaaacatttcgacaggcagttggcaaattacagcagtcatattgtaataaaatggaaactatgctgcatgtagatgattaagtaatgtacagctgcatagtttgacatatctacatatggtcagaactaacttaagcatctgtacagacagcagtgctgtaaatctcatatcttaatgcatgtagagtcatatatatgatcacttgaaatcagagcaactggcactactaatatgttatatgtcatgtgataaatctaaaggcctatgttgcacatagctaatatcccaaacaatgcatgaattttgtctggcctcatgcgaaacacattatggcactgagctgcattggccattgtctccatcattcactgcatccctgcctgttgtggggcccgtcttgcagctctaccttgctcatgggcttccaaatcagctaccaacatgttaatgatggagtcttcctcatgatctgcctctggctcaactctaacttcctcaaaaccgaaacggtttggtgcacgagcagtgcgacgggggcggctagccatctaaactcccagaaaagggcaaggtaagaatcagataagtacttaaagaagccaagaagcaaagtaaataacaactcaaatagcatacacacaggcataaactgaatttctcaaatcataaagacacctgataaaacgggtgtggacaagtcacagatctacgtcgagcttgactatacgcacaccacctaggatatccagactaccatacaacacccacatcaaacacacacacgcactacctcgccacgactccaaaagagttggcagcggaacaaaagggcctaacacccgaacaactgctaaagactgcctcctctactcctcgcctgcctagctggctccagtggtcggctcctcagtcgaagagacgtagattggcgcactcgaagagaccagcggaacctatcgagggccggcagcagcacgggcagctggcggaggggagctaggtagtgaaagtggaacacagtggaggaaccaacaacatgcttccgtgcagtgcggataaagcgtgggccacggcgagaggaagcaactgggtgtgtgtaacaccctgaaaatttgaccaataaaaacaaaactctaaaaatgcggaccttcgaaaactttttaaataaattgcatcatgccgactttatttgcctattccattgaattttgatttcgaagtttgttgatcgcgaataaagaataactaattaggaataaaccctaaaaattaattgggctaaataaataatcggaatacaatttaaaataaaggttgaggtgaggatagaaatgaataaaatattatcgcgatcatatttgtttcaattaaatctaaatagacggaatgagaattaactctaattaaaatcaagtaaattatataaaaataaaatatgggtacaattaatctttaatctggagtggatccattggtttggataatacacatattgagtaaacttcatttatgcaagatttataaattatagaatcaaatttatatgggaaataaactaaa

SEQ ID NO: 10416 - DNA, 11333 bp, Oryza sativa
attataggtgtcggttttttaagtacaaccgacacctatactgatactatatgtgttggttctactttttttatcatgtgagggtgggaaaaggggccggtttctatgatggttttttagtagtgagtcaacgatagcacggaatggtgatggttgaatgcaataaaatctccgaaggaatggaagtatggaactgagactccaatagaattctgccgaaaacttcgaatgaaattctaaattaaaatatgtaatttcagccatattctattttgccagtagcagtattatacgtcggtctacatgtacgaggaaaatggagaaatggtggaggtatagaaccgtaggagtagtttgtgtacgtaaggaagaggtagaaccatgaaatttcagcatttgtttaaggaatttctcaaaatttcagatatttgaaacctttgcatatgcaacatatataaatatcatctctatacacattacaaagagatcataattaattgggaagtgtataccgatcgcaaagaatcatttgggaatgaatcagctataactgccgggagaatcttgtatatgctgatctacgtattctttaagataaatgtgatatgatctacgtctgcataatgatgcaggatcgtatatgctaatgcttgttgcttcagaaaaaggtgtgaccaagacgaaaggtgcagtacgggaatcagaatgacaaacgaagtgtggtctcaataatagaactaatgagctatgtattagtcaggaatcagcatatatactctcaatcagtatactgccttgtcctatacatatatagattcgttcctacggaaatttcggttcctaacagttgacggtacgtcaaccatgcagagtgctagacgacctaatcgattgatggatattgaagatatatatttctacaagaacgattattggcagagtgcaatttttttaaaaaaaatggttgaggtactatagctataggagcagtatcggataataattgatcacatatcgctatagcttagcgtatatacatagagtacgtgacttacatatcaagtcaagtggtcttatcttatatagaaataaggcctgtttagatcccacctcaaaatttttcaccatgtcacatcgaatatttgaacatctacataggctaaaaaataactaattacactgattgtgactaatttgcgagacgtatcttttaagcctaattgtttcatgatttgataatgtagtgctacagtaaatatttgctaatgaaggattattaggcttaataatttcgtcttgcggtttactaatggattctgtaattatttttttattagtgtccgaataccccattcgacaccctatataataccttacgtgacaagccaaaactttacacccctaaatctaaacaccccataaataacaaatatatgagagagcatataagtaacaaaatatacaaggagtgcattgatgtgtgcgcacgtgggaaacatatcctatgcacgccagctggtaaatgttatcgaaaattttagaaaatattgtacacgtagttctagtaaagtctgtattcaaattcactatatttggtcgtagaaaaagaacaaaattctgactgaattatattattaaaactgtcataattttgtatttttcaggctaaaatataataagtttaaatatgaaactttgcacataggtatagtgtaccattggaagaacatgcataattttttatatgaatttttcataacatttgctagttggtatgtacagcatgtgcgctgaaagtttgtgtttataagtctataagatacatttgccgtgctatgagtgcgtcttgagtaagtagacaaatatgaaaccaggtataaattctaacagattctaacatatctcttgtagtctttctatgcaattcagctgatatagtgtctatgcttcttgtaaacgcctagtgaagcaacctccctcgcaacaaaagaaaataaagtaaacttgtgcttcgaaacacaagattattagttttatgccgtgagctttgaatttttttagttcaacttttcttttcttgctttagtttgttcgttccttacagcattgcaagaacactcttttgcctaattgcatgcatgcctgacgatgcttcccatgcacgcctagtacgtgttttacacagcacgttcttcataatcatagctcttaaggattcagtccaaagttaaacgccgagttgatatacgtcttttaaccgaaatttaggagcgaattttaaaattgatttggagatgttagtaagatttgatccacggaacacgtatgtatatatatatatatatatatatatatatatacacggcaaatacttctactgcatgcaaattaaccaattagttaagtgagcatttgctagctagtttcaagaggaagaatgttttactagtccttgcaaatatctctacctctcgtctccaaggagaatataaggaagcttttttttttctgtttgtgtttgaacaaatactgaaccgaaagtctgataattaatctgattaacgtgcatgcacatatatacgagctgtgagccgaaagaaaatggttgattatgaagtacttccttcgtggttaagaaaaaatgttagttaattccgccaaagaaaggcaagagtgaaaccattctttttgtctctttgacggtggaccaagattccagttactatatagacaattccaatgcagtgcatgctaaggcatatgcatccttggttatggcatgtttaaacatagaggttatatatatgactttttttagctgtgattagtcaaactgtttttgaagaaatgtatgtttcgtgagtaatgccactaatatgtgctgttataaatgctattcctttgttattaattccataaaatccatgaataaaaatgtcagttgttctaatttgacgacaatacaagatatgagacaacattatatgtataattagcggacccgccaattaatatcatccttctcaaaaaaaataaagtttgcaatccaaaaataatctgcaagcaaggtataagtaacctttcaatgttgttggcccctttcaccggtttcaatgcatgtgttgtgcctgcattgagatgcacttgtgtgttaaggaaaggaggaaactagtgctgtgctggctagtcattttataagttcataggtcgtcttcaagttggggtcaatgggaggaacaatcgagaaagcgacctccaaatacttgcagtattttatgacggattattcctactaatccagctcccctgatcctggcctaaacactgtctctataaatagaacaaggccgtgcaacaacttgatcacaagttaaccaggtcatcaccaacatacaaagctaacaccactagcttagctcgcttggtctcccaaaggaagaacatatatggccactcctctcaaccttctcattgctctcctcttcatcgtcgtctccgttcaaggtaaatcttgtaacacaaagagagattatgtgttagtacaattgaagtttcttgttagtataaattaatttaagtttcttaatttcttttgatgtttcaaaattccagtgtaaaaattatttcaacttagatatatgacagatggcataacaaataatcatccatctttattgggacacttatcttcacaagtgaatgattcctctctaacccctagagctagctagttttagtcgttgtaagcacatcttatatatgcgaataattgcaagacaaattaatagtagttatttttctccagttaattatgcatgcattttccttatactaaattgttaattaacatgaattaatataataatattgagcttgatcgatcgtcatgatgatcagggacaaatggggccgatcgctgcgccgcgtcgagcagcatcgatgtgcagaccatcaacaccggcgaggccgcggccggcggcggcgacacggtgttcgaggtgcaggtgaagaacctgtgcggctgcagcgtcagggacgtccggctcgacggcggcggcttcgcgacgacggtggaggtcgacccggccgtgttccgcgccgccgacgacggcggcgactactacctggtgaacggcggcgggccgatcgccagcatggccaccgtcagcttccgctacacctgggaccacttcttccagatcactccccggagcatggaggaagatcagtgctagctatagctagctacatacacttgggtacatatgcaaagttggagggaataatattcttgcgtgagctaatacacatgtgttgcagtgttagctagtactatatatactaatgttccatgaaaagctaggtcaagtgtggaagaattattcctgcatgggtttatatatgtgtagtacagtggtctaatgtgtactgagtgagggatcgaatattacaaaaaaagtttagctcaataatgtatacggtcttttgcatctcaataaatggtttgtaattgctagttactttccatctggatatttagaaagttaaattgtatcttgtgactaaaaaggttgattacaattataagttcctagaaatttaaaagagattttgcctgtcataaactcaagattagaaatgaaacgtaaggggctatggacagggacggatccagcgtgggcgttagggtactcaagtcctctctaccccgttgtaccaccatcgagagaaggggagataggaggggaagaagagaaagaagaaaagctggaggaggaaggagataagccgcccccatctatacatttcttgtatctgcccatgcctatggggtatagctagctaggtagacacatgaacaaatctaagacaaatctgtaaagtcttgtgtagtttggaggggttaaaagggattgggggagcctctctcatagggattaaccgaacatggtctaaaacggtacacagaatcatttgattggacttgtagggacatgctattgagttcccttccttgacgtgtgtatccgggctcctgtgaatgcacggtctagcggtcccgcattgtagccagccatcagggtattgcttgtgggcgggtaatcgctttcccgatctcctcctagcgatcacccgtccctcccccctatacgctcttcctctcccccttcctcctccccttcttctcttcctactacaatacaccataatttttttttaaaaaaaaacaaagttggaaaatttatgtatagaaatactatatataaaaaatttaaattcaaattcaaatttgaaactggtatgtaaacttttaacttataaactttgggtctataaactaatatttgaattcaaattcaaatttgaatcgggtatgtaaacttttaacttataaactttgggtcaataaactttaggtatataaactttagatgtataaaaatactatatataaaaaatatttgaattcaaattcaaatttgaatcggatgtaattcaaattcaaattgaatcgggtatgtaaacttttgacttataaactttgggtctataaactttaggtgtataaactttagatgtatagaaatactatatataaaaaatatttgaattcaacttcaaatttgaatcggatatataaacttttgacttataaactttgggtctataaactttaggtgtataaactttagatgtatagtaatactatatataaaaaatatttgaattcaaatttaaatttaaattgtatatataaacttttgatttataaactttgggtctctaaactttagatgtgtaaacttgaggtgtacaaactttaggtgcataaatttactaaaataggaaagtaatgcggtgtcaaaaaagaaaaccatgtggaggagaggggggcgtgctaggggcgatcgatcgcccgttagcaatctcgcagccgtcatgcctatgtcctgattctatttgtattaattggtttgtataaattgattatagagataagacaagtgctaggctatatattgtaacattgatctctcaatcaatatcaatgcgatgaatatctcgctaacaatacccatagtgtcgaacctagtagatataatgactgctcccctattaatggttgtttctgcctttattgacttgacctcgctgatgtctttgccctctagatatatgtagggaataaaagcagagcagatttagataagtagtggttataccaaatcctataccatattttaaagcggatttagattaggtgtagatgatgtgaatatgcggatgcagagcgaataattccggatgttggaaatggtgccaagtcgattagaacttagctcggaaatagattaaaattgtcggatgttgcgtatatatgcaatcaaatacaacatcaaattgcttatcgtcatcaccacattggatctcacatcatcactaggttggaacctacactatagatgggccgggccgggcaagcatgatgggccttcgtgccttcgggtcgacccggcacggtccgagtagtattgggccatgcctgggccgtgtatgccgcccgtgggctggcacgacacggcccggtgcgtcagtcgggccgtgccggcccgacaagcctcgccccaggcacaggcacggccgggcttgggccgtgccgtgccgggtggcccatatgccatctataacctacactactacaaaatcaacttttgcataccgtcaaaaccgatttttgaaggtagctgggtcacccgcatgcactcaggtatttgcaaaaatcggatttttgcatgcggggagagcaatcgcatgcgaaaatccgatttttgcatgcttaagccgtccggttgcaaacatgaaaaatcacaaaaaataaataaataaaaactccgaaaatcgatttcctttagccccaaaaccctaaccctagaatccagaagtcgccgtcgtcaccgtcctcaccatcatcgtcgctcgaagccgtcagaagatctgggtgagtgggggggtggagagacgataggatccgcatgggaggggtaaggggcactggatccacacctttcgtcactgctaccgctaccggagcctaagctcgagctcgcaatccttgcctactgaaagtgcatctaggccccaattgttttgatgattaatgacaatacgattagagaggactaacacgtttgtttacgtgaatgtgaaggattgttagtccgtgacaatatgtagcgcaatacatatctcaatgaatgtgataattcatgagttgcggcaatgatcaaaggttatattgtacattttcaattcttcatgtcattaagagggattatgcattgacatatgaggagtgatgaatgtgctcaaaatcaatttttaaaagtgtttctcctcagtttctgtgttctggaaattttcgaagttgtctgaaacagatttttggaatttccaaaaatagacataaacaattttagcttctagaaattttcggaattgtccgaaaagtgattttttggaatttccgaaaatgaccgagcagcaaaataagtttctgtaaattttcgaacttgtccgaaactggttttcggaattttcgaaaatggcagtgaggagaaaatgtttctgtaaattttcggagttgtaggaaatcaatttccggaatttccgaaaatgtctgcgaaccaaaaatgcttctggaaatgttcggacttgtccgaagggtattttcggaatttctgaaaaatgtccagaaggttgttttggttctggatatttttggacttgtccgaaaagttttcagagtttccaaaaaatcctcagttgactttactatttctctaatctagaaattttcggatatgtccgaaattaattttcgtaatttccgaaaaatgcaattattgtgcataacgggcagatctggagctatggctataaatagcccactcgctccacttgtgagggttgctagactgattggatatttcgtgccaggcttgttcatcttaagattcacttttgagccttgctttcttgtgtcccctctctacttgtgtttgactcggatttggtttttgtgtgagagttgtggattcgagtttgtgtgagtgcttgttgttggcttcgtgaagatttgtgagcacttgcatcatctccggaagttctttgcatcatttgttactcttggaggttgaggactcctagacagctagatgtcactctcgagccaccgatctacgtgtggttggctgggagaagtttgtgaaggtcggatctcacatccgaaagggaagatataccactaatggaaggagtgttttgtggaacctcttgaggaaatggttagcgaagacccggctctttgtgagctcctcaacggagagtagaatcccctcatggatttgaactctgagaacaactcatcttgttacaactttgttgatatctcactcctctagctttgcttgtttgtgctgctataggtctagttgctgtttgtgctagtatattcttgttgtaggcagctagatctagaatttatttgaattgcgcatactctactattttcggaaataacgaaaatcattttacccgagcctgctgcccttacccatcaccaacagagcccaagccttgcccaactgataaattggactattggatggaccaactcatgttatatggaatagatagagtggttacatgagctaacaattttcaattatttggcaaagaatctattggataatcctcgtcaataggattttatggataccgcatctacacccgaatccacaccatactatctgagtccgcatttttatcctccatattttcataaacccataccatatcctgatttcagacaaatttggagtggatcagattttatctgatctgtttggacctttagatatatgctacagtcggttcaggataaaatccaattgtcccagaagcaccaaccaaggataggaaaatatattcaaggagacaaagttgtgaaactgattgagccataaaaagaaggcaacacaacctactcaagccatccatcctcgttgcgagagtgtgaattgtttttttagtttctcctaaaaaccttccatttcacccatgtgacagatgtttatccctactttatctaaatcggcttcactagtcacttttaatctttcaaacccatcttgatttagatatgtctacattgaggtggttcgcgactccaaatcaccacaaagagttaggtgccggattgtgattagtggcatgacaaaaaaaaaagttgccaacagtcctcccgtctcacctctcctggccaccgccaaatcccctcctgccatgccttccccaatcaatgccggatccactcccgccaggcctcctctaaccgccgccggatctcctcctgccaatccataggcgacccccttctctttatccggaatctaacatgataggagcaggggttaggcacttctcgagataactcgaggtggtcggtgcaggaggggccgctcctgctatggcaggggggaagcaacgacaccagcggcaggcactaggaggggagggcccgtgcggcagcgaggcatacattggagaagatattgggctgatttggtttgaagccaaaacttcccataccaaaatattggtattttgaacagtaattttggcaatgtttgatttgctaccaatacttgtcaataccacacaaatgttgccaaaatattggcattaccaatagtttggcatggttggaaaccaaacaagcccgttattcagagaggtttgctgctttgacgggctttgatgggaatattgacggtgatggtatatttttaatttacgtaagtaccagtggtgcccacactattttctgctttattagtggcattttttttccagtacagcgattttgtaatggcatgatcaaatttaccatataaacaatgagacagagtagcatgtttaattatgcataccgatctagtgcttcccaacgaccccatagatctgtcatcatgttaccttgcctgtcaaattttattatgagaaacaaactaattaactactaccactgtttttttaatatatagcgccattaactttttgacaaacgtttgatcattcattttatttaaattttttgtgcaactatacaaattttgagtcatgtttaaataacatttgacaataaatcaataaaataaataataattacacaaaactgagggagtactggtttctagcgattgcaaacagacggcatgggcgaattagaatacaaattacttaataaaatacaaagacattgcaaacaaaatggattttgacaggcccagcgcagtggtagactgatggtgcactggtattcaacctgcaacagcagaatgtataagctcgtttggacttttgagttgaggcaaagtgcataagttaccattcaaagtttagcacatatacatattgtttaaaaaataaatgcatgacctatttgaggagaatgaatgcaagtttctagattgtttatgagaacagagaaggaacacatgtcaggagtattaaacaacagctataaaaggcatacttcagacagcttggcaacattagtgagtgttgattctggaatggattgtttttgcaatttcatctagaaaactcatacatagagttcacataaagatccttctcacactgctgttgagtaaaaaaatcagctgcgctttcggcaagagtacagcttttcatgggcagcttacaactacaagtaaagaatgacagtcccagtcttgctaatcctgtatatacaaaccattgtttctcaaaataaacagaaaaaaaaatgcatacaagaaaggaaggcaacctacggtaaacactgcagtatatgagtataaaattgaggcctctgtgacagccaactcaacggcagtgccccttatttctgaaaaagcatattatgccagaaaatggttgctgaattgaaatacagtttgatttccgttcttcgcaacaacgaattatccaccctccaacaaggagtggggatggtggttccatctgccttgaccacccttcaacaatcatccctccatgatcatggaatctgcaagagaggggcagcttttgacatgctttccatcagatgtaaatgttgttgatgtcactaagttgtcctagccatgctattgaatgaacaagctagaggcatcagaaattcgcatcctattgacagaaagcacccatataaaagacaaaggcttattggaggtgacctacaagctctattaattttttcgtacaaccgcgtacaaccatctttg

SEQ ID NO: 10417 - DNA, 12975 bp, Oryza sativa
cctgcacgacaactacaccaagccgtgctcctaccgctcgcagtacgtcactcaaaccaccactgcccaagaaatcatgtccgatctcttcactgctttggttggtttgattaaaatttgaaaatatacctctctttcattggttttgtacaaatacactcatttagaaaactaggaagaaaatccgcgcagatgcgcgggcatctgatttattcttttacgaaaataatgcttacagaagtcatatatcaccatttatactccgtgaaatagattgtacattttaatatatttaaatgataaggaggcctcctagattaaataaaatcatttgccccgactacatataaatgttcttaggacccgttctatactccaactgcaaacttcaactttcttatttttcattagcacgcttcccaaattgtgaaacgctatatttttgcaaaaatattttatatagaagtttaaagaaaaaatcaaaatttcaagtttacaataattaatatctaattaatcacgtggtaatgaactttctatacctaatcacttcaacttactacatatgtacctattcatggatgatactacatatgtaccaagaaaatacgcctaatacatcattaaaacaccgaaataaccactacacgtaagtgtttcatgcctcacctattttcaaatccatatataaatattgtaaaaaaaacacatgtacaaatcaatgggacgacatcattgaagttacaaatagatgcctctctaatgggtgaagatggatgcgatcaaaataatattttttaaaaaggttttgagtatatttgtggtatattgtagataccatttatcgtgttaatcataaatactcaaatggttatggtatagatataggatactctaatttgaaaatgagcgaggttatcaatcgatggtactaaaaaaattataactaaagagacatactaccatgataatttctagggcaccatattattatttatattttgacaaatatctatagtttaaccattagtttattttcaacacctattgttggtaatcacatgagacacctttactaagttgaaaaacatatttattttttaaacttattaacaataactaatatgtgggcgaatatttatagtcgcatcggtgaggtatgtgacatacatccatcaaatatgcctgaaatgttgaaattccttaaccataagaaaatataacatgagtagttcatttgacatgttacttgattgttcatttgttgtcaaaactatttggcaaaggaaacaaaatatacatatacgaccataaatctcattaagaggttatgttatagcaatattattaactcaaaatattttttatgattattttcacatctacgtaccatgtatgatactcagttctcaaataccaaatagttttgaaatattcataaaaaactttgagaatattaatctcgaacaaattaaaattatagtaaatttcacaaaactataggtactttgatcatctgttgttttgtgaaatttagccttaaatctacattcttaaatcatgtctacttgagaaaatatgaaactaaattttggtgtttttattttttgttttacatatgtagatttgaattagcgtcgtataattttgaagtgatttttgaaaccctaaattatgatgtgaaattattttaaaaattatcatgatattaattactatttgtcagccccaatgcgtcatgatgtatttacgataacagactttaaaaatatttaactaaaggaatacaacggtatcacacattaaatatataatttgaaaatattttaaaatgtgaacatttatagaacgttgatttgatatttgatatttgtatcctagatctagtttgtggaataatatattttatttttatatggtataaattctattttagagatcctcgatttttttaatggttctacgtacgtatgtctttttttggctttatgttatatatgtagaaagttctatttttgattttttatactacatacatatatttttttggcttgatattttctttttcttttgcatatggttttttttttatcgtaagaacgtgggcatgtttttgttcttgctgtcggaatgtatttaaggtttaatgttttttcccaatcttacgtacttatgttttttgtttttcccgacgaacctattttctctcgtacatacatatggaaggtattagtattacatatatatatatatatatatatctaatcttgatctaacataatgggtccacttatttaaatgaaaagcaatggtacatatagatataatctaatggtttaaaataacgggtccaacaatttaagtgaaaattaacagtgagattaaacagtgtcacacggcggtttgggattgttagtacaagcgcgcgcggcacatgactgtttaggaatgtttataagaagtttaataaacttttagtatttaagttataaattgaagagtttgttctaattaaagtacttataggattagctactcctttatttatttgtagcgagtatgatcatcaaaaggataaatggtgcattacatggtgtgtgctttgcaaatactttctatattaaagttttctaaaaacaaataaatcatttttatttttgtaatatttaatactcaattaatcacgtgataatgatatgtatcatttcgtgtcctgataaggtcacttaattagctagatcaaacaaagccttagtattccttaaagaaaacaaaaagagtaattattaagtctatttaaatgagtaagacacaaatagctaaatatgattttatgtgataattttttaattaaaatatagctaatatgtgatgtactcgtaatattttttaatagaaattcagatacctccttttcttttatatagtaggttcatatatgtacttggaaacatatatcttcccaatcgtaagtacattatgctcttattcgtttttttgttactagcaataatgcccgtgcgttgcaacgggtgaaggtaattttaatcatgcatactggtgggaaaaaagataaaggaatcataatcataataataatattaatgaaatgaaattgcagtgacctttggtcaaaaagataaaaatatataattgattttccgttaattccattagctaaaaataatataatatgaagtaggaaaagttattcttgaattttagcaattttcaaaaagcttaaatagaacaaactaattatgtaaataaaaacaattttaatcacctaaataaaacaattagaactgcaattaaaaaatctgttgccagcttgtttaaacatgagccggtgggtgcgtgtggcatatatctctcactcgtacatcgtggtaaattttttacatagaaaaaatgactgtgcgttgcaattataacaaatataaaaatattatatgattaaggtttagttttacatgatatgagctctttaagaaaatatattcataatgaaataaaaaaaagttcagctgaagggacctaaagtgaacttattccacacagagcgtacacgcggtccatgaggtggcccaatagtgtgggcggcatgggaatagaatcggggaggaacaacttaagcgacctaaggtgaacttattccatgtgggtgacctgggaatggcgttcagcctaacgtgggagaagctgaagctgtccgatgtgatagatggtcctgattgatcccgacctatataaaagttcaacatcccaaaccctaaccctaaaatcatttctcctcccccctctctctctcaaaacaacatgacggcggcctggcatacctacatccctgcgacggcggtggctgttcggcagcgatggcaacaccctccccttccacgcgtcggtgttttcttagtattgttgaatctgatcttgtattcttgtagtagtgttttctctagaatttaggtccaaattttgatgcggcctctcattattttttttctttcttttcttttttttttggccatcggagagggattaaagcgggatcgatcgcacgtgcgatggaatttttttttgacggacgaaaactataacctgaagccatacaaattttttaattaggtatatatagaatcggactttctttttttcatgttttttcaccctttttttggttactacggacgtcggaaatgtctttaattttttttaccgcgtcatatataatcggattcgattttttttcgcccgatttctttttcacgctttttttcacggacggacgacggaaacacttttatttttttattttttattatatataagtagtagagaagagatagagatagagaaagagaaacgaaaaatattttttcgcaacttttctttttggaatcggacagaaaaaaatgttcacgcttttttttgacggacgacgagattttttttaatcggacaaaaatatttttttcactattattctacttttttaggaagacggaaaccgttttgtcgcacctttttttattggacagaacaaaattttcgcacttttattcgcgcttgatttttttccatacagaaatctttctttccttttttttagggaatttccaagggggtcggacttcttttttttgtttgtttttttctcggcatttttttttctcatggacgaaggaagcaggttttactttttaagtagttctagactagatagatagaagactagatagattctagatagatagaagtagtatacgtacgtacacggtaatttttttcccggtaatagaacgtacatgtttttctcctgtgaatagttgtacatacacgggagacttgttttttcttcagtttttttattgtggcagattatctaagataatgggtccaccaatttaaatgaaaatcaactatacacatagatatgatctaatggtttaaattaatgggtccaccagtttaagtaaaaatcaatggtgagattaaacagtgccacatggcggtttgggagtgtttatagaagctccacatggcggctcaggagtatttgtaggaagtttaatggacttttagtatataataactagtaaggtagcccgcgcagttgcgcgggcatcttatttaaatttgttattaggattttgaatattatgactttgtctctcaatgaaagaatttgaatgttcctttataacacatgattgaaaaaaaaagtataaaggccggaaacatgttagaaatacatgtgtaaaacagcgaataaacaaatttcggacagtaaacgaattttgtacagaggacataaataacatgaattttaaaatttgttaacccacatagatgaaatcatcatctttcattgcataaataaactgcagttaaccaaataacctttccgttagcagcttgattttatcgatcccatgcgaagggaaaaaacatacgcatgcatcttattactattttattaattttattgctatagagatataccgtaaccttttggatatcagctaatcgttatgtgcaccgtgcatggatacctcgtaagcaatatgatttagggattagtagatagtggtagtgtggatatatctcgtaataattgatcaagtatattgtatactacatattaagcgttttagtagctttctaaagagcttatcggagtagctactcccttatcctatatatctataaagttcattctcaataagtgttctcaataagtatagttaatgctaattctctcttctctcatgaagccataacacctcaattgtttttagcccttggatgattcatcaagggtgcaaattgcatctcttctccccaaaagccactccatacaaatcaaccatttataacttttgaataattgatgaaggtacaaaatattcaagcacatgaaagaaaatcatatagtaaataagatattttttctactactcatatctactattttatcacacaattctcctacagcaatgtgccggccatctagttcatagtgataacgtttcccggactgctaaacgtgttatattttatctttttctgataatttctattattttctctaatttattatagtactatgtacaattttaagagtgttcataagatgtttaatggactgaaacttttctatgtttatttttgcatggtatcagtaggatatgaattttttcatcagacttactataatgtattcgtgcaaattaaaggacggtatagtgatgcaatcaataggaatcccaatcgcacactttttttactataatccaaaggaggtttaaatttttaattttaaatcccaactatagttttgagctgagttcaaactttttaacaaagtattgctttttggatttcacagagaaaacaaaacgaaagagaggaacatgggacctgcgtgggtacatacttatttacacctagaagtggggacttttagagataaattaaattggtagttttttaagatagattcaatgcatggataaaacaatggtctagcaaaataaatgaaaaccaacggttaaatgctgtttttcttagaatttatgtgatttattatagcgccacgtgatagcttagaagcgtttataggatgctatgtggcggcttagaaccatttatagagatgctatgtggtggcttagtagtatttagacgaagtttattggactttcaatatataattaatagatagatggtagattgtcagtaataaaacgaattaagctgagcataaaaccaacatatattttttataagttaatacatgcaaggatgcacgcatgcatgtaaccctccatgaagaggacatggacagatgtaaccatggtgcttttgctctcaacaacttatgaaaaaaaaaaagaacagatgatgcatatacatgcttgagaggtgagcagattgccggattggacgttttatatgttagctgttaatttttcttttcaatctgtaattgttttttggttttttatcttttttttatttcggtattttttatcactttcggatgtattttctctcatatagaaacggtatattagaagtgagagattatattttaatggatctaataatctaatggtccaaaatatagatccacagtttaagtgttagatgtttcacttttttcttacaattctctaatttattatcgtgtcacatggcgatgtatgagcgttcgtaaaaagccacataacaacttgagagtgttcgtaggatgtttaatagacttttagtatataatagatatattgttatacacgatgtttaatttaatggatatttattatttgctagctagaaattaaggaggccaaagtgagcaaggagagatgacgtaaaattatttgcgaccacatgatagtatatgttattattttttgctatttgtaggagtatttgtcaaacgatgtatttcttatatatcaaaacacatggctaatatagataaatagaatatgttgtagaaaattataattatttagttatctaattattttttacataataaatttattatctaaaaattagaagatggatgggatgaagaaaagagaggttgtgagggagtaacgtacgtacacgtacatgtacgtgaggagtggaggcccatgaggggagcgggagtggatgggatcttggtttattttgtttaatatagatctaatggtgtaaaataatgggcccgctatattaagtgaaaatcaagggtgagatgttttgcttttttctagaatttcttggatttctctaatttattagagcgccaagtggcggtttaggagcgtttgtaggaagtttaatggacttttagtatataatagaaaagatagatagatatttacagaaatataccattgtcgcgaaatgaaagcgcgaaatcgtgcgttactgcatgatgtcgcgcgaggtgtgcgcgagaccgctcggtctcgcccagcgagtgcgcgagaccgcgacttcgcttacctaacccgtgtactcacgctatcaataaattaattagtgtaattagcaattaattaattactattactcctttaactaacatcattagtaattaattaatcgttaatcacttgttaatcgtccactgatcatgagtcatgtcaggccatctcgcaaggtgatgaagcgagaccgccggtctcacgtcctgctgttgcgataccgtggcggatccggcggaatcacgccatgattctgcgagaccgtggcaaagcatcacgttgtcgtcattttcgcttaacggcttagcgatatcgtttcgatttcgctctttcaatcagcgacgacgatatatttgtgctaaaaattttacatctcggatatttataaaaaagaaataaataaatagtttactttcaaatttaattcttacaattgctgcaatctcgtggttctcctttgctggttttgtttggaaaatctgagtccgatctgtgtccaatacggaatcctcttcgttttcccttcttgtgtccgacgtggtgtcttccttgattcttctcttgtgctgccacaatcacgaccaaaatagaaacagactacgtgaccgagtccatatcctatgttgcagcccttctagatcttagtcctgcacgaacccggcttttcccaagccagctaccaacaaaaccgctctagtctccaccttcggctcggcctcaacgtgaaatcatgcacaccgccgtggtcctgacctcctgagcttcacgtactgccaccacaaatttcactgttgtccaacacctccagtcaattccatcgacaacgaacgacatcaatcggactcgtgcctataacagtaccaaacttgtagattgtacgccgctgttgtaaccatccatcgtgcaccaccttgtcgtcaacacatctccatcagcaccaacgatccacccacaccgacttccgattgaacactattaatctagtcgagagccgaagccgacgagtcgtatgccgtcttcccagccgccgaatgacccgagtgccacgtctagccatctccctgtcgaacgcagctcatcgaaaggccccggccaccccgcccagagtgttcgattccaccgatcgagaacgccgatcgcctccagcttcaatcaaccccgagcgtgaggcctcacgtctccctgttgaaagtagctcaccggaaagttcgagccacctgcccgcagtgtccgacccatcgattggatcgccaatcgctttcgccgccatcaacccgagcaccacgtctggtcatctccctgttgattgcggccatcgaacggttcaaaccgctgcctgaagtgtccgattccaccgatcaaattccgttgatcgccgccgtgctccaccttgcgtccatgcccgtccctggacaacctgtgtagttatcgcaacgtggagcacctccctcgcacctctacgatggatctcccgcaggctctgataccacttgtttgaaaaccggccccgaaatcacattggaaaccaaaccgcggaagaaaatgccataggagatccaaacacgatgatgataccgaggcacgatatttgataacggagttcagccgaggcctagatctccaggcactgattacgggcgctcctccccgatccagcatattacagcgtatcagagttgtaacgactcatggccgatcgccgtcggcagacgctccctctcgctatgctatgtcgccatgcagttacaataggcacgcccctctatttatgagagatcctaggatagagttcgagtcttactctaatcctatacctagtacaactccaagtcataaactgtaaccgattacgtacacatattcgacacaaactctaacagcccaaacatatgagtcacattttgaggaggttgtacgttataagccatatgaataatcgaccagaccaagtgagtaacatgacattggaagaacaaatgttgaatggttccgtccttatgacaaaagcaacatttcttactacctttccatttgcgcttggagcgcaagtttaaacattagcatcaatccacaaatattcaaaccacacgcacaaaagatttatctgtccactcttacaaaaatctcagaaactctaaatataatggcaggatgacagattcaccaccatggcaccatccccaaataggaaaaccattcttattgggtaaactcaaacaagcaccagtcactacaaaagctaaacagaacagcacaaacatgaccgacgacgacgagcacttctgaatagagactagctataataattcatagaagactactctgggtcgtttggcgtatgtgacctgcttccgcgtccagctaactcgtaaacgaccactcttggtgtattggcgtatttacctgcctcggcctccagctcacgcactattgacttggtgatctcaccggctttttcaccggccgtcatgtgcacctcacgaaggctcgcgaggttatccatgccgaagacgccttccagcgtgttgaacttcatatcaagcctttcgaggttgcccatgccctctccgagaagacgagcaatggcaggagcggcgcgtccaagcggagcagcttaaggcagtcgaaccctccatgcttgaccaagatctgcccctctgagtccgacttgttcttttcaagaatgtccaccaaatcaaggtccttgctggatgtccaggacgaaaatataaggcagaacatacgaggtagcttctgaaggagctccaaggtatcagttcggagcaccgtaactgacagggttaagttcttcagttcagtgagatgagcaatccacctgggcaccttgatgaacatgccgtacagctggagggaatggaagtatctcggtggtgaggtcagagaatccagtgcgtcgatgaaaccggagcactcatcattgatcaagagattcttgagcgagctacctccaaggtattggatggaagagagcaaggccttgaagccaggagtaccctcctggatttgtagcttgtgtatcccgagcttcctaagggcagtgtacccgtggaaatcattaacggacgtcggctccccagtgatctcgatcccggacaggatgtgcagtgttcgcaacggcttcttcgttgcctccgctggcaacttgagtgttacctgtgccattgtgtttccaccgagtatactcgtcagccgttcaagctgaacgatggcatcaggcagcttctggacattcgtgtcccttatgtcaagggtctctaagtaccgtagcttcccaatcttggaagggatgctgttgatgtctgttcctcggaggttgagatatttgagaagaagcatcttgaagatgtccttgacatgctgcttcttgaagcccttgcagccttccaggtccagcacctgtacaatgccgagcttgagcgacatgaaaggcagctggttcaagctcccaaacactgtgactgatcggacatgggacaggttcattctgtccatggtttctttggcatgcttcacatcgctgctgtggatggacaggcgacgaactttattactgggtgtccgcatgagccagtgcccgccaaccacggtgataaagttctcctcgctggacttggacatgatgtactcgaggatcatgtcatgaacctggcaggtcttaactttcccgtcgctgctgtgatccacaggcttcaatatgttccttcggatgagcagattgaagtttgtttccgcgcgttccttcatgctctgcccgtgctcctcgctgataaagccttccgctatccatcgcctcgtcaaccgcttcctgctgatcctgctgtcctttgggaacacgctcaggtagagcgagcaggtcttgaggtctgcaggtaagctgctgtagcagtagttgagtatccttgtcatgccttccggggtatggcagtccacggatactggaggcagggagacgcagatctcggcacactgtttctcgtatgcctgtggcttgcaagccacaagaccagctatggttacaatggccacaggcagacccttgcagaggtccaagattttcctcgagacatcaatgtgcgcctgaccgagcatcttgtcactgctagtcatggattcagacacgctctcttggaatagcctcttagcgtcatcatcagatagacgatccacatgatggagcatgtctttctgtctgtcaaggatgcattcccctgctacggcttcgaatcgtgtagtgaccacaactctgctgccttcttcatccggtagatattgtctgattgtctgccatgcttcggcggaccgtacgtcgtcgaccacgaggatgtagctgccaatcaaagttgatcaaatgcaggaagtcagtgatatgcgcgatgacggagcattagagccaagcttgttagtattgggattccacgtagtattgtttttcttttaagttgtatcggattgtatcgtaatatcaggatactatgaattttcttttttaagtttaatttaatatttatattaattatatatagctattctataaagaaatagagtaatagtaatagatgacataaaaaagagagatttgtcaatagaagacccacccactaatgctaatagttttatttaacattgattttatagatacataaacacaaaagcgttcaaatagttttgatttttaaatttggaaaaagtacgaattacccctctgaactatcacggtcgtccgaattacccccctgaaccacaaaaccggacattcttcacccccaactatgcaaaccggacgaattacccccctggacccaatccacggtggttttgatctacgtcgcagtccagtcagcaatttatttattaaaaaataggtggaccccacctgtcagtctctctcttatatctctctctcctccaaacggcgacagcggaggcagcggcgcggcgaaggaggcagcggcgaggcgaggccagg

SEQ ID NO: 10418 - DNA, 36733 bp, Oryza sativa
tatgaggatcttcgaatacggccagcaaatcatctttgagattgacgaagtcaccacaggcgcctggctatcgacgggcacgtcgtctaccactgaaagcacaatgcgttatcgacgggcacatcgtctaccactaaaagcataatgccgttaaatcctggaaaattcactcccgtagggagtcgaacccaggaccaaaggtgctactaaagctcttgtaaacactagactaccggccctttcgcggtgggagtcgattttgatactataccgtagcggagctgtagccgtaaatataatattattaccgttaatattgtggatgtccatattagcgtccaatttggtattggggatgtggaggtccatacattaaaccaagattaaaggtacagatgcatatattttataagtttgtggacctatatccaagtttaaagaccgactgtctatttttattcagattttttcggcatataagcacatgcaaccttttaattacaaatgtaagcacacgagatttgaatttttatttctaaacgacatgcccatatgcctgccttgttactatcagtaacatgcggaaatcagcagcctcggtaactctcttctttgcggctatcgtgttggtctcttacttagctatattcagatttactggaaaaaaatatatgcatgctacgatgatttgtaaaagctgataagtaaaactgctctgcaaaacaaataaagattattagcacaaattatgattttgatgatcctcgtggatgaattagattgaaatatagaaaaatgttacacctactatgttattccaatttctaaatcaaatgctaacaaccggctaagaggaggtggactgttggtctatacgtacacgtacttactcaatttagcatccaattagattgtatccggttgaatagaatcaccgttgcatcttgcctataaataaaaatgtgggtttggcgtgctcagatttggaaatactgtgttgcatgtgcttggataaaaaaatacggatttttattttggcaaatacggaaataccaaatggccatgtaccaaacaggccatgcattttattcaatcctaaatgcacttaggccccctccgaatcataggaataaaaaaaatagaggaatagaaaaaacgtaggattctattaggaatacaagtgtaaaatagatgattgcaaaacgtatgaaaaacacagaaatgaccgtttgattgaactgcaggaaaaacgtaggaatccgatgagagagatggactcaaaggaaagtttcaagagattggagcgcttgctaaattttctccaaaatctctataggatttgtccattccatagaaatttcaaatgataggatatgattcaatcctttgtttcaaatggctttataggaaatttttctatagaattggaatcctccgaaattcctatggtttttccttcaaatcaaaagagcccttaagctgtgttctttccccacctttcccaactcacaccctcatctttcacgcgcacgcttttcaaactgataaacggtgtatttttttcaaaatatttatatacaagagttgctttaaaaaatcatattaatccagttttttaaaaaataataaatacttaattagtcataagaaaatacatcgctccatcttatacgtcgctccgttttacgtgtgcgggaggtgagttcccgactcacccaaatcataagcaccaaacttgagtttctgctctccatagatgatatcatcctagactcatgcatgcactttgacagtgcgtgttactagttgggttggttaaaataaaagagaaaattccaccttttaaaattaatagaaaagatacccgtgcattacaatagaataaactaaaattttgataaacattagatccgtactttgaccttttccgaaaattcctcaaagtcaataaatttcaaagtggattcaattttttcctatcaaattacttttttaaaaaagcaatcttccctcatttaaaatttgttcagattcttatatatcaaaatccaccgcaagatgaaaaaaaatccttatgatcccgcatagggactgatgatggatgaaaaaaaaaaagagaacgataaaagaaagaacgagactaccgatcaggcgcccgattcaggcgtggaaaaatcgaacgctgacatcagcatgcttgtatacgtgcaaaaccactttatgctatttttttctcttaaattatttattcaaatcatgattcgattgcaccattaaattcgttgcaattaaatatttaaaacaagatcacacatggatatattccgataaatttttttagcttattattgaattatttttaaatgttgcacgttgttccaccaaatatatcggaattgtttcactaagtagatcgaaaatgtttaaatgatttaaatcggacgctgtttcgccttatataaaaacaatgtttcagcaaatagtgaaagaatgttacaattcactgcaacattagatctatacatagtgaaacattgtgagtatactaggtgaaacattttttttggaacaaaaataaaacgaattcccttaatagagggtttccaaaatatgtgggtgatttgttacaaaagaatgttttaattcattgcaacattagatctatacatagtgaaacatcgtgagtacactaggtgaaatatttttggtggaacaaaaaataaaacgaattcccttaatagtgggtttccaaaatatgtgggtgatttgttgcaaaagaatgtttcaattcattgcaacataagatctatacatagtgaaacattgtgattatactaggtgaaatatttttggtggaacaaaaaaaataaaacgaattcccttaatagagggtttctaaaaatatatgggtgatttgttgcaacagaatatgtggtagaggcacgtggcaggaggggatagggacacgtggtgggtccaggggatcacgtgcgcgtggggggtgcccgatcctgctccacccccgccggtggcgtccgggtttgagcattttataaaagaaaacactaagaattttatataggtaggtaggtagcgaagatattcctcaactactttttttataaatcgatataactctaaccattattaatatctattttttcaattaaaattttaattatacaattaatcctactttgatatccttgctgatcaaacacaaacatatatatacatgaaacaaagcgtaaaaccttaatatatatagattagcacaacactaatatctcatctatgcacataagcagcccatccaagttcatgatgaacacaactatcgcatacttctggttagcatcgaagctttgaacgaagcatgttttaatttgtcaggcatgtcggacgaaacggattgagtacaaaatcaactctcgcggatgcacgtgctttggaaacaacggctgtggatgcacacgttttctgtaacgatcacgagcgacgatgtagcataccgaagcggagggaaaacagatcacacaggacaccacgatgacgtgtacagacaggaatcagtcccggatacaaacgatgtactgaaattccgacaaaaatacctttaatttttataatatagtaaagataaattgaaaattctagagttcataccacaatattcaacgcataccctgtttgtttcccctactatgagaggatgaaattttagattatcgtggcacgcttttcaaactactaaacgatgtgttccatgcgaaaactttctatatgaaagttattctaaaatatcagattaatcaatttttgaagtttgtaataattaaaactttaattaatcacatatttttaccacctcgttttatgtgaaacacttaatctttatcttcatcttcaggagattcaaacactagaatggaagacgcataatagttcaattcgccgttttggtggtgggatagggatgttgggtatagaagtatagaaaatcagctggtcctggacaaggtttattatggacttttggtttagaccttaaatatgaatttatcgtactcttttttaaaaaaaaaattcttcaccatctgccactacaatttaagaactacatctatgattttttttagaaattttaaatttggttaaaattcctcaaaccctaaccgccgataaccgatctcagctcgtatcccacggtaataagagccccgtaaccacgtgatttcgcaaaccctggtcccggcatgcagaacggctaatgattaatgaactgacgcgtagtagaaataaacaatctgtgtcagcgttcgctacaaactacggagtactacatttgtaatttggattattgcacactcactggcaccttgcgctgactgggcataacctgagaatagagaagagggtttttgcacctgggagcagttaacggattgctgggttaggtttagactttagatctggactaacctctcacacgccgctgaagcccacgttgctcacagttccgaccttagcgtatgacgccggcgaggcggcgactgttcatcgatgtcgtagatgcagagatccccgtcgttttccctgaaattcttcatgaactagacgcggttccgtttcaggttgcacgcgcaggcgtagcacgaggtcgcggcgatcccatcggacaagaggaaaacttactccgatgtcgggcacgcgcgccaagcccggcagctcgtcggagaggtcatcctgtacacggagactgcgctgatcttcctgtcagcgaagtccaggaaaccgagaaggacctggaacagctcaccgtcagactgcagcagccagacgttgccggtgtccactgtccacgccttgccggtgtactggcgtcgaacttggcgaccggatcggagaggacggtcgggaggagaggtcaagtcaaagtggacggtgcacatctcatccgcgttccattcgcataagatgaatcgcagcgtccctcccacggcggcgatggccgggatcgtgttcttggtgaggggtgtggaagtaatgcggaactcctccaggcgtcgccgttgacgaggcataagcacatctcggggtcgtgggtgtcgacgagtatgacatctgcattggcattggctggactgcccgggcacggacgccggcgacctgacgggatccgcgactcgtagctggactccgtcttaccggcacggggcggactcgtgcaagtctaacgcccaatggagaagttgacggtggcgtggccacgtggggaggttggtcatggttgatggtcccacacggaaaattcggcctaactacctggaaggccaccactgcaagtggcccacaaagaccaacggagattggatagctacaaataaataagtccactttgacaccctcgtaccatctgattcgtatgcctcaaccattagatattttgtggttttcactgacgtggcacgttgacatagtccaccctaccgagacatcatgtgggacccatgtatcagtgtccagcttcctctatctctttcttttcttatcactctcttataacaggtcatcctttatatgaagtgtgatgaagtcatccttttataataggtctatgacggttgtaggtcagtggttaagttggtaaatccatgtaatagttattggggaccaataaggaagcgccatgtggaagctagcggttagaggtgccgaggttggtttggccgaaccacctctggccaccgactttctttagtctctgacaagtgggtcctatggtggttgaggatgctttggccccactttagatcgcttttgactgtcatgtgggccttccaatccttgtactcgcacttgattggccggaggttcattttgtctcatggcgggtgaattctcttcttaaatgatctgtaaacatatttctaccaaatctagtgaaaatagttaataataaacccgccacattctgcccctatggcaaaattggttatatagcatcaaaagttcacatttttggttttatagcaccgaaagataccggttcactttaatagcattcaaagttcatgtaaaagtagaatgcatggcaatgaggggatagaaacgtcatatcgtgtgtgtggctgggtaaatagcgatcaacgcggacggaaaacgatcgagaattgacggaagtgttaaaaataggagtggggtgaactttgggtgttactaaagtgaacctgtatctttggatgctataaaactaaaaacgtgaactctcaatgctatataaccaattttgccaaatggggccagattctgttacggcggcagcgtcgagccgccgaggtgttatcgtgtccgcgtccaagcgacggcgctccgctgcgtctgcgtctcgccgcccacggcagcgacaaccataatgcggtcgctggctgctgatgattcatgcgtgatcgatcaactcagagagagtcagttaattccttctggaataagtccattttgcctccctcatctcttgcgcttggttgaatcgcatccctcaaccgcaaaaccgggtataacatatcccccaactcccaaaaccgttgtaaattgactccccggacggtttcgaaggcggttttgtcccacgtggcatctttgaccccgttgaatggctgagtcatcaggtgggacccacatgtcagccagccggctgctggtactgcgtgccgacagggtggccttttcctcctcgtcatcgtcgttctcgcccgacgacgaactcgagctggcggcggcgggctggcggccacgttccgcatcccgccgcagctagagtgcacgcaacaggctgggagggggctagcggcggcgttctgcatctagtcctcttcgtcgctgtcctttcccgcctccccaatcaacgccacctggtccgcacggtggcgagcaacgatgacggcaggaaccccatgggtgtcaacacgaggtcctcgatggtctagcgatcgtcgtggaggcagtgtgcggaggcgatgatgtacgtgccggagatggagaactgtgccaccttgacgctgagcggcctggcgacgtcgacggtccacggcgtggggaagtcgaagagcgcaacatccaggaggatcctttcccttctcccctctctctcctaggatgcgggcggcaggcagtgagcatcggctgccggcgggagaaggcggcaccgatggcgacaccaccaccacctcgcggcgagcgggacggcatcggctgtcggcgggagaaggcggcaccggcggcgacaccaccaccacctcgcgacgagcgggacggcatcggctgccggcgggagaaggcggcaccgccaccacctcgcggcgaacaagacagcggcggcgttcggagagtacaagatctcccaggtccagccgaccgcgaccaccctgtgcgctcctcccaccgcccggccaaccgtggccacccggcgagctcctccccggtgcccagccggctgaggcatcccagcgagctccatccgcgcgtccaggcggccgtggcctcccggcgagctctatccacgcgtccgagcggccacgacctcccggcgagctcctcccctgcgctcggctggccgcgactacccagcaagctcttcccccgcgtccagccggccgcaacatcccggcgagcttctcccctacgcccagccggtcgcggcctcccagcgaggtcctcccccacgcccggcaagccggggcctcccggcgagctcctcccccgccgtgccgctcgagccaatggaaggcggctgtgagagatgagaagatgaaagagagaggggaggggtgataggtgggtcccacctaattttttacagtgaatgccacctagatgccacgtggatgccacataagctaaaactggactcaatactgccttggaagtcgatttgcaccggtttttggagatgagggagtcgttatacctggttgtggttgagggatgttattcgacaaagggtaagagatgagggaggtaaaatggacttattccattccttcttccaccgccataagtgggccacaaaagaccaatggctcataggcagacaattttcgtctccgagtaaatcatgggctttatatgcggccgaatttcaaaccaccggtcaatgggggtatctagcctgctacatcaattgaacgtaggtcaaaactgaacgtgtccacaagaaactgaattccgcttccattttagtatagctggacaaattccagtatttttctcagctaagatgaatcagataaacatttaggagtactaagtactgcgagtcacacattacaacatacaaaagaaagctggtaataaacgagggttacagtcctccaaagaacagattctaggaatacaacagtagcaatatctatagcaatatagaaaatgcacagatttgaaattgtataataacaacagtgttgatacaccttatcaagcaacaatgaccacaggctccaagcgttcggctctgcagcttgctttgcggccgcacatatcgccgcatcaaaagcctgctgctgcctcaatggcacatcagatacagggagaacatccataccagcccaagttgctgaaagcctgaagctgaaagcaacttcattcatcttcacgttttgttcgcagcgtccattaaaagtttaaaaccatcatttgtttccagctaactgtttatcactcgtctagtaagattaaggccttcagttctgggtcgtctgctgcggaggagggacttgagcctggtgcagcgttgctggtgcaggttgttgtgatgagctagcttgcgactgtgctggtgttgccaacatcggctgataaggcggatactgcggtggcggtgggtatggcatgcgaggtgggggcatgtaaccgccatacggtgggtagtagggtgggtactgaccatggtaatattgtggtggcatagggtaactctgtcctgagctgcttgatgcctgagcttgggctgcctgctgtggaccgggtttgccatcaccctcctgtgacttgaccaaggcacccatcctctggggatccattgaagggtacagtgtccgctctgctcctggcggtgctggaatgttgaagtagtatgatcccgatggtgcttgctgttgtccctccattccaggtggttgaggctggtcaccactctgctgctgagatataacagccctggggagcattcctccatgtgcaacatgcccttgccttccagcttcatcgtcttctggctttggtgcttgaggcttaccccacatgagcttcaggcgtatacccttgatgactaacttgttggcaagctcctctgcagctttctcagcaccttctcttgtagtgtacgtcacaaatgcacaggcacgttgcagaaccatccttatggactcaatttcaccatgtgcgtaaaattgatccctcaaatcctgctcggtgattcgattattaaggccaccaatgtaaagtgtccttatactctcatcgtctggaggtgtcagggatggcatctcaccggccttacccaaaagtttcaaagcaactggatcattaactctgtaatgagcaagaagagaatgcgtcagagaatgtgaagtaatatataaatagaactaagtgcaatatgaaccaaaagagtacagtgaagaaaaaaaacaagtcggttcatctcacggacatgattaaaccatcagtaggtgtgcatcaacaagatctcaggtgtgctaccacaccatattgtactaaacaatgtaaagtccaatttgattgaaatataccaagatttcttttacttcatcattcatccatccatagacactgatgatggaattcatatccagagttacaagtactatgcatgcagatgctggtttgcatcctgagacactacacatggatttagttttgatgatagtcttaatattaaaattagttagaaatagcaggtctaacagatataaaaaaggatcaataggcatctttggagtataatgatcattaattgttgcctcttaatgagaaataaaaatatgctaatatccatagagaaccaaaacaagcacacagttcaaaaaattgtatgcacaatcagcacaaacatacccatagtaacgatctttaatgttctgctgagataactctccagtttcaggcatctcatgtcgataagggcattcagcacctcttgtacattcaccacgcacatagaaactgcagacatgagctcgattcctcttgtaatatggtgccgtcctctgaagcttcagaatggtgtcattgggacgtgccttcccatgggaagaatcataatctattccagccctggcctacattttgataaagaaagcctaccataagaacaaataatccatacatttagaggcaggaagaataattagatcatgattaacataggcagaaagcatgtgcaggcactctgccggaccaaactacttaaaaaagggtacatcgtttgttatttgagatcaacacacttaaagtgcattcattttatattccttacaacattaggtttctggtctaagaaaacccattaatttccttaatgtgttatgctactagaatagactagacaataaaaatggaaggaacactgtggacatactagttgcagggaagaaaaatgaaaatagcagtgatatggacataaaccattttagatgagtattgtgaaagttgatacaaataataagttgtgaaaaaggagacataccttgcgatcatgctcttctgcaaagtactcacggttcacatcactccttgggattgcatcatttgaattaatagcgagtgctgtatccctaacctggaccggtagaccatattcaagatctagcaggcagacctggcagacatttttcagtttgcaacatgtctggcagatctctgtcttcttgtatcttgcatcccggccaggtcgccaacggaagacagtaaacggacgtgcacatattttgcactctttatcatattctgctctcaactgccaagacaaacaagaaagacagtaaatcttgtgtccatatcaagatcataagcaaactaaatgtgccgacaatgataaatttgattagtaataaatgtttggatgtggagacaatctcatccacatctaattgcttagtattggacccctacacaatgcctggtcttctgcttgacaatttgttctcgttttcttggctaggttatcctccacaaataaaattctataatcatactactgcaatttgcgaaacaaacaccatttcggtacatgaaaccaacaaaatccaccctagagcagcaatcttttcggcctaactcgtcgctaaatcagaacaactacaacaacacacgtaccgcaatacatcccacagaaaccgacgcctaacttttgacccccgatctaccccaataacaacagcaatcgcaaaccaggcaggctgaaatcaccgcgcccgcagccaccacatgaaccaccaagagcgcgaatcaatcagatgcggttagggtttgtgggggggcaagagacacggtaccatgcggacgtaggggttgtcgccgaggcaggactcgcagatgatggggaagtcggaccgctcccacccgtccgcctgcgcgtctcgcagcagccggtgagccatctccgccgccgccgcctccgcctccgccgccgccgagaaagacgagaggaaagagagagagagacgaccgagacgaggcgagctatctgatttggctttcctccctctttaaatgggccttattgggccgtactaccttgcgtgagcaaaacgtgggctgggctggtatgggccgggtcagtgggccggaccagatcagcacagtggatactacagaaattttgttgcagcttgtggttgtcggtggttagctggttctctttcgtgcagaggaaacagttagaaacttaaaattattctgcaactttgtttttaagaaatttgcttaatttcgtattccctccgtccctaaatatttagcgccgttgatttttttaaacatgtttaaccgttcgtcttatttaaaaaaattaagtaattattaattattttcctatcatttgattcattgttaaatatacttttacgtatacatatagttttacatatttcataaaagttttttaaataagacaaacgattaaacatgtttaaaaaagtcaacgacaaatatatagggagggtgggagtacatcttgttgagtagaattgtcctgtatgtttgacactgaatatcctcttgaagtggcggttgtatattttttttctttcgccgggatggcgaagaatgctgaccgatgtatattaaggaaaaggggaaaattgtacaaatgcagtgcgttagagcaccgcctttacaacaaaaagcaaattacaaagtctgtaatctctctaaagctggcactgcagcaacattcaacgaggtaactagccctgctgatttccaagtaacccattcatcacacatggtcgcacacagctgcatgaccgatgaggccgttccctcgaaaacccgtgcgttgcgctctttccaaatcaaccatataatgaggatgaccccggcgtcgaacgtcttgcgatcgatcttcgcaacagtttgccgggtagcgagccaccaactggcaaagtccgaggacggcggcgagcaggagaggctcaaacgagcctgaacctgcacccaaacttgctgcgagaaggtacaggcttggaagatgtggcggctgtatatttgacgctatgcgttactggctctggtactcttgattgttacttgcatatttacattaatttttttttgttgctttgagtaagattggtgatcacaattgaaattcaactgggtcgtcaaatgtttataacgggaggatttacaattggtgatcagatcacaatcacagaagataactgaatttttttaatcacttgctatatttggacagctcctcctccccgttttcccgcccacgcgaacgaatcaacgaaccatcacccgggtgcagcatctcaccaccgcacctctcgctgcacaacgcgcagtacccgccgccgccgccgccgtcgccgtccgcgagcgcggtgcagctctcgacgaagggcgtggtcgccgaggtagtggtagcgcagctcggcgatcgaagaaccggcgcggcggcccaggaagttgacatggaaccaggcctcgcccctgtacgccgcggcggcggccaggagcggctcgacggagtcgacgtcgatctcgtcgccttctcctcccgcgctgcatgccggagtcttagttgcggacggcgtggtggaaggtgagcgccaccttggcgaagggcagcgcgagatgcatgagaagggtgaaagactgaagggaggagaaggacgacgacgacgaagaacgagagcacaccgacacctagacgagcgccaatactgaccccatcagtgcctaattgctctgcaaatgccggggtacatgtttttttttaattacagtatataatttaatgtttcgcttgttactcaaccgtcaatatttagacggtgttcttttagagggttggaactctcctctccattgtaatatttagacggtgttcttttggagggttgtaaccctcctcttcgcatgaaaaacggagcgatagattaatacacgattaattaagtgttaactataaaaaaaatgtaaaatagatcaatatgatttttaaagcaactttcctatataaactttttacaagatatgtaccgttttagcggtttgaaaagcgtacacacggaaaattaaaaatcagtttgaaaagtacacacgaaaaattaaaaatcagtcgatttgttgaccgcatgatttactttgagatacgtgcatctgccgttgagtgaaaaaatattcgctagaacaaggaatcgaacccatcagggatgccacaacatgcgccgtaccaactgagcaagcagcagacgacagctttcattctatacttaacttttttaaaactttcactgcagttacattacactcacacgattaaaacgtaagtgtatagatggccataaggcccggggcccgacggcccggcccaaggcacgacaaattggcccggcccaggcacggcacggcccgactggggtcgtgcccgtgccggcccggcccaacagccgggccgtgcttgggccgctccctcggcacggtgggccggcacggcccggcacgaaagaggtcggcacggtgggccggcacggcccggcacggtccaacggcaggcacggcccgaccgaggcctgttatgccgggtgggtataaataccccaaaccgcatcaaaccgacaaaccctaaccctagccacatcagtctggagtctcgaccgatccgccgctcgcccgctccgcctccacctccaggctccgacccctcagccctccacgcctccatccctcttcgtcggcgtctccgatggatgcctcgccggatctagcaccgagggtcagcgggctcccgctggaggcttgagggtcgtctcttctctatccttttctttcatctctttggctgatctgtgaccgtgagctcttcgtctccgcctctccggtcaccggatcgacggtcgcattgtcgatttcctctccattctgtacttttttttgcaaccctcatcgtttctcttcgtcagatactcagatccactcatccaccccccaaatctagtctctcctcttgtcttctcgtagatctgtggatctctatcatcaacggcaactccggtgctccggatgcgcaggtacaagctttttttttagtttattttctctattcgatcagatccgtaactactctctgctctcgtcgttgtttcatttgttcttgcaggtcgctgagcggcaggcggcagccaccgttgaggaaccggagtgcctgcgatggatggtgatccaacctcatgcaactacgaggcgagggtgatggggacgcagggtgatgacgaagatgacttggaggaggaacgcatcgaggtgtttggcaacactgcttcacctctgagagatctgtcgcagccggagccacacgatgatggtaccggtgccgatggcaacggtgctccgtctggctcaagtgctagcaacaagaggtccaggtctgaggtatgggacgactttgaagaactctttgaagagcgcaatggcgctcaggttcgcgtttctgctaaatgcaattactgtcataaaacattgtctgctcgttcaactggtggtactggacatttgcttaggcatattaaatcgtgcaaacctagaaatgttggtgctttgtctcagtccatgcttaggtttaatgctgatggttctgttagtcaatgggaatataaaccggatgtggctagaactgagttggttaggttgattgctagagaggatcttccacttacttttggtcaatctgctgcttttgaggagtatattcagaatgctcacaaccctagatttagtgttgtctctaggcaaactatcagtagggacgtttttaaggtcttcgacaagagacgtgctatgcttattgatactttgaagtctgttagctctgttgctttgacatctgatatatggtctggtaatgctaaggaggattatttgagtgttgttgcccattttgttaattctaattgtcaattagagaagaggattttgggactggtgctaattgatgtgtcacacaatgctgaaaatatttctgaacgtgtgctttctgttgttcaagaatatggtttgactaataagatcttctctattaccctggacaatgcctctgctaattctaaagcaatggatagtcttaaacctgctctgtctggttatattggtgatttatatttgcatcagcgttgtgcatgtcatatcatcaatttaattgttaaggctggtctagaaatcttcaaacccatgcttcaagattttagaactgctatttcatttataaatgcatctaatcagcgcattgctttatacaaaaacttctgcattgctaaaggtattcgtcctcgtaaatttggtttggacatggatgttagatggaatgcaacttatctaatgcttaagcatctcttgccacatagggtcattttttcagtgtttattgcatctcaccatccaatggctgatggtcagccattactgactgatttacactggacaattgctgaaactgttcttttattccttgaacaattttatgattcaactgttattttgtctggtgtttattatccaacatctccattaattatgcatcacattcttgagattgctggacatctaaatacttatgagaatgattggaaccttagaaatgttgttgttcccatgaaaaataagttcttgtcatactggtctgagattccatttctgtattcatttgcttttatcttggatcctagggccaagatcaggggttttagcaatgttctccaaattatgggacaacttattagtggtgattactctgcatatttaaatgaggttagggctgcattgtctgacatgtatgctaagtatgaaagtaaatttggtgctgtgagattacaaagggcaaccccaagctcttcttctggtaagaaaaagacagcttgggggaaaatttttggtgctgctgcttgtggttccagtcttggtgctggacttggtgctggtaatgctggtgctagtgccagtccaggttctggacttggtgatgctggtgccagtgcaggatctggacttggtgctggtgcattttctaggagaacttctgctaccgctttgattcaggctgtttcttctactgctaacatgaatgcatctgagttgtttgcctatcttgacagtgacactgtcaaccaatacgatgatgacttcaatatccttaactggtggcatgagcacaaccacacctatcctattctttccatattagctagggatgttttgactgttcctgtttctactatatcatcggaatctgcttttagcttaactggcaggatcatcgaggagcgacgacggcgtctagctcctgacatggtgcaagctttggcactaatcaaagattgggagcaagcagatgcaaagatgcaacataccatggagaatttagagcttataaactcttttgacaatttgtttcttgatgaagtaaccactgccactgggactggatgattgtattggacttggactttattatgaacatttgattaatgctgtgggctgcactcttttttcctttctagggttttctcacgaggtgtgagtttttacctagaaaggtttttaacgaggcagccattgcactacacagctactttattcattgaaatacttgtgtcaagtttttgggtgaaagtttatgattttgggtaatttttgacttagtgaaacttttgaatcttagaactgtgatttctgtgaattgtccatgtcatctgtgatctaagtcaagttttttgggtgaaagtttgggtgaaaatttgtgattttgggtaatttgacttggtgaaatttttgaatctacaactgtgagtctgtgatttttgaaactcttctgtgaattgtccatgtcatctgtgatctaagtcaagttttttgggtgaaagtttgggtgaaaatttgtgattttgggtaatttgacttggtgaaatttttgaatctacaactgtgagtctgtgatttttgaaactcttctgtgaattgtccatgtcatctgtgatctaagtcaagttttttgggtgaaagtttgggtgaaaatttgtgattttgggtaatttgacttggtgaaatttttgaatctacaactgtgagtctgtgatttttgaaactcttctgtgaattgtccatgtgatatgtgatcttagtcaagtgatctatgaatttttgtcaatgtgatctgtgaatctttgatctgtgatctgtgaatttttgtaaaggtgatatgtgaatctagaactgtgaattcaactaaggcatgttcaaatttgaatttgtcaactaagttgtgtaagttgtgttatttgaatttgttaaccaaggcatgttcaaatttatatttgtcaactaagttgtgtaatttaaatttgttaactaaggcatgttcaaatttgaatttgtcaagtaagttgtgaaatttgaatttgttaactaaggcatgtttaaatttaaattttgcatgttcaatccattgatccattgaatttgtcaatccactgaattactggtccactgatccactggtcctaagccgtgcctgggctagcccaggcccaatgggctgatcgtgccttcgtgtcggcccggcacggcacggcccagtagcaatcgggccgtgcctgggcctgacgtgcggcccatgggcaggcacggcacggcacgaaattccaatcgggccgtgccggcccgatcgctctcgggccgtgcctatccgtgcctgggccgggccgtgccgggcgggccttatggccatctatacgtaagtgcactacagctacaatgtaaattttagtatacgcgggtgcaatttttgttttacatgtacggaatttttttactcatcgtttatgaaatgaaactatattcgagctcagtctaatttattaatttgcttggatggataccaagctctcactgtactgaatggcatagtgcatccaatccccatcacagcggtccagcttgcgccttgacctgtcgaagtaggtcatctcctcgagcatgtccaccactcgttccacaactctgcgttcgacgtcgtaccggtaaatcatggcgtaatccacgtagaaaaatatgcctccttggtaatcgtaggtaaactggaagaaggtgtcaaaggagtgcggtagcacgacggtgcattgcagcgaccaccgtggcctgctgccccctccgtcggcggcggaagctgtccagagctcaactctatcgtcggcgggagcatgcacatagcacagcttgccacccagctccgtcaggtccccacaagcgacgtcagacatcttctgccgctccatgaacggtgggcacgggaaactggcgaactcctcgctgcacacgtcgaagcgtacaatccctggggtggtgcagctgccggtggacggcgacggtagggcggcgatccagtagatgccgccgaggatgcacggcgacgttttggtcttgatgaggtagggtgggtcggcgaccggcctccacgccggcgagccgagggacaaaacctcgcatccgacgctgtagtccgtgtaggtcttgtcgcagtggcggatgaagcagtggaccaccttcgtcttgcccgtagattggtcggcgtagaagcttaccgcttgcaccccgaagtagtccagcgcacagtccggtagctcggcaagctccttggtcgccgggttgcaaactaacatctgagtggagtacttcatcgtcgagcgcagcaacacgagcccgttgcagtgcagatgcatgccccagccgatggcgccaacgtcgtcgtcccagtcgtcgtcgtcgtcccagtccgcggcggcgtccccgtcgtcgacggcgtcgtccaagttgtcggcggcggccccgtcatccgcggcatcggccccgtcgtcgacggcgtcccagtcggcggcagcgtacccgtctgcggcggcggcgacggtcgacttcgagttcgaggaccatgttatcctatgcgcgaagtccgcggcgacgccatggcccggatagctaaagaagtcgatcgttcccctccattgctctggcacacaccagtctgccaggacgagcatggacggtgggtgatggcgcgccgccgtggtggagtggtgcagctggaggcgaacgaagtgcggctcggcgaccatggagcgccacgacttgcacacggacctgaaccgcaggatggacttgacggggagacggaggaggatttgctcgatgacgtcttccgggatgccagccgccgcggcgccggtgggttcgacgcaccgccgccgcttggccacgggcagatcaccaccatgtcccggctgattcatcatatcacgttttcccgcgctcgcacaagccatcgatagcaagcgaattccctgtaactaaaacaagaaagacttttataggaagaggatgcttgcattgtccgaatcgtttttactttttgttttttgattcggaatctgcatcagttctgcaatcaaatcggattctcgcctggctctcggagtcggagccgtacgtccgttaatcttgcgtgtcgagtataaattgcgcccaaatgaaggcttcgctgagagaggcccaagccagcattggcacttcggcatcagatcacttgggcataatggcccataggccatagctaggggtgaaaacggtacggaaatcatctttatcgttttcgttttggaatcggaaactccggatacgaaaacggaatcgaatattatcaaaaccgaaaacggagcgaaaacgaaccggcgtgaatacagtaacgaaaatttatcggaataaaaaaaccctcaaactgataaatccgattctcaagtctcaacggtcaacaattcatcataaacacaatcatataagtccaattgttaagtatcaatactacatcacaaaacacaatctatggaataaattagtaatgctgttgataaatcccaatgtagaaaaaaatattcttatataattttagatttgcataacaattttttttaaaaaaataaccgctaaacaccatggtattcactattcagtgcttaaaaaagtaatccagggtattttgtgatttctggaaattctgagaaaaattctaaaaattcctagaaaatttccggaaagtttccgaccgattccgagttccgacgaaaactgcccttatcattttcgattccgtttccgaggaaatatttctgaatccgtttccgtttccgaaaaatttcgaaaaaattccgaccgacagattccgttttcgaaaataggttcggaatgtttccgtactgttttcacccctagccatagctaattaacaacccggaaaccaaaatgtttttgatagtttccctttctgaacctgaatcaaccaaaaaaaatgaagacatccagttctctgtcattcgatctgaatcagcgaataactctgaagagattaatgaagaagtgattgtcagaggttctgctcctgtagttctgccttcctctaggcggcatgaacattggggtacctcaaccagagagcagctgaatttcgcaaaggaacaaaaaaaaaagacaagttaattacagatactacaactcacaagccattcaatattcagagatcagttgaaaaaaaatctggggtcaccgttttgagaaagaagagaatgaacagcaaaataaaaggggtgactcatctagaaaccaggacaatgagcataaactggtgtcatgatttaacggtaagtcagcaacagtgttgtctattgtataaatgtatgatacaactgtacaacagaacctttttttacagtgaatatacacaatgcatgtaaggttctctgaaagtctaaaacccattttcttggacatgaaagagctgactgagatgatcatggttttaatccatcaacactactaacaagacaaaataacaaaaggagcatgaatatgtatgcaactagcaagtcattgttctgaatcactgaactagcttcaggattgtctaatctatctattatcttattaaagtaataaaaaaagaagccatcacgtttggtctctcacggtctagaaattctcacattaatcggagaaaaataaaaagtagaatccatataataatacaatttaaaaatagctgaaattcggaattagaaataaggaatattgaaagagtagactagagattggcatgtagagtcctattatatttttttgttgtttcgctgattcctgattgtaactgcaccaagtgttatgttagtcgaactgttatcaatactaccgagacggtcgatttacattggttttaaaagtttgcccgattttattattaagggatgcaaatcaaaacacgttctatagttgaggggtgcaaaatagacattcttactcatttacattggttttaaaagttaggggcgcttggctattggtgcttcagtcggcgagcggcggaggtggcgcagggggctcttgatcgtggagttagatatgggcaagtatggcccgcgtgggggtgtgtgtggctatataagcttgtgttctggcccatctcgtagcagcccaaacgtgttcaaccgacgcagcaagtttcaggatactcgacacgcaagattaacggacgtacggctccgactccgagagccaggcgagaatccgatttgattgcagaactgatgtcagattccgaatcaaaaaacaaagaagtaaaaaaagattcggacaagcatctttccccataaaagtctttcttgttttagttacaggggattcgcttgctatcgatatggctcgtgcgagcgcgggaaaacgtgatatgatgaatcagccgggacatggtggtgatgtgcccgttgccaagcggcggcggtgcgtcgaacccgccggcgccgccgcggctggcatcccggaagacattgtggaggaaatcctcctccgcctccctgtcaagtccatcctgcggttcaggtccgtgtgcaagtcgtggcgcgccgtggtcgccgacccgcgcttcgtgcgcctccagctggaccactccaccacggcggcgcgccatcgcccaccgtccatgctcatcctggcagactggtgtgtgccagagcaacggaggggaacgatcgacttctttagctatccgggccatggcgtcgccgcggacttcgcgcttgggatgacatggtcctcgcccgtcgccaccgctgccgaggtatgatgtcgccgactgggacgccgtcgacgacggcgacgacgacgataacttggacgacgccgtcgacgacggggacgccgcggctgacggggacgacgccgtcgatgggaacgccgacgacaacggggacatcaacgatggtgccatcgggttgggcggggctctgcactacaacgggctcgtgttgctgagctcgatggagaactcctctataatgttagtttgcaacccggcaaccaaggagatcgccgagctgccggcctgtacgccggactacttcagggtccaaagagtatgcttctacgccgaccaacctacaggcaagacgaaggtggttcactacttcatccgccactgcaacgagaccctcacggactacagtcggatgcgaggttttgtccctcggctcgccggcgtggaggccgctcgccgaccctccctacctcgccctgaacaaagcgtcaccgtgcatcctcggtggcatctactggatcgtggccctaccgtcgccgcccaccggcagctgcaccacccctggaatgctacgcttcgacgtgtgcagcgaggagtttaccagtttcctgagcccaccgttcatggggcggcaggttatacgtgacgttagtggggccctgacggagcttgccggaaagctgtgctacatgcacgctcccaccgacggtaaagttgagctctggacaacttccgccgccgccgacgacgacgaaggcggcggcgggccgcggtggtcgctgcattgcaccgtcgtgctaccgcacccctttcaaaccatcttcccgtttacccacgattaccaaggaagcgtatttttcaacgtggattgcgccgtgatttaccggtacgatgtggaacgcggagttgtggaacgcgtggtggacatgctcgaggagatgacctacttcaactgttcaacgcacaagttgtaccgccgtccaggggactggaagctccgtaccattcagtacagtgagagcctggtatccgtccaagcaaattaattagattgagtttggctatagtttcatttcagattacacacatatatattaacccaattttatccgatattttgtaagactaacaaatttttcggtgcattgcaacatgtaatggaaataaggacaaccaacgattgggttcaacttttgtaattaattactcctagtcctgtaagaaaatatattcttcactcaaagcaagtcgaatttcaatcaatttcaatcagggggcgcctacggtgtctacaaccacaccaccgatgccgataaaaaaggtagagaaactgaataccagaaatagcgtgtccttcaactcttaaaatcgatgcaaaattaaccccaagaaggttagaatagcggtttcggcttgatgtgacgtctacctgtctagtttgactggttcctcgttccacgtgacattaattgatgtggcacctataaaaaaacagtgggatccacgtgtcaattagagcaggcacaatagcaggctataagccagctataaacttattttaaagatataaaggaagagagagaagagcagcgggctacagatctgtagctagctgtagcacggactccaagatgtaatgtgtgtatgacaggtggaaccgggcattaatagtatagcaagcaactaattagctattacattggctatagataatttggagctagtagtggactatactactagcaactatgtactattaaacttgctcttagtatctgattagaaataaaaatatgcaataggtcccaccttccttttcttttatttccttctcttttctttcttttttcttctttctcgctgcttcttcttgttctcgagatggggtcgccggggtagatgctaacgcattggagctcgctcccgcgataggctagctagcctagcactacggtgcatggcgctgtatgctgtttcttccattaaaatggtagggagagaaacatggagtagtattttcacttcactttttaagaccattgatattaactaattaagcttcttgttgatatttcacgttgaaaaattgagctttcaagcctgatctgctacccgccgagaaccatagaagttgatgcgctgtaattctgcggatcccaatccaccgtcgtcaggttgtacaccgccgagagcgacgaacacctcttccatggaaggccactcccatggatcccgcgccacccactgaacggccagagcatgggactaatcgtcggtgacaaacgccgtcgtggcgctatcttcccggacaagagctcggacaggatgacaccgaagctgacgacgtcgagcttgagactgattaactgggctaatatttcgtatatccaaattattccatacaaaattcaaaagtctactgtttaactgggctaatatttccccagtcggccgtctctctaattaaccatttttaaccttgaggcaaaaccagcataattctaattttattggaatttattctggatcaaacctctatctacacctatctccaaaaatctatacttcctctccatccaaaaatattcaatcatttattctttgttcatactcctattttgatcaagtcgccagtctaattgtcgtggcttgatttcctccccggcacaagaatcatagtatcacaaatgtttgagtgattgctcttgtgctaagaaacttattcccaattcctttcatcagaaaatccaatttcctttagtctcaaatattacatcaaggatccctaccacatgttagggagggggggggggggctaaaatcctatttattctcttccagctatttttaccaccttcccaaaattcatccaaaattagagaccacgccatttgtatttccttctcttgcctaattgagagtacttcattttcaattttcaaattcttaaagaaaattgttcgtgacgagttttacatttggttcttattgaattctattaaaattggagcattttgcatccttttcaaatttatatttcaaaacgcagttgtgagcttggggtctgtccgcagcccaacatgactgtaaccttactctatgataaatagactactgttgttgtgatattctgtcttcctgtgataccagcactgtttcctgggactggtatcagttaacaggttaatttggagcgtctcgggctagtttcgcccgggactagttcggggcgtgacaaaagatggtatcagagcacgggcttggccttagggcgaaacccaacgttaggatgaccctaaggatactaagttataaaatctacttgcgaaaagctaaggcttcttttgctttccttctttcagtaatttattgttaaaatagttattgatatgtttctctctctttcaaaattgtaggtggcagtgaacgccagttacagtattcccacggctttggtgagggtcaccatgtcgatcagctccgtgaccttgcccgtttccttggcttctcgtgtcccgagtacgcggggtactctgtggaccgtgttcctccttgctgtaagctgtttgtgtacctttaccctcgtggaggtacatagggggctggccttcacccacaccacttcaatgtggccaggcccactctccagatcacgtactaggaccactcttagactgcgctctgtgtttggcccatgactacagccaccgcctctcagggtccgccttccggatggtcccttccttccctttggccacacagacactaagtacccttgtccctactacgagtcgcaccccgtgctgacccgcatgattgagctttctgaggctcaagccactcagcacgacctgctccttgaggcctaccgctccctggctcgccgctacgccgctttggaggctcgccttgttgaggagggtgtctcctccgtggacactatctcttgggattccgatcgtctctgccatgccagccacctgtccttccacagttcccgtggttctactcgcactcccagcggcccgcgctcccccagcttgcgtgtgccatactcgccagtgtagtctccctacccacacccagtcagtcccttttacaccgctggccacaccccagttgcttcctctcgccgtggtcctcgctttatccgcaccgcgtggaagtgcgttgttggtccaaagaagcccgctcgaacacacaaaatggcgtcgcagggccttttgatgcccacctcaatcgccagcaatgcacttatattgcgcactgacctcccgtagaataagaacagcctccagtcggttgggcagataatcccataaggatttgctatcaatactatagagacggttgatttacattggttttaaaagtttacccgattttgttattgagggatgcaaatcaaaacacgttccatcgttgaggggtgcaaaatagacgttcttactcatttacattggttttaaaagttaggggcgcttggctattggtgctccagtcggcgagcggcggaggcggcgcagggggctcttgatttctaggctcaccgacgaggggagagcggagggaggagaggagctcgtcgcgatggttacggctcggggctctcggtgccaaggcggccgcaatttgatggatttgtccccttcgttgacaggtgggcctcagggcccacatggccgatgacgtcatgctcgcctcgccggaagcaacgagagctagctgctgccggccacacccggaccatggcgcgcgcccagccacggcgaccaggccagcgtcgtgttcgacgactacgtcagcagagggatgccaaatgccatgctcgattgtgttgcgtgcttccctgtgacatcaaaagcaacaaggtcagcaagcgaaagactcccgagcatttcaacgaacacctcatgcgcgagtagaacggagcggcagaagcggcgaactcgtcctgtcgcggcgacggtgaacggcagtagtagaggccccaacagcggcagcggccacagatcgacgcccacatgcgttctgcgacgtgccgacctcgcaaggctgcggcgccgctcggggttcggtgtgtccaattcggaacccggaacccaccgtgacggcgaaccacccgacggtgaacgacggaagtgttactgcatcaatacagagcactacccgtaactctagtatcattgggcctagaagatccaaacgagaagtccacaccaacccaaagtatatgggctgtgattgggttactggttgaggaagtctataaatactagaaggatcttctagaggcgtgcgttggaattgaatcaaaacttctatctgaagaaatcattcctcctcctaactctgcttcctttttcctctgctctgaaatgctctgttctgttctgttcttccttctcatccccaatttcatctgtgattcgatctagggttcgtaacatcttggtatcagagcacgatcctggagcggccgacattcaagacgcgtttgcaaggtcaagtggacgccatggagaagcagcatgaaggcttcgggaagatgctgtccagtattcaggaggcgatcggcgccatgtcggtgaagcaaggcgaggtgcaggagacgatgaacaaaatggagaaatccatttcaagttggcgacctcaggttgatgctgcggtgcagagcttgcagcgcgacatggagttgctgagaaatcaagtcggtgcggtggagcgacatcaagcggaagctgacaaatcgtcgaacacctcgcaggcgttggaggagcgggaggaaattgctcgtcgcacatctcagttgccgacgtcgccaaccacgtctctgccagtatcgcaggcgttggaggagcgggaggaaattgctcgtcgcgcacctctgttgccgacgccgccaaccgcgtctatgccagcctcgactggcgaaattggtctggatggccaccgcatttcaactcagttccgggggagggcatcgggggtagtcactactctcgtcccacctccgggcaagggtacgcactctctaccattttctcctcgtgttcatccaaatttttcggagtttgttggtcgcgaggagagtgggggatcagtggggcgtgggtacaatcacagattgccgaaattggattttccccaatttgatggcagtgatcctcagaattggcgtttaagatgtgaacattattttggggtttatggcactcatccagatttatgggttagagtagctaccatttatttcattggtcgagctgcatcttggttacgttcttcgcgagctcatttgctttgtgggaattggggagttttttgtgatacggtggataggaagtttgataggaatagacaccttcagcttgttcgtcagattgatcaactcaagcagtcagggtcggtgaatgagtattatgagcgttttgatgatttgtggagtcagttgttagtttatgatccaaccttgagcactgtgagttgtgtccatagattcacggagggattacgcagtgatattaaaaatgcagtgttaatgcattttccccaagatttggagactgctttggctcttgctatcttacaggaggaattgggagaggctggtggatctttggtgtccaaggatgggaagaaattgggtgatcacgctgctcgaattaaaagtgcttaccctttacctttaccaccacccaaatttgtgcatgctggcaagggagatgataaaagaacagctgaagttcctaaagtggccaattcttctgataaattggttgctctcaaggcctatcgacgagctcaaggtctttgctatgtttgtgctgaaaaatggtctcctactcacaagtgttcaggatcagtacagttacatgctgttcaagaactcttcagtgttttggcagctgatgtttctgagggtgaacaggatgctgattctatctctagtttgatggctatttctttacaggccattcaaggcacggtttctgcacatactttgcgattacaagggtccattcaaggctttgatgtgttaattttggtggattcaggcagctcttgcagttttctcagttcagtggttttacctcatctcactggtgtgaaatctttacttactccagttcaagtaaaggtagccaatggtgctgttctttcttgtacctctgagttgccggctgcaaaatgggaggttcaagggcatcagttctctactgatttcaaactgcttcctttggacaattatgatatgatcttgggtatggactggttagagaaatatagtccaatggatatcaattggcaggccaaaacaattcagtttggtcttcttgataagtcagtggaacttaaaggagtggtaccggaattggataaatgtgatctggtctctattcatcagttacagctgttgcacaatcaaggagctgtggagtccttggttcagctcactgccagtgacggctctagttcttctcaaaatgttccaagttcaattcagtccattttggatgaatttgctgacatttttaatgaaccagacgggttgccaccttctcgatcttatgatcacactattcctagctggttgaggtcgcgaaggttgacgctgttccacgaccacccggtcctgggggccgggaggtaccgcccgttcgcggcgctgtggagcatgaggatgtcgccgccgtcgaggtggagtatgtgcaccgtccacgccgcgcggtcctggtgcaggtagacgccgctcccgtcctcgccggcgcggaggtccgcagccacacgtggtgcccgtcgtggaacttctccattgcctccggcgagcggcggaggcggcgcgggtctcttgctttcttggcgctcccgtcggcgagaagaagagacggcgcggcgaggggagagcggagggaggggagcagttcgctgcgctcttggtttcttgcgccgcggcggaggcggcgttggccaatggcctcggcagccaacctgcgggcgtcggtgccggaggccgtggcagccagtcgacgatgaagaggcgcccgccgccagccgccaggcgtcctccagagcatctaggccgctattggcgttcagcttcggcggcgcacggacgcagaatccttcctcctgctcggaggaaggccatggcgacgggcggtggtggtggatgctggcgctggcggtgggcgcgagctcgacgcgcctcctcggcgtcaagcggggccttcatgcaacgacggagacccattggttggttgttggtgttgctggcgcgggacgtgttctggcccatctcgtagcagcccaaacgtgttcaaccaacgcagcaagtttcaggatactcgacagggcacgcaagattaacggacgtacggctccgactccgagaggcgagattccgatttgattgcagaactgatgtcagattccgaatcaaaaaacaaaaagtaaaaacgattcggacaatgcaagcatcctcttcctataaaagtctttcttgttttagttacagggaattcgcttagtatcgatatggcttgtgcgagcgcgggaaaacgtgatatgatgaatcagccgggacatggtggtgatctgcccgtggccaagcggcggcggtgcgtcgaacccaccggcgccgccgcagcctgcatcccggaagacgtcatcgagcaaatcctcctccgtctccccgtcaagtccatcctgcggttcaggtccgtgtgcaagtcgtggcgctccatggtcgccgagccgcacttcgttcgcctccagctgcaccactccaccacggcggcgcgccgcgtactgtcaggctggcgtatcctacaggaacggatgggatcgatatgcttctttcgctacccggggcatggcgccctcgcggacctcgcgtatgagatgacatgctcctcggccgtcgccaccgccgacgaggatgataccgccgactgggacgccgtcgacgatggggatgccgtggatgacggggacgacgccgcggactgggacaccgacgatgacggggacgacgctacggactgggacaccgacgatgacggggacgacgctactacggattgggacaccgacgatgacggggacggcgccgaccggtacatcaacaatggcgccatcaggtttggcctccctctgcactgcaacgggctcgtgttgctgagcacgatggagaactcctctatgatgttagtttgcaacccggcaacgagggagttcgccgagctaccggcctgtacgccggactacttgaggatccaaagagtaggcttctacgccgaccagcctacaggcaagacgaaggtggttcgctacttcatccgccactgcaacgaaacctacacggactacagcgtcggatgcgaggttttgtccctcggctcgccggcgtggaggccgctcgccgaccctccctacctcgtcctgaacaaaacgtcaccgtgcatcctcggtggcatctactggatcgccatcctaccgtcgccgcccaccggcagctgcaccacccccggaaaaatgctacgcttcgacgtgtgcagcgaggagtttaccagtttcccgagcccaccgttcatggagcggcaggagatatgtgacgttaatgggaccctgacggagctggccggaaagctgtgctatatgcacactcccgccgacggtaaagttgagctctggacagcttccgccgccgacgaagggccgcgatggtcgctgcattgcaccgtcgtgctatcgtacccctttcaaaccatctacccatttgaccacgattaccaaggaagcatatttttcaacgtggattgtgccttgatttaccggtacgatgtggaacgcggagttgcggaacgcgtggtggacatgatcgacgacatgacctacatcaaccgttccaagctgtaccgtggtccaggttacttgaagtaccgtaccattcagtacagtgagagcctggtatccgtccaagcaaattaatttattatgagttcagctatagtgtcatttcagattatatatatacacacacgttctgtgttcacaaaggttgtgttccaagaaatcgtacgtacggaaaacggagcaatctattagcgtataattaattaagtttaagataatttattttcaaaaatggattaatatgatttttaaagcaactttcgtatagaattttttgcaaaacacgcaccatttaacagtttgaaacgcgtgcgcgtggaaaaagagatgggagagttgggaacttaagaacacagctgaaaaaaaaacccaccttactctatttctatctgttcgttgttaacctctaaaaatagggtaggattgccctcttgtggtccacctgattctatttcaacacatttatattgaccaaattttgtccaatattttgtgagactaattacaaattgtccgtgagttgcaacatgtgataaaaataacgacaaccaatgattggattcaacatttgtactccctccgtttcgaaatgtttgacaccgttgactttttagcacatgtttgaccgttcgtcttattcaaaaacttttgtgagatatataaaattatatgcctacataaaaatatatttaacaatgaatcaaatgataggaaaagaattaataattacttaaattttttgaataagacgaacggtcaaatatgtgataaaaagtcaacggtgtcaaatatttcgaaacggatggagtatttaattctagccctttaagaaaagatattcttcactcaaagccagtcgaatttcattcaggagccgcctacaatgtgtgcaaccaagccgccgacgccaagaaaaagggaaaccgatagagaagaggaaggagagacatgtgcggtccaccaatttttttttatttagagtgaattactttgacatgtgtgttccacgctaactcagccaccacgtcaacggaaactgagtactatactggcctgggacataggttacacatcgagggacgcgttataccttgtattgcggttcatgaacgaatttcaaacatgacgagaaattaaggaacctaagtgaacttattccgggaaggaaagggtggtcggcctggcagaggaagaaggtgggaaggagagcgatgggccataggaggaagaaggttggaaggggagcgataggccggaggggaaaggttagtcttctgcaagaaatggcctagaacaaagatggggatttgaattgttttttcaactggttatttaactgatgatttttttcagtcatttcaattgctagctgtatgatatgacatatgattcatcatccatacatttgcagaagtttttttctacagcaaaaggtgtacatgaatcaaactcggcacaacgtgaagggaatccaagtagactctttgccatccgggagctagccaacaactcgtggccggcccaaacactttttttttctttgaaaccgtagccaggctaagttggagttatattaaggagaatagaaagtatttaatatcaccaaggaaggtgaaagagagaaaaaaaaagaaacatgaagaaaaatagaaaagaaacacacactaaatgaaataaaaatctaagcggatattctcgcaatattttttgccccacacatgctccatagcttgatttcgtcttatattttggcgaggagttgcggtatggtcttatcttgattttggaacacccttctatttcgttcacaacatattttccataccaccaacaagtggattgacttgagtgctttagccttgtttttcccaccttgagatgttcttctgatccacgaatccaacaatgctttattttcgtcacgtgggtgttctacgtcgctgcagttcagtttacttatttaggaatggaataagtttacttatgtccctcaatttgatgcagtgtctgaaatggaataaggtcaccggaggtccctcaacttaacagcgagattttttgagatcccttaactacaaaaccagaaatatgtacccctaaactccctcaaaccgttcactgtagatccctcggcagtatttttgcccggttttgctgacatggcaacctagtcagcaaattttttttaaaatattacgtggggcccacatgtcagctgcacatcttttttttcttctctcttcttctccttctcttctctcttctctcttctctcttcagcgagcgcggcagccacagacagagcggcgtgtcggggttatcctccgtggaggcgacgagcacggccgcagcagcgacggcaggttcccggactcggagccagcacgttcagccggagcaacggttgctacaccgacgccgcattctccgccgcgcgctcctcgtcgccgccgggctcaccgttcagcttctccttgattgctctcgtcaataaaaatgtgggcatcattattgatagctaggagcactacgtgcttgcagacggcgaacgacacgaccagaccggcatggccgccgcggcgaacgacacgacgccggcgccggggccgggctgcagctcaagctgctggtggaagcgctcgcgtcgcgtgctgtacacagaggcgcgtaaggacgcggtggacttcctcatcggcctcctccgcgttcgtctcgttcgtcgctgacgtctcgctggaggagttcggtgactcgctgcatgtgcccgccgatcccttgcgccggcgaactcctgaccctgccggagagcaactccgctgtcgtcaccgaccgaccactactctacgtacacgtacgtacgtcgtcataaaacttgaataaactttgcaaaattcgcaccatttgtacgtgactttcatgatgatgatgccatgcttgtaggtgacgaggctgaggtgtggcggcttcgtgttcggcacccagatctgccacaacctcgtcgacgcggcggggatcacgtagttcttgcagaccgtcggtgagctcgcgcaaggcgcggagcgtccggtcggtgtgagcgagggagcccctcgacgcgcgccacccgccgggtccggcgtacgaccaccctgagtacgagccggcgtccgacgaggccagcgacaagcttcgtccaggcgacgagctcgtgcaccgcaggttcctcttcggccccgacgatgtcgccgtgctgcgcgaccagctccccacgcgcctcgggccccggtgctcgcgcttccttctcctcgtgcccccaggcccagatcgccgctttccgccgcctacagcggccaacgccgcccctctgcctgcttcggccgcgcgccgccgcccgctgccgcgctcgcccgccgcttgccgcgtcggcgtcggcaacctgctggctccgggtccgggaacttgccgtcgccaccacggaggagaaccctgtcacgccgcttcgcctgtggctgtcgcgcttgctgaagagagaagagagaagagaaggagaagaaaagagaaggaaaaaaaaaagatgtgtagctgacatgtgggccccatgtaactttttaaaaaattttgctgactaggatgccacgtcagtaaaaccggacaaaaatactgccgagggacctccggtgaacggtttgagagagtttaggggtacacatttctgattttgtagttaaaggatctcaaaaaatctcgctgttaagttgagggacctccggtgaccttgttccgtttgaaattatccccgaaccgatactagatataatgtattgttcaactcctaaaaccaatataaaattagtcccaagacggtttgaatagcggtttcggcttcatgatgttgtctagttt

SEQ ID NO: 10419 - DNA, 30849 bp, Oryza sativa
gtagtcattaatggactataacctttttcgttcataaaagcaaacctacatatatatctaactgtgctcttttagataaagagccttgctgccacatgtgcctaaccaaactagattatcaacaataagtatcatgtgcctaacaaaactggattatatcaaccaataagtgtcatgtatctaacagaatatatgcagaactcagatagcatctcatcgccacggacatgagaaactgagaatctctgcagaatgcgccttcgcatttgcatgagaacaacaacacaatcatcttccccagccccccaaaatcaccccccacgagcaaatgcatcaatcccctagcgcaactctgacatcatctgacgccgccgagagggggacagcatgagcggagaccggcaaaaccgagcgagcgcatagaatttgagcttacggccctggtacatgtccacaggattcgggtgaggggagctcaccggcgtcggggaaggaggagtcgacgtggatgtcgaaggggacgttgcacatgcggaggtagaggaggacggggaggcaggtcgggcaggcggtgggcagcccgaaggcggccttcctcgccaccagcaccttccgctcagcctcctcccactccgccgccgccgccgccgccgccgatgccatcgccgggagtggagaggattccttggagcttcgggaagaaaaaaaggccgagggtttatgggtttgctcgcctcgccgccccgctgcatctatgaagcccatcacgtacactgggaatccaattccggcccacatcacgtcggccctgggggaatctcgttcttgttggagtaggcccggcccaagtacagatgagcataagagaaaatgaataagtccattttaactctcatatataggtttagtcttattcatattcctaaactgcgatatgggatatgttgaccccaaaacttgttgaccccaaaactattaaaaccgatgtaatttaactttcttgtctgttttaagagcaattttcattgatttggctcgagctcgtgtggcggtgtggacgaagaacgctcctcctcgctagatgtcgtcgtgccgctgccaactgccattcttgagctcgtgtggtggtgtgggaaaggggagcataggagaaatactcggccacacgggtccctgacatgtgggctccacatatggacctagtcccattagaccaggtcaaagagccatattagcaaaaaccagcatctccctaaggccttccgccttgcctggttgggccagccatgctagagatggagatccattgccatatctaaaaaaccgatgtgcaagactagaagagtatttttgtcgatgagttcatcagctattggatttttgtgatgtttgtatttttatatctatctactgaatttattggtaaattctctgaatctttgggtctccgataattttggtcatggctgagaccgaaaccaaattatccgatactgaaatgggtcatctggctatatatgagctttaaacataaaaagtaaacaaaggagcaaccgtaatacccttagcccgtttaggctgcgttcgaaatgcgtattattgcatattattgcatattaattaagtattaattatttatttttaaaaaatagattaatataattttttaaaataattttcatatagaattttttaaaacagtttgaaaaaacgtgcgcgtgaaaaacaagagaggtgagttggaaaaactgagggaggaacacaggcttagtatatttcaagttttcaactaagcccaagtgttcatttggtaggagtagttctaggtgaagagtttagatgggtttgatctagtttatatactcgattcactctaacaatatcaacaccttcaacttaaccctttcaaatgaaacgttaacaatattatataagtaaaatactataaaaacgtgggtctgctcagcatatatataatggactaatacggatttgaaggctagtgtaacacaaatttacagcaattgcctctatcttcttgttcctctaacaaatcaataagccggcgtcatgatgttttaatgaatctcaccaaatttctggatcatcatgtttcaaattttcaataaacctcatcaattctttttccgttcgttattttttttttcgatgagagaaggccatgttcaattctcacgcaaaaactttttacactgtcacattgaatttttggcacatgtataaagtactaaatgtagaaaaaaaaccatttacacatattacgtgtaaattgcgaatcgaatctttttaagcttaattgtaccatgatttgacaatgtggtgctacagtaaatatttgttaataatggattaattagacttaataaatttgtctcgtggttttcaagtggaatctgtaatttgttttgttattagacaatgtttaatacttcaaatatgtgtccacatattcaatgtgacacgcaaggccaaaaatttttgccaactaaacaggcctaaactgctcctaatatatgtttggtataaggttttatcaatttttgatgtgttttttttttctaagggtgtgtttaattcacgccaaaaatgaaagtttggttgaaattggaacgatgtgataaaaaaagttagaagtttgtatgtgtaggaaaattttgatgtggtggaaaagttgaaagtttgaagaaaaagtttggaactaaactcggcctaaatataggccctgtttggagaactggccaagagttattttgagagctattttttagcacaacgaaataacccttcaaaaaatagccccaagttgtttggatccaagggttattttgagagctatttgaccttcatgtatcttcctatggagggagatagagagaaaagacactttttcagtggacaccacccgaaatagccccaattagcacaccttgggtgggttatttctaaatagctcttaaatagctcacccttttaatctttttggactgtttaatctatttgagggaggacttaaaaaaaatatcccttagatcaaagagaggcatagaatggacaggttcgtgcgaagtccacatcagtgggtcgggttcgtgaggaagtcgacgtcaggtgatctcttttcccgagtccactgtccaacagtaaaatggacagaaggccacatcgctgaccgatcctgatcttctgtgaggttcgagcgacacgcgcgaaatgccggtgattcccctggtcccatttaacctgctccgtataaatacaagggagagggagcagctcaacgcacaccgaacaacgaacactgtcaagctgcaacacacaagctgcctgcggctgcaatggcggatcgggtgatccattacctcctgcgcggcaaccagctgcagggccgccgccaaaccctcgccgtcggcgtcggccaccaccaccgccgccggctgctcctcctcgactccagccgcgtgttcatgttactcgccgtcgttatcctcgtgcacctgctcactgcaggcgcggccgccgtccagggcgccgagccgtgcgtcctcgtcgccgccttcctcctgtggctgctcggcgccgcgttcgccgtgctgtcgctcgccgccggccagttccccgttcttgctgccaccgctgccaccatcgcgaccacgctccgcagctacctgattggaggtctctagcccagctttgggtttggggacagtactagttctgaatgtactgtgcagtactttcattcatactctgaaatcgcacttaattttgtctctactagattattgcttaaatatagccgactagccatatatatactttctcatcaagtttcaactttcaagtcacctgttattgtactgtagctttcaagtgccatgtttatttaaatttatctattcagttctacctaaacaaacttaaattgctgtggccatattatatttatttatcctttggtgcgaagaaaacgggccaagcatagacaactaccttcttttctaaaatgtaaagattcctgcacattttaaaaaatatgtagaattttttatattttagaatggatagagtaattattatatatatacgacagtgttcctgaatcgtgacttcgtgaggagcacggagaaaacgtccacacgaattctacgtcatgcggcccatcgtaccttcgctttcgttctttcctgttaggattgtgcttgcccgtcttcttggggaggtctcatacccgcatcgctgcggcgtgcaagcgcaactacggtccagttgaaagaagagcaagttagcttatgtaaaacgagaaaatcattgatatatgattatttaacttttagttattataaaaataaaattaaatttatttgatattttaaaataacttttatatagaagatttttgcacgaaatatattgtttaattatttgaaaaggtattcacaggaatcaatggtagaatctacgtcttactccttttgttcaaaacacattctgttcagattcattgtactaagatgtgtttcggatgtgttccatcctagtactagtctagatttcttgggacggagggagtaataaagaaagaacgggcttacgtgcatcttccttgtgtttcatagattcttttgtttcatatgaacttaaacctaatgaataaaaactcagttggactcgaaaatagaccatgtataccataatagccatgttctgcctttttttttcttctcgtgtctttctcgccttacatattttttatccaggaaaaaaattataaatagaaactttgtacatgataattttataataaaaaaaattatacatacaagcttttgtgcgtataattttttcgataccaaaacttccctaaaaaacaaacttggaacaaattcgaaacaaaaaaaaagtaaacgaagaacaaaaatgtcatgtggggccgtgttgacgcgcggcggagtatcacttgtggccttctgggaggtggttgcgtcgattggttggcgcagctgcgttgcaacttccaagcgcgtttgaaaacgtcctcggagtagtgccatttgtgcttgcttctcgtaacgaaaccctggaggtttggagcaggagaggctgcaaattgccatcgcatcatggactagatggacaaatttctgattcataccgcaccgggcatgatcacaagtctgatgaagtgtttctcggctggattttgtaagggcatcctcaatatttgtggtgtagtgtaaccttaaggtgggccctatgaatagtgagccattgttaaagccatacccacaatgctatggttagaatttagccacaagataggcccacatagaatagaaaaataattgtttcatctcttgttcatgaagtgaatgagagagaaaaaatattttctttttcttgtggtagaccttaagcataaggtgcaccctaaactaatgctactttccacaatgtatatagctcactttacaagtgcaatcattaccttaaggtcacctttttcatacattgtggttgccctaaggtagtaactcaggatttgattttgagtttagggcatgtttgaggaagcttctgacagatgcagtttttcgtccaaaacagtcagtttttttttccagattttaagaagatgtagttgtagaatccaaaaaaatgaattaaaaaccccaatcagacccttagacatgccacaaatcaacataacagaaaacgccatggaatacaaccgacttcacagcttctaaccaaaggctccaaagctctttccatacacctgcattttcaggctaacgaaattcctgaacaaatgaaaccgaaaacttctcccagcacgccaaaagacaaagcgagtggagaacgagactgctctcatcatttgcccccgaggaacaaagcaaggttacatggaggaaaccataacatagaaggtgggttaactacaaatgcacaaattttaaaaagggaaaaagtataaaatgtgctgatcaaaaaccttaatagcaatcgatcatacagtcaaatttctacttcttggctgttaactggctacattaggacggcatgattcctatgttcaacagatcaagtttcaccaaattaatcaaataatagttgcacacaagcaggatatttgtatgccaaaattacaatctccaaaataaagttgcagtttggtgcatcactgcaattttattttggagattgtaattttattttggtgaccaaatcataagcagtgtagcagaacaagcatgcatggtacatgaaacatcagtcacaaccatggacaaaactgcaccttggtggtagtatctcaaagtacaaccagaataagtataaagcatcatcctatcaatcatgtcaagaaaaaaaaacacaactatatttacatcttagttgaaaaactattgttccgcagaaacacctttcaatgccacttcaaagaagtacaatgctcctcaggcagtttcaaaaagagaatcctagacatcttagtactagttcaagtatggtttcacaggattgagttgctcgcaaatttaatgaatcaatcatgaacacagttagggcttattcggaatggaggagaaacacaggaaatgaaggatttgggttcctatggattgctttactgtggcgtcattcagatcacaggaaaacgttcataggaaatacatagggaaatttcctgcactagccatatcactggaagatcacaggaagaaaaacgtccatgctgacctcttttttcgctcccttcgcgtgggaacgaggcaaatcatgccatcaagcaactaaagcacattattaggttgattaatgttgtttaattcactagtagtatgtgataattttgtaatagtgcacctattttcttctaaagattcctatgtttttcctttactccatccacacctattcacatgaaattcctatgttttcaaatcctctgttttacacttgcattcctatcctattcctatatttttcctattcctatgttttttcaatcctgcattccgaatgagcccttaaaacgccgatcttcctacgttaataatagcactaaagctaaagggggcttaaaacatagatatcccggaacagatagatctttaattctttgttagcgtagaacccatatcatactgggaaaaaattaaagtactgaacaccagatcagattcattgtttgaataagtctaacacagatttatcatagtcaaggatgcagcttactagagtatcacattttgttcccaaattattagaaagagcataaaaccaactaaaccaatgtgaaatcaagaaaattcaggcacaggtacaagataaagtaacaaaccatccatagtatcccctcaagttcatagttggcccaaaggttcgtctcttgctgttgggggtaagtctgtcttattactgtctaatacagcccccctttgtaataccaccatcttttgttgttggctaatgactgttgttattgttaagttgaattgcccatgagcaaagagacctatggtggccacagataaagattttaacctacagtcttaaaccatattccatacataattactgacattcccataggcaaggtacatggtgaatagaaatattaaaaacatctaagaagctgaactatgtagccataggaattctaggtctttcgaaacaacagaatcaccttacagtttgaattgattcactaaacacattcgatgacaatataatcacatgcatagatctcaaacgattttaccctttaccctacacccttgtttttcatagtacctatctcccttaccacaataacaatcaagcaaggcatacagaaatcgcaaaattgaacaaacttaagggaattcactgtcatagataaagcatcgaccgcccaagcatgtccaacataaaattaaaacacatgattatcagatagtttggtttagataacaagaagcataataatgataaaaccatctaagagcagcaggcatcacaaggcacagcaaaccagcacatcaagcctcaggcgccggctgcgagaggccggccttggcgagcagcttccccatcgcctcaggggagcacacctggtactgcacttccccggtgccgggctgcaggaacacctcggcgagctccagcttctcggcggtcaagctggtcgaatccatggtcttgctcaggaccttgagggcgagggctacggcctcctcccgggtcaggccgtcgcggtagtcctgcttgagcatggactgcgccgcctggctgttggccccgacggccgcggccttccagccgctgtagttgccggagggatcgctcatgtagagctggaagccatggtgcttgtcccagccggcgaagaggaaggagacgccgaaggggcggaggccgccgaactgggtgtacccctgcttggtgtcgcagagggattggacgagctgctcgacggggatgggctcctggtaggagagggcgtagcgctgggcgtggaggcgcgccgtgttgaggaggatgttggcgtcggacatgatcccggcgacggcgcaggcgaggtgggagtcgatcttgtacatcttctcggcggagcgcgaggtctggaggagcttggaggtgaccttcttctcgccgacgaggaccacgccgtcggccgccaggacgccgagggccgacccggcgttcccgatcgcctccatcgcgtactccacctggtagagacgcccctccggcgagaagatcgtcgtgcggctgtcgtaccggcgagacatcacggcggcggcggcgagagattggggttttctccggttagatttggggatttgaggggggagaagtgaggggagaggtgtgaatcgggtgaggttaaggagagagacctacttgtaagacaagaaaagaaaagagaaaaggccttatgggctggatttgatttgaatttgtcatggaaacgaatttgtacatccgagccccctatagattctaactttttcttcaaacttccaacttatccatcatatcaaaacttttctacacacataaatttttaaattttttctttaaacttccaattttagtcaaacttccaattttagcgtggaactaaacacacccgaattgaagtggggtgggggatgaggagatatttagaaggaaaaagtaaaccgaaggtccctgatcttgtcatcgaattaaaaaacgtcctcaaactgcaataccagatatacggcgttccttaactaatcaaaaccggtcacaataggtctttcggtggttttgactccagttttatccgacgtggcggctgagtcagcgtggaacccacgtgggccccacatgtcaggatgccacgtcatctctctcccttcctctctctctcagtcttctctgccgcgggagaggaggagggtagcaccgcgacggcggcgggcggtggcggcggctgcagcgggaaacacggcggctccgaggcctacggcagaggccagcgagcgagtgagacacgcggaggcgggatcggcggacatgcggggaggtcgacgagctcctcccaagtccaaatcctccattgtcggcgagctccactgcgtggaaagggaggaggtggggtggccgcgatcgtcggtgaggagctcgaaggcaggggcgcaaaggaggcggtggctcggtggctgccaccctctcccagctcctccccctggccacagaccgccgccgtgccgttccatcagccgccccatgctcgcccgcctaccgccaccgccctctgccacacactcacttgccgccgctctactccaccggccgtcgtgccctcacacgccgcctccgtcgggcgccgctcaaccctgctcgctgccgcccgttgctactcccccgcgtcaaagagaagaaaaaaaagaagaggaaaaagaaaggggaaagacaggatgctccgcatcgccaccgccgccgccgcgttgccagccatcggacctcctctcccgatacaccccgtcggtctcctccccacccgtcggccggcctacgagagaagagtgatagagagagaggaggaagggagagaagaggggaaacagagagatgacgtgacatcctgaaatgtggggctcacgtgggtcctacgctgactcagccgccatgtcggacaaaaccagggtcaaaaccacgaaagaaactattgtgaccggttttgattagttaagggacgccggatttgaggacattttttaactcgatgacaagttctgggaccttcggtgtactgaatccaattttatgttaggggtgaattcatcccaaattcaaaagttctgatattgtcatcgaagaaaaatagcattgtaaacaatacttcaagtgtcgtgtggttctgattatttgatctttacggctcataagccatagaaaataaactaagcaaaaaaaaattatgtgcaaaactttttataacgatttaaaaattcaatgcttaaaaacaaaactacaaggaaaaaacttaatattaaccatttaaattttagctgcaactgctaagacaaccaaatgatgaggcatgatgggtcatgtgaactaccgctttttctttttaaaaagcatctaatataaatgaaatttttataaagaacacttaagaaaatgcgaaaaattatataatatttgactctatttagaaaccgaactcaccactggaagtatgtagcaacaagcaaggagtagcaaaaacatgcgcacaaagttataaaaacttaaacatgggtattaacacgcaattttcgtaaacaaatgatcttcggtgtcaattgacacattgatatgggtgcaaaaaagctttacaaattgatacaagtaacatgtacaaaactttcaaaaaaaaattaacttgagattacaccctggctataaatgatggtagagcaacaaaactataggctaaaaatcatgaccacaaaccaaactgtacatcaatattgttgctttcctcttgacgttacacagtaccttttcctgtacagctcatgtaaacccagctcaatgcccatacaatacagacataggctcatgaacatgctaagaagacagaaggaacaaaattaaaacaaccagctttgtatatgcacatctgaacacctcatgcctttcgatgcttcacaagtgaaacccatttccaccagaggtagacagctgatgaagatatcactgtagcagctatggaaagagcagcaattcctgcaaccactcctcttcgcttttcatcgtgccttgatgtaagcgccacaggaggggggctggcttgcgtctccgcggaagggaatactgagaaagtagagcattttcttgtcagtcaatgtttacctgataaccagaaaaaaggtaatcaagaaaaatagaatatgtactgtgagtctgtaatttacctcttattgctgacaccagaggaccataagttccattgcgtggaatacagcaagtgcctcgcccattccagtagagatgtattttcaacactgaggtggtgacatccgctgtataatttctgttaatgggtctgttggaaccccctgcttccttggaaatgtcaaaatctgtcatgatattccgatcctgcaggtaaccacacatttttgttcatgttttgcccatatggtctggatgtgccatttgttttgctttaagattgttaaacttggagagagagagagagagagagagagagagtgatcagacctgaatgtcgatgttaaataaacgccttcctgatccactttctataactatctctgcaaagaagagttgaactgtatatttcccactaggcaagccaaccacatagtaccataaggaaccagttgatgttcttgccgttctgtagagctcaggtatgtttgttccattgccggtagttacaataccagaagagttactaaaaggatcagtgcccacatgactgactacccaattattattagtgtccacatgaaagtctgctgctccaaggttagcggagtcgtcattgaacatattcgacggatctgaaggaggagtatattgcttgcccccacagttcacagcaaaggatacaggatctgcatttatggtgtgatgatgaataagactcccaaatagactggaatgatctaaagtgaacctttagaagcattgacaaatctccaacagcactataaatatttacatcaaaacggttaattgcagcattatcagcatgtactagtactagtagtcttataggaaagtaaggtatgttcataagtcaatggtcaaagttttttaaacgtactagttaaacctgttgtgttgcatcctttcatgtcgacacaattgaggagacgaaggttttcactgcatgataatagagaaagtaaataatatgttgcatgctattttggctgttcgcatatgaaggttaccaacccaaatagtatgcacggaaaacagagcggtcaattagcatgtgattaattaagtatttgctaattttttttttcaaaaatgaatcaatatgatttttttaagcaactttcgtatagaaactttttgcaaaaaagcgcaccgttttcagtttgaaaagcgtgcgcacgaaaaacgaagcaagagagttgggaacttggagttccaaacacaccctaaagtaatcaagaaacaaaattagtaaattctaatgcatactagaaggaatgcttgtacgttctaaaattatcaagtctgcgttgctgacgctatcagcctacagtcaagtttccaattcacgcattctccttgttaagaattattttacctccccaaatcctctaacacgggttatgcagttctcttaacaaataatatgtcctcaatctcatgaaaaatataaaaaggaatttctaaatgtttgcctcaatctcatgaattgcatagcaaacttgagagcccttcagtcttaaactgtccttaaccagttaaacttatttgattgtttctttaaacaatagcaagaaagagagcaaatataggagcatagtgattaaattattacttgttcgatgatggaagtctatttcaatgagcttatatgagtatgacaacaatatcataaaccatttcaagtgttgcttacctgccaactgagcttcctgcaccaatcgaagttccaatataatttctatgcataaaagacatgttcacaaaataatgagtaaggccactgtaacaatcagttgagtctagtgcttaatacaagtaaatggcatacatccgcatctttctatcagcagaactgctaggaagccttcccctaagcaaaggattatatgtgacatccctgtagttttcaataaaaaggaaaggagaattgttagacaggtttaatatcagattgtactttgtactagggaagaaaatctatcctacttcaacatatgctctgtcgatttttatgatcggtaatataatttatagggtgcacgagaacaaggagagatggtgacacaaatttatactagttcaggccctcgaatgaggtaataccctagtccagttagcgtagattggatctacgaggtgtgtgcaaatcaacaatggagtggctgatggtgggtataatggtgtctaacctctctagggttcctaccgatgccttttatatagtgctagggcatccggcggcatgtatggcgcgatatccataataatccgggtatctaccatctatttacatgggattggatagactttcttatctcttatccctttctatacaaaaatgttgcatgggcctaaggcactcgacccaccctatgcagtacaacccaaaggcctcctctagggcacccgggtaccgtgtcccccacatgctccaccatcaaattaggcactatgagcatgctgaacttgaccacattgcatgaaatgtaaaatggcaaatagagttgcatctaattctgccttctcttttcctcttattagcttgggtgaaggaggattagctgacaaggaaaggatttctcttatcctcttatcagcttgggagaagaaggattagctgacaaggaaaggatttgtgctatattgccgttctttctcatttagtatttgaagacggttgtgtaacagtatgcaccttgacagagtacgaaatattttaagtagtagggattgcttgcaacagtagctgatgaaaatataacatataatagttgcccaggtggaaaaatcgtgccatttgttttccatccatgaagttcacattataaaatgctttttcctacacttcaatcagcaaatgcaaacagcagacttacagagcaactagtgattgaggcatttgatcaggcagagatccattgaaattgttttcacctacataactaacaaataaaaaatcatcagaaaggcagggtaaacaataacttggaaaaataaaaatggaaaagaataaataataatatatgcaccccaatgaccaatagtttattgatttaggcctagttcttttcttcaactccaaatttcaacttcctcattttccgttagcacgcttttcaaactgttaaatgatactttttttaaaaaaaatctatatagaagttgttttaaaaattcaaataaatccattttttaagtttataattatcaatacttaattaatcatgtgttaatgagctttctcgtttcgcgtgcgctaaaaatgtctctcaaacttgaggcaaagaacacagccttagccagattcaaactgataatttgaaataaacatgttagctctcaagatagttagataaaaccttcggtaaaaagaaaaggtaattagataaaactttaaaatgtataaggtttccaaattttgcgcacgaattagagcttagaagctgactctacaacatactgggaattcatattctgaaaagtatagcatggtcaattacaaattcctgaagtgctggtggaagactgaaaatattcgtaagtatagcatgatttcagctctcaattagaaacaatagcttccccagaacacaatcctacagttgaacaaaagtatggcactgcaagaatttcagaagtgacgtgttcagatgacggattaatcacagcattgtgaaacacatcatattctttgaggcaggttcatccctggtggcagtattgtcatcttctcgtgcccctgaaggcctcttactattgtttggacattaaaattacatagttagtgatgataaatcagatattgaagtagatattccaagccagacgagtagacaggcaaaccctggcacaaatgcaaccaagcaaggtctctagaaaacgaagactttcctttttggcaaggatagcaatgaggaaactcggacagcaaagatacattaatttcgccatccatccttaatagtttaaagacaacatgatagtttaaagatgtcgcttgtctatgtcattactgactgaaaggtcatatcccaagatacatgtaaagaaaagctgttgagcgacctggtcaacatgtacaatgggttttaacttgaacttgcaagcactaccaagttccctaacgcaagcatctcatccgaaattaattttcttatttaacaaatcatatttcacgaagaatccaacttacaggtactttaggctactatcgtactgctgaaggtcaattgatcctgacaagttgtttgatctcaaatctctgcaaacataaggcaaattgagagagtaagagagagaaacaggcagagaaggagagaatcatcgcaaataaaaacagtagttatttcaatgttcacattcattgtaatattgaagattaatatcagaatacatggtttattgtattgtaacgtttttttgaacaacaacaaaatcaaataggcataggcttctgcagccaaatttaaagttgttgcctgcaaggtgcattgacagcccacccccctcttttcccaaattgaagtgtttgagattccaattatgtttcggtttgattaacataagatttagtcgttctttgaaactctattagaagatggggtcacgatggttctgagatcaagcaccctcatgctactaagcaacatcacctcacttttttctagaacactcaacatcacctcactgacagcaaagagcacaaaagagggcccctgttcgacatagacaaggattgtggtccccagatggagagtgtgccattgagcataagcaaacaaaagattttctgaaacctacacgtatgttaatttgttcagattcttcagaatttggttaggaaacttccccgtgaatccacaattcctcagagatctgcttagcaaaaacaaagcatgtacttagaacttgtatcaaccaacaacaatcaaaacaaatagtccaatgaaaagaaataaggagtgcgacagttgcaaacgtacaacgttgaaagatttacccaatctcctgtgaaattaaaaggatagccctcggtatcaaggtcaccaatcatgctgcaacagaaggtggttaatgtgattaataatgaaatcagattggtgtgaatttcaacaaatgataatttggttgtcctgactatgggacagataagaagattctctagatgataaggcctaagattaaatacagtattacatcaatatcttccagaatacctttacttgtagtatgacaacacgaaaactaaaagatatttcattgtaacaattgaaattagttatatacaactgcagaagtaagcattttaaaaatttatcagtccaaaaatgaaatttctttttgtcaatgtaaccgtgattatgattacatctacataactctttatatgccactgcaatattaaaaatacaattattcttttgaaactggaggtaattagtcaagtttaggacaagaaatcagtgagctttagatttagagttaactaatgaaaattatgatagcagataattgattattgggtttaaacttgtaggtctcaatacaatcatttggtaattgtacttctggaacagttaagtagtcatttggccttgccaaactgttatagtggcacatacaaatattttccacttttggaataggatcagcatagtctgctatctttggagagcaacacgaacatatccaatttctaccctttataacggtgtacgactgattgtgctgttaataaaacaaacaattaaagtggcttacagattttctatattgatcaatttagagaaattttctggaataggtccttgaagtttcatcccatacattctcctagcaagacaatcatattagttctcaggttggaaagaaaggagttacagaaaaatataaggacaagtagttatgcatacaaatctgtaagattggcaaagttcgcaataaatcctggaaccattccttcgatgtcattatcaaacatccacctgcatagaatgccaataagttaattagtaccccctccgtcccaaaatataagtattttggaccttgatacaatcttcgagatgctactttgactaacaatatctataaaagtaagatgttttaaataaaaaagagttgcatattatgatagtttgtttaatgataaatctaataacatcaattttacatgattgatcatttttatttttttgcttttaatagttaaagtaaaaaatatttgacttacactatgctaaaatgcttatattttgggacggagggagtattacctttttctgaacaaaatacaatgtaatctaattatttttcaaacaggccttgtttgtgatgttgatagtgaaaacaaataaaatgattcttttgtgaaaatggaaatgaaacacacttacagggattgtatacttaaaagtgcagatgcattaggaaaggactcattgagccggttattgttgaagtgcctgtagatttggaggtaaggtcttggtgtctttgccaacaaataatattgaaatagacaacttgagcacaaagaaaaatatgaggcacggagattcttcacatacaatgtaatacttacaatgtaaatatgaagtggataaaccattggatagtttctataattacagacaggtcctaaagtaacacagctagaaaccaaagtagtattgtaccaaaaagggctttgctatcagagacaggcgatgatgctatctcaaacttcaaaggagtatgtctggatatgaaataccttggatttttttctaattttagaacttaatatatttttttataaaaagttaacatcttatttaaaaacaaaccccttggccatgagatgtgtactgctgtggcaaaacagtgctgctacagtgctacaccacccaccatggtggcagcattgtcttgactcttgccatcctatgacattcctcctgattagcagttctttttcatgtgccaactgaagtagtctggagaaaggctccagatttggaaataagttgtgaatgagtttattttaattctttaaaaaaaggttcaaatattaaaaagaaataccttaggtacatgcagatagtttctcgttaagggaataagtattatataaatatgaaagtgtccaaggcattaggcaatactgggaagtcccatggcattcaacaagttggatgtaccattacaagaatgtaacgcaattaagttcttataaaattgatgaatgctgctgcaaaggaacaaaaagttgtttcataatcaccatgtttccagcttggatagattgctgacttggggaggtatttgaccaatcaggttgttattacttaaatccctacagaaagaaaagaggactagttacaatcaaaagttcccttatgtcactctacaagcatctagcagttatatctcaccatactactgcaaaggagtgtcactaaagatgtttgctaccttctaaagccagttggataatatgtaaaagaatggtaaattagttttggatcttagcagtttggttaaaatgttgcataattggatagcacaagtttttaaaaactttcattatattcaaactcacaatgtgagtacatttgacatgcacactggacaaacatcaatcctgtctccaaatcgctattcagtaggttggcaggatatatgcagtatgaaaataaaaaccctctaaatatatgaaagcagcgtcgtgtacatccttttggatgcagaggccgggttttaatccattttctaaaaaaaatgacctatgtataccgaactaccaacatagcatctgaaatgcaagtaaagagcatttgcagtgcagaatagattctcattctcctcagaaaatcatcaatttccaatgcatgtgcacagaacattagattttattccaagtatagggacatcatgcacttcatggcagctaattacaacacagtaacaacttgtcgcttgctacacaaacttgtgtgttgagagctatttgattgtgattattaatctgtaccattaaattataacatggcattacacctataacgggttgttctagtatcaagtgaatatggtacagatgaaagaagtgtctgaagtaagaaactagtgtacgtgaatagtaaggagtaagaagaatgcgtaatagattcttctcatagcaccatttattttactacctctgtttcaatttacttgtcgttctactagtttctcatagaacagcaagtaaattgatacggagggagtataccatacatgtatcgacaggtccacattaggcatggaaacgtcagttatacatattattattttaccccagtaaatactaacaagtaacagccttctgagtaatgattataacaactacaaagcgcatctctatcgaagaaatcatgaacctatcacaagttcacaacagatcaattgtagcatttcctaagataagcagttttacgatatcggataccgatgacaggactcacagagagaccagctccgtcaaactgaagagctccgctgggataaaggtgatgttcctgtagccggtgacgttcctgcatcatccagggtgagaacacccatcatttcatttccttcccccacaaagtgaggcgtcagaaaccaatcgaggatttgaggtgtgcacgcttacaggtgcgtaatgcggcactcgttgctgctgcaagagcagttgatggacgcttccatttccgacgaattagaccagacgagcttcccgcacgggtggtacccctgcggcatggtgccatcctccagtccccacttctcgaacaccgtgtgcagggcggccgctgcggggacgacagagagactcggtcaccacacacacacgcacacatccgcgacgacttcgagctagccaactcatcgcgattagggcatcacatgagcgagtgagaaaaatccgtaccatcagagatgttggtgctgtttctcggcggcgacgacggctggccggactgagcggcggcgatggcgagcgagacgagcaggatgaggagggcgaggggggcggcgggagaagccatgggcggggcggcgtcgggtggagattgacttggtgagggggaggaggaggtggagagtggagacttgaggggtttgggaggttgaccgcgcgtgggttcggcgagacgaggtcgtggggcttggtcgtcggagacggagagagcgggggctccgcgcggcggcgggagacgcggcgcggtggacattttttccagaattgcctcccaacttgtcaacatgagtccccttcgaacacagcaattccaaatgggtattttttaagtatgcaataagggtatgcgtttccaaaaaataataaaaataaaaatagtatgcaattcaaaaaaaaatgtatagacaataagagtgtgatatactccctccgtactcataaagaaagtcgtttaggacagcaacgcagtctccaaaacacaactttgacttcttgtttttataaaaatatttattttatatatatatacttatacttttatgaaagtatttttcaagacaaatctattcatataatttttatattttcaaactcaaaaacttgagagttattcatgatttatattactaaggtttgacttaaatattgtcctaaacgacttcctttataagtatggagggagtatactatacttccttcgttccaaaaaaaaaacaaatcttggctgtgtatatggacaaacatacatgttgtccaaatacataatcaatgtgtgttcatatacatagttaggatttgatttttttttttggatggggagagtacatatttctaacttctactcatctgttttctgtgcgcatacttttcaaactgctaagcaaaatgtttttctaaaattaaatatataagaaaagaatcatattaatccctaacacagcaaagtcagcaattccatatggagtttttagaatgaaatatgctagttcaaaatctttcgaatcaatggagtacaaattcttttgattcagagatgagaagcacaaaagtttcccggataaaatgtgaacagtatttgtgccaatttgtttgattgagtaaagcatacactcaaaggtgtgaagaagcactaggtaatttacggatgctttaagctttataatgttctcagtttgtttgcatgcatactgtaacaagaaggatatggtagcacatctgcacagcgaacaaaattgcttcagggaaagtaaggcactttgcttagaccaaatgttattacatttcacacatttggaccaactcaagcatacacatgttcaagcatacaatggcatagctatcctttatatatttcatattccaggagataccacaggagaatacagattattgtgtaactacagatatcttgtatgatggtttctatctcctcccagggaggatgtgattacagctgcttcttagccagatttctgctttgctcaatagaagggtgaactctttggtactggagtatggcccagacaaggtgcttgaaagagaactccggccaaagagggtctggattctgcaaatgactgaacgtcgtctgccacagaaggaaattgctcaggcgagtctcacctgaggtccggatcacaatgtcaggatcggggcaaccagcgctgtacatatggcggtccagatctgccactgaaatgtctgaatacacaccattattcgcaacactgtcagcatcctccctctgcagtatatccctcctttctgcacagaccttattgaccgcattgacaatctcagaagtggagttgtatggcatgcaaacagagaagaccagtcccgtgttttcagcagtggtagccatcagtttctcagctgctaccctcactgatttgctcaacatgtccaagttcccccagaagttgatcttacagttaaccttgttgatgacatttctgttttctagcagttcattgatcttttcctccattaactccatcaaggatttcacctcagtcggatctcgcttaaaattatcgatgctaaatgcatacaccgtgatatacttcacgcccatttcatagcagtagagcaggctggcaatgagagcagagaagcccaccctgtgaccagagccttcctggatactcctgaatttagcatatctacggttaccatccataataaatgcaatatgcttaggcattgggccatacgagaggacagctacaatgcatttgcggatgaaattctgcagactagcaagaacaccagtcgcaattaactcatcagtgttctccgtctttgaatcctaaaccaaaaaagtaaaactcaagtataagaatatcagcgaatgacacagctaagcacaaaggaaaagtcgcagctctttgattatctttacatgactaataatacctccacctggatacttgttctacataagagatttaactatatatcactgcatatgaatctaaaacataccactgaaggtgagtaagacataagtgagccaagcattttgatggggaggaaccaacaagcagtatcagacctgcaaactggaaaagaaataaaattttcagatttgcttgctcgggtcaagaaaaagaaggggcacgtgtttgccataagaacaggatacattaaaaggctatagattactatctattttaagcatgttttcctgtagggaatactaatttcagaagaatggataccaaaaatgattgatatttaatataagttctctggaaaatacatcaaactctttatatttagcaaagttttagcagggagtatttgatagttaaactgaaaggtatagcctttggatttaccatactatattttgattgacttcacttaaatttcctaacaaagtgagacaaagatgatggctagctatgcagatgttggggctccaatccacgtgtgtatatcgggaagatttcccatcaactgaagttatgatgatgtaatactcatgggataaaggcaaaaatagcatacttttccagagtttggaacacaagacaacaaataaagcacctgcacttctctttcattaacaagataagcacactttttagctatcgaaatccctatgcccttgtaggctaaagaaagctttcacaaaaagggaggaatttctagccagaagcttctaacaacgactagtaataacaagcacaagtgagcaatcaatccagcacaaataacagctggattagcatcaaccaaaccacagccacaccctcggatccgccccacaaaaaaagaaccaacctgagcacatgcacctcctcacaggtattccatcgaacacgtggtgagcaagcaaacgcgagtagcaaatcaagaaccccgaggaggagcaagcggagcgcacagagaatgagagagagagagatccacacctgcgtggctcaggaggcggcggcggctggtgtggtgagtagcagcggtagaggtaggagatcggggtggcgctgtttctttcttccccctttatagccgccgctccgcactcacgcagccaaacaccccagtccacccccagcgagcgcgacggaagaggaggactcggaggaggggggaaagggaaagaccgcgacgcgccgcgccacgaccacgaggcgcctcgcctcgcatccccgtcgcgaagattctctttgtttgggtcttgacgtctcctttttttatgtcgacttgtgtgcctcctggtggctgctggtggtggtggtgctcgccccgcgggcgcgccaccgccactccctcgcctcgcgcccgcgcccgcgcgcgcgccagtgaaaagtactagtaaaaaatactagtggcgaaacgggcggtgtcgcggagagccccccgcgggtgtggagcaggttgggtgggtgcgtctccgcgacggcggcgccaagcttggttcgttcgaccacctcgagctggatttcctttcaggaggcggcgggttgtccgccggctcgtcgtcggggcttggccgatgggagattgcgggggaagaaaggggaattgggccacctaaaactcagcttttccaaggggtgtgtttagatgcgggtaaaactttctatttgctgtcacgtcggatgtttggacgctaatttagagtattaaatatagactaataaaaaaactaattttataaatgagagctaatccgcgagacgaattttttaaacctaattaatctataattataaaaagtttattgtagcatcacattgtcaaatcatgacgtaattaggctcaaaagattcgtctcacgaattagttcaaggttatggtattggttttgtaattagtctatatttaatacttcaaattagtgtcaaaaatccgatgtgacagggacttggaataagtccccgttttccaaacagggcaagtcttgtcatcgagttataaaatcgtcctctaaccgtaaaaccagatatcggacgtctctcaactaacaagatcgttcacttgaggtccttcattagttttgactccggttttgcctaacgtagcggctgagtcagaatatgacccacgtgggccccatatgtcaggatgccaaatcagcatcctctctcttttcctctcttctctccctttcaggatgggaatggttaggatatggatcgaacctaaaccgttttaagtgagttcattgatccattgtttaatagggttaatctatcatgagtccactatatcaatggggtatccatggatatctaaatggatcatctacgttactatagagaaaaaaattcttattacatgtatgtaaaacttgggctcaaaatttttaaactcgcgttcacattataaaaacttatcaaatttaattgaattttgcagagatgatttattatatggagaagcaactttgtacaaattttaagccatctagacatgcgggacccacgatgcattactaagatttaaaaattctagttacatgtgtgtaaaactcggatccaaaattctagttacatggagcaggttgggtgcgtctccgcgacgccaccaagctgggttcattcgaccacctcgagctggatttccttttagggctccggaggaggaggaggcgggcggtggcaggttgtccgccgcaccggctcgtcgtcgagccgaggccaatgatcgattgcggggaagaaaggggatcgggccacctaaaactcaactttttacacagggatttgcaggcaaggagtacctatgcatctttcgaaagatttttatgattatatcacacagatttttattctttggattaaaagccaatagacacagtaaaagataaaaagtaactaagaaacatcataatggacactaaattaccatatcttcaaagaaaaagaccaaatccaatataaatttcaaaacttacatacgaagattcaaaaattacactgtaacttacaaaagttacaatgtaagtttcataaattatattataacatacaagaaaatacactataaatttgagtgagaaaatcgagggacagataagaaaaaaatctttcgagtgagatatagcaaaatcgttgcaggctcatctcatcgcagcccatgcccatctcattgcaggctctcacggcccaactgactcctaactaaaacaaaattatttgacatgtttaagtatacttaattagtttaaatacagatcatgctaagcgcgaggcccactttcacttgcgttagcgaagatttacagttgtttggcaacttcgagttaaagatttacagggtcttggtctcaacagctaatgatgaattgatgatatactatccatcactgttaactgttcagcattcataccggaggatgatgccatgaaaattaaggattactagtacgagtgtcatcctttcagtgcaacaaccaacagaccttccctgactgcacttgacaaacgggggccaatcaaccggctccaaacaagacccatgaatttactacagtatctgctgtccttctttcgcagtgacagaaataattgagagacactaattgctcatctccctccttaattaggattgtcccctgccaccacattcgtatatgtcagatgttctataccctgtcgtatgtacgtccgcctaaacaagggtccgcctaaccttttaatttttcgttttcacttttgtttgtgcgccatgctctattgaaatttagcatatgttacggtcgtaaatatatggtgttcagattgtagctaaaataaaccttaccaaaataattttagcaggatttcttatgtatttatcaatttaacaacaagctaaacgtaactattcttttagcaactttaccatggttaaaaatgacaccgaagtaaacagcccctttatcatttgagacatcgatcagtgttttggagtttcttccttccaacattgcaatgtcttaacagatcagtggtgtactagtacaaaactccaagtcgcggtttacaacaaaagaaaaaaaatagacgtttaaccctttttctttaccacaaggaatactccatccatctcataataagtttattttgtaacggagtttataaaaatagagaataattgtatttggtgtagataaagtgctgaaacagttacattgggattttacaaagtagagatattctatttattttaattttgtattggtagatataaaacgagtgaaaaataaatttattttggaacgggtggtatcttgcaagcatcgggctgccggaaccaggccggcccgagctcagcgaggccgagaaagcaatcgaacacggccaatcctcccctttcccctcgcacaccacaccgcggcaccgcgcgcgtcaccggcctcgctcgcggcgcgtcacgctgctcgtgcgtgcggccaccactaccaccgccgcgatcgctttcgcgcgcacacacacgcaacgcaccaagagtccgagactgcgcgacagggcgagcgaggggggaaaatggcgtgatctgcagcaaaacgagaggggaaaacgcaggaaaacgagcgggcgacgcaggattctgtggatattgtgggtaccccatacccatacggcatggttatccgactagtcataggggataacttatatctatggaatatgtaatagatcatgactcgggtattacgtttccttgtatattacggaacggcctaaagtcctggtttgataatattgtaaagtagatttaggaaaccgataccgtattggttaaggtttctatcttgtaatcctgccccccatcctatataaggtgggcaggaggccctctagggggcagatgacataacctaatcgtcagatcaatacacactcggcggattcaaatccccaaacaggagtagggtattacctctcattgagagggcctgaacctgtctaaatcctttgtctctgcatccatccacttttaggtctcgtgcgctacccccttttattattgccgaatccatgtttcgacagttggcgcgccaggtaggggttgcgtcgagtttcctatcaacaagcgcgatggaatcaatttcatgagtcgccgacttcgttttcgctttgggagttttcacttcctttccgtcgaccacttcttcaagctcctcttctctgacttgatccaaatcagtcagggggaaactcaatctgatttttatcattatttatcgtactgatttttaatcctagattaatctcttgctattttttgttgttgttcgcatataattacgcggcactattgaggcgattgatgctggtcatggactcgaggcgtctcagctttccggtcgatcggccgcaagtccactctgccggcttgtcttcgccaccgccattgctgataacaacaacgacttcaccgccggcctgcctccgtcgccgccgagtggtgcctccgcctacacggctggcctattatgccgccgctgttgggcgtctacgacttcaccaccggcctgcctccgtcgccgccgattggtgtttccgcctacacggctggcctattatgccgccgctgttgggcgtccacgtcttcaccgaccggcttgcctttaccgctgccgattggtgtttccgcctgcacggctggcctttatgccgccgttgttgggcgtctacgtcttcaccgaccggcttgccttcgccgctgccgactggtgtttccgcctgcacggctggcctttatgccgccgttattgggcgtctacgtcttcaccgaccggccgcctcgtccgccgccgactggtgcttccgtctgcacggctggcctttatgccgccgttgttgggcgtctacgtcttcaccgaccggcttgcctccgtcgccgccgactggtgcctccgcctgcacggctggccattatgccgccgctgttgggcgtctacgacttcaccgccggcctgcctccgtcgccgccgattggtgcctccgcctacacggctggcctattatgccgccgctgttgggcgtctacgacttcaccatcggcttgccttcgccgctgccgactggtgtttccgcctgcacggctggcctttatgccgccgttgttgggcgtctacgtcttcaccgactggcttgccttcgccgctgccgactggtgtttccgcctacacggctggcctattatgccgccgctgttgggcgtctacgacttcaccaccggcctgcctccgtcgccgccgattggtgcctccgcctacacggctggcctattatgccgccgctgttgggcgtctacgacttcaccgccggcctgcctccgtcgccgccgattggtgcctccgcctacacggctggcctattatgccgccgctgttgggcgtctacgacttcaccaccggcctgcctccgtcgccgccgactggtgtccccgcctatacggtcggttggtcacaccaccgttgatgggcatcgtcatcttcaccgccggcctgcctccgtcgccgccgactggtgcctccgcctacacggctggcctattatgccgccgctgttgggcgtcttcgctttcaccgtcgaccgccttcgtcgccgccgactggtgtcttcattgttattgatggacgactttgttcccatattggccacttctgccatcaccaaggggaatattacaaagctaagtcatcatttattttattctttatatgatattttgccttttcctctgcctcactacaccaattggtcttccattgagtagtgagtcgggggctacagatgttatatcgtattttttaaacaattttcataatatttatcttgattgcttgcgacataatctgagtacaaaagtacctatcgagttatggagttctatcttcctatgctttctgttcggtttgccaatggatggttgcctttgggccgattcctagcacccgggggctcgttggatggaccgaataacgcaaggtgctaagtattattcagaataaatcaaaagcatagagataagataatttattttctgctcttaataattgcaaaagtacccgagtagtaaactccgatccgtgaaactttgttccattaatgacgaactcatgacactcatatgcatgtttgggaagtgcttaggccgactcccagtgcttggtggctatgactagtcgggcagagtgcttaaacgtaatgagtcatctgttcggggaaatcaaaattgacaagaggagaaatacatatttataaatattttaaactgcttgaatttttctcgagtattatatttatatcagatactactcatcctatatgtttgttctgcaggatccagatccagatatgcataaaagggattcatggctttaagcttatctcttacgctccaggaatggatcagtcagaacaccaccaccggctcgcctcgaccgccgccgactggtgttcccgcctgcacggctggcctattatgccgccgttgttgggcgtctacgtcttcaccgaccggcttgccttcgccgctgccgactggtgtttccgcctgcacggctggcctattatgccgccgttgttgggcgtctacgtcttcaccgaccggcttgcattcgccgccgccgactggtgtttccgcctgcacggctggcctattatgccgccgttgttgggcgtctacgtcttcaccgaccggcttgccttcgccgccgccgactggtgtttccgcctgcacggctagcctattatgccgccgttgttgggcgtctacgtcttcactgaccggcttgccttcgccgccgccgactggtgtttccgcctgcacggctggcctttatgccgctgttgttaggcgtctacgtcttcaccgaccggcttgcctttgccgctgccgactggtgtttccgcctgcacggctggcctttatgccgccgttgttgggcgtctacgtcttca

SEQ ID NO: 10420 - DNA, 60255 bp, Oryza sativa
gtggagtctggtgaggcgctgggaggtccatgatggccagcgaggagcggcgtggtgcatcaaggcggcggtcgacgaggagcagtgggcacatgaaggtggccatcggcgaggcggcacggctagatccggcgtttcctcgcttggatggcgcctcctggcctcgtttcgccatctggtcggagtggaaccgtcatcgagaaggcagggtggagctcgccggcgcatacggagcggaggtggctagccaggtagttggggagcggccggcgaggaggctggttggagctcggcggtgcagatggagggttagctgcagcgacaagactccgtggtaacgagaaaattgcatatctaccatcgcataagtttggattcgctgaaataccatcccttgatcaggcttcgctagaataccatcctcaaccaggacatctttgctaaaataccatcttagacaaaaatgttagaacaattgggctaggcccgatttattctattaaatctcaaaggcccataataagtgttaaggataataataccacctcaggaattaagcgagaagtacctcaacttaaatagggagttatcggaggctccctgttgaccggttgaggtgggaatcggaaagccacacgcgcgcgccgagccgagctggggcatggcgggcgtcacgtcagtctctatccttttgctaccacgatcccacattcccacgactgcctccgttacggtgcgtgcacgatcgcacgataccacgatcccacgacgcgcgtgcggcaactgggggatatctctcctgctatataaggaggccgctagtccgatcaaaacgattcgcttgctttctctcgctggtgttcttcctcctccgtgtgcctgtgctgcctctgtttcgcttcctcgcttctgatcgcttgcgcgcacgagagatcggatcggaaggagcagggcctccggaaccacaccttccgactgcctccgtaacggcgcgtgcacgatcgcacgataccacgatcccacgacgcgcgtgcggcaactggcggatatctctcctgctatataaggaggccgctagtccgatcaaaacgattcgcttgctttctctcactggtgttcttcctcctccgctcgcctgtgctgcctctgtttcgcttcctcgcttctgatcgcttgcgcgcacgagagatcggatcggaaggagcagggcctccggaaccacaatttcgcccgctagtccgatcagaacgattcgcttgctttctctcgctggtgttcttcctcctccgcgcgcctgtgctgcctctgtttcgcttcctcgcttctgatcgcttgcgcgcacgagagatcggaaggagcagggcctccggaaccacaccttcgcctgagatctgcaccgggtaggcgggtgatcaggtttttggggagtgctttgtcacgcccagaaatttaacccaaatttccagactattttgcgtagtaaatccctgtccaggaccagccagggtacacaaaacgacaagtaatatacagttccaaacgtaaataaagcgtaaaatacttacggaagaggcacttagtcctcacaccgaaacagaacgacagcagcggaaaaaggcgatcctagcggggcttcagctccactccacaggcaaaactcaactggggtgtgagccttggtcctctaactccatcttcagctcagaagcactacacttctgaaaagggagaataaaagcaaggctgagtacaaccaccgtactcagcaagccacaccaacgacgcagacgtgcaaagggatacaaggatggtttgtggctatttgcataaaggcggttgtaaaacattttattgagcaaaatagtaaaactgttgagtaattaaagtaacattaaatctccactgatcaacgctacaccacgttgaacaggcccaaccaacccacctaaactacagtgtattgggttgatttattaagtgtgagactaatcacggtgaatctggtcgaccgcccataaccgcgggcacggctattcgaatagttttactctgatcagaggtgtacaactgtacccacaagacacagccccacaacacgtttccgtgcgccgacatgccaccacgacataccggaaagaggccgtgacaggacccttcgcataaccccctctaaccaagcacaccacacctcaggtttcacccccgtccccagcgggcaacgggcagtcccctctcgtgcctaggtgaatccggaagcgacagaggccgtcgcagggcccgccccgctccatcacgcccacccttgcctggatgcgtcgactagaggaaagctacactacaagcccagccgttgcccacgctggcttgtggtaagtacgataagttcttccagggcatcccgcgaaccggtccttaactgccatgggtgcgaccagcaaaaccatgcacccacagcccaccattcagtcgcattttagttggataattacgaccatgaagcatggccagatgtctcgagcacgtagctcactctgatactaaaaaggtctaatactgcaattatcccatcaactgagctagtggtaattaagcatggctaagcatatagttctagctaggtcacataagtaacatgagctagtcgattcattacccaaagttgacaaagaacagatatcaagtaaacatggcacaagcgagcagataggtaataccctgaccccatgtaattagcaaaatatgcatatttatttgcaaatagtaaaacatttgtaaattgggatcaacatgctcaaggggaatgtgtgacttgcctcgcttcttcactttgatcttccgaactcttttcctcgcgaccgcggacttccgaaacgacggaaactacacgctggcacgcaaaacgaggaaaaactctaataaaaaccaaggaaacagtacataaaaagtaaacaaacatgtagagctcaattttagatgcattttgcaagttgaatggctcaattcggagttcgaatgaattagatatgaattttagaagttttgagccatttatatgaatttctagaattaaactcgatttattgcgcaattattatttatttttacaaaggaaaagacggttgctgacgtcatcaaaggggaggggcggcgccggcaagcgggccccaccggtcagcggcacaagggcgccggtccaccgtggaccgggaccaccgaggcggtccaccgccggtccacgggaaccgacggcccggatcggcccaaagccgatcggacggccacgaggcggcgcggctggggcacgggcacggcatgaaaccggctcggccgagccatggcgcggcggcggcatgcggccaccggcggcagcagccggcgacgtggaacggcggcgggcggccgtaggacagcggcgcgcactgggacggcgacgcaccccaagaggcggaggtcggcaagaaaggggaacgggaaaaaaaggaagggagaagaggtcctcaccggaagcggcggccggcgcggaggaagatgacggcgacgacgattgcccgatggcggcttgcgaggacggagggcggatggggtcgcccttgaccttcagaaggagaagagggagttagggaggggaggaccgatgcggggtgaccggtaacgacggccgaccgcgacaatgtgagaaggatctcaccgacgaccgaggaaggaggagctccggcggatttccggcgaagaggggcggcggccgaggtcctcctcgtcccagcggagctgagggaggcaacggtgcgggtcggcgtcgaccgaagcggcggcgcgacgcggctggagtcggtggcggcgacggagagaggtggttcgcgtggctacggcgctacggaggtggagaggggaaatggagcggtggccgagcttgcctgtccggcggcaaagctggcggtggcggcggagcggtgcggcggcgaccctagcgacgggaaacggcggccggagttcgccgaagtgtggcggcgcgcgggagcggcgtagggagagcgagggagagagtgccgggctcgggaaacaaggggaaatggacgaggggagcacgggggtgctttttatgggctcgggaaggcgggatcgggaccggacgtggcggaatcggccggcgaagtggggcgccgacgtggggtggtggaggggttaaccggcgccgattttcgcggggagagtgggggaaagggcgcagacgtgggcggcgaggtcccacggacaagcgcgcgcgcgcggggtggaggaggtgggcggaaacggcggcgtcgtggggcggctcgggcggccatggcggcagttggggatggagctggaggtaggagatgacatgtggggtccacggatcccacctgtcggagagagagggagggagagttggaagggggacgtaaaacagacttcgcgagggagaggggaaacgggccgacggcccaagagaggggagggaggccggccgggagagggagagagagggaacgggccgcgggagggaaagggaattgggccggggcggcccaaagagagaaaggaggattttatttgttttctttttattttaattgattaaatgaactttgtgctattaaaactatttctcgagctccgaaaattcacggaaaattccggagagtacattagggcacaaagaatattacaaaatattcccggccaataatttttaaaggaaatttttaatttcctctataatttcacttgattaaattgatttaacttttaatataatttcttgaaatgcattattaattgatttttaatctcaaacgaaaatcggggcgttacatgcttcccgcacgactgctctgttcatcgttgtctcgtcgtccaccatgtctgcacctggaaccgatggcgtgcctggagccggagccgccgctgccgccgtctctggagatggcgctccgggagccggagccgttgcgaacgtcaacatcgacggaggcagttctgcctcacaatccagcggagggccattctcggggtatgtctctctcctactgtcgttcatacctctgtttgttctgttagtcgcattgcgttcttggtatgttcatgatgcttatgatactgtaagcatacttctggttatgctaaatgttgtcacttgatcaccccacattgttcatgccatgattattgtcttaaaattttggattaaaatatgccgatatatgaccatatttccaacaaaaaatagccctgattcttcttcttcctcactccaaccagaagagctcaccggcatccaccgccgtgccattggtgccaccttgccggcggtgatgctggcacggccctccccatcgtcctcgccttccatcctgcccaccgcgctggtgtgaggagaccgcagctgacgtcgacagagccggggagtcaaccggggagtgggtcgacggagacgaactcaccggcgacaagggcggcgcgtcgaggcgggcggacgaactcgccgacggtgggggcggcacgtcgacggtggccagccgaggcgacgccagcgaggcagcgacaggccgagacgacgcacgcggcggcgaccgaccgacacgacacgggcggcgagtcgggacggggcggcggcgcgacggaggccggccgagacgacgcgggcgacggcggccggcgagtcgggacggggcggcaacgcgacggaggccggtcgagtggcggggcggcggcgcgacggcgcgcggccgagacgacgcgagctggcgcgtcctcgtctcacctgccgctgccgtgtcgaaggtggaagatgaagaagcggggcattttcctctgtgatggtattttgacaaacacacctagttaagaggggtattctagcgaaacactttttagtgatgatattccagcgaatccaaacttatgcgatggtagatatgcaattttctccgtggtaacgtgagtggctgctggaactgaagcttcccggcggcggcaatgtggagatctctcgatggtggtggcacttggtggcactagtggctgttgaatcggagctacacgaggttggcggagacaatggagttggtggtggcgaagggcagcgatggtaccgtgtctctgatggcgagggctggcaacggacagcgatggtggctagccctcccccgtgacggcgagccagttcatcccgtgaccgtggtggatgattggttcgatgacggcagatgaagttggcggtggtggaggctctcgttggcaacgtcctagttgtggcggcaactaggcgagctccagcaccagatctgactgtagccaagccagatagtagaacggtggtcgtcggtgacatagatggttgatggtgtcgtcaactttgaagacaacggctgcggaagctattagcagcgatgccctagtggtgacggctagcaagtgacgtcggcaccaagatctgactgcggataggtgtggtcggcggtggaacatcttcgacgagctcatggcagtaaaatgcgaagtggcattgcagcttcacggcgcactaggggcgttcggaatgcggcggtggcgtaaggggatttggatgacgacaacggatagaaggcacgacaaatggcagcagatgttggttgtgatatgcggaggcggagatggtgtagtgtaacatcctgaaaattcccaacaataaaaaaaaatcactaaaattttgaactttttaaaacttttgcatcatgctggttgttatgattgctattgcttgccaaaccgtaaataattacaaagaaagcaaacccaaacaaagggaaggttaattactaatttaatttatagttcaaatattaaatattcggaccatgttgatagcttgatgccatgattagctaaaagaaacagtaaaatcaaatccaattcatttgaatccaatcccacatgaaatataggaacacatgaaatgatgatcaccactataatgatcgtgtttataaataagtaattcaccggaatatatagattgatacttacaacatttcaccgaattcctcgtgacatgaaaatcactcatataaaataatggtcatataaataaattaagctttatatataaataagaatatgtgagtgtttaattagacaattagattaatattgtaccgagtctcaatttatatttatcgaattactagatccacgtaaaatacattattatacaaataagttcattcaatgtgctattgtaatagtaatggccacattaggatattttaattaattttggaaccctcaaagcctccaaaatttttctaggttaattttagaattagacctcatttaaataatataatagaaaaatatatataaaaataaaatatgagtaatattaatctagggtgaattcattagttaagataacacaaatattgagtaaaatgcatatatgcaaaattaggaattgtggaatcaaatttatatggaaaatacactaaaatcggactaattagaaaacggcactgttcattagccccctaggtgttcgatttggttcctagccatccgccctcttcctccccactgctgcgccgccctagccggccttgagccccgagccgccatcgccgtctcgtcgtgccatcgccattccatcaccctcacccgtcgccatcgtgccgcgccgcgcgccgtctcgtcgacgatgccgcgccgcgtgccgtcgccatcgcgtcccgtccctgctgccgccgtgccgctggcgcctgccgcgccgcgcgccgctcggccgtcgccgtcgcgcctcgcgcctcgtaccaccgcgcgccatcgccgttgctgccgcgtcgtcgtcgccgttgttgtcgcgtcatcgcaccccgcgccgcgccgcccgctgtcgcgtcgccgctgccgcccgtcgcgtcgccttgcgccccgtgccgccgctgccgcgctgtcgccgtcaccgtcgcgtcccgcctcgtgccgcgcgccaccgctgccgccccgtcatcgcccgctcgtcgcgcgcgccgccgccgctgccgcgccgtcaccgtcgcgtcgccgtcggcctcgcgccttgagccgccgcgcgcccgtcccctcgccgtcgccctgcgccactgccgcgccgcccgttccatcgcgccgagccccgtgccgccgcgcgcgtcgcgtcgcctcgtctgtcaggacgctcgcttgccacccgccgcgtcgccgtcccatcgccgcgcgccgtcaccatcgccgcgtcgagccccacgccacccgtcacatcgcccgtctcgagccccgcaccgccgcccgtcgcatcgccgctccgagccccgcgccgccatcgcgtcgccgcccgcgcgtcgccgtcgtcccgagccccgtgcgccgctgtcgcgtcgccattaagccgccgccctttcccctctccttctccccctcttccctataaataccccaccccctctccactttcccccactccatttccctcctcctcccctcttccctctccaccgcgccgccgctctcgtgccactgcgccgccgccctcgtgccgcctcgctgccgccctcgaagccgccacaccgcgccgtgtgccgtgccgagcgtcgcctcgccttgcgccgccgtcgccgccgccgtcgtcggtaagccgccgccccttccctcgttccgccgccgtcgccgccccgggtagcctgagccgagagagagagagagaggaagggagaaagaagccgggagggaggaaagaaagagaagaaagggaaaaagaaagagaggaagagagaaaaaagaaagagagaggaaggggagaaaagaaagaaaagaaaagaaaagaggaaaagaaaagaaaggagaggaaaaaggaaagaaaagaaaagagaagaaaagaaaagagagagagagggaaaagaaaagggaaaaatttagggggaaatttaaaatatttacaaatattagaatttaattataggattaatgaaaatataattagatgaaatcttactaattaaatacctaaaatactagcatttaaatataggattaatgaaaatataattggatgaattcctatagattatagatataatgctcgggtagattaaattaaaaacttatactaacaaaatatttatacccgcaaaatagtttaggatgtataaatcgaaaatggatattgtacagtggcataattatctttaacatgtcttgtcactgtagcaactaaataaattagttataatcaatccttccaatttatgggtgtataggaaaatattagtgccatttactagtctatgtccaaatataactaaatccatgacttataaattgtttacataaagtttagcctcatattttgtaactaaaatataaacacacatagatgaatctttaacttgtttaggagagtaatcacagagctagttgtatttggaccacttaaaaatttgtcgatacaatgtcatgtgaagtagaacatatgtatataatcgattgatatccattagttaaccaaacagagccatcttaaaatcaacatgtattgtatagcttacagtaaaaatcaactactcaaatatatgatccaataataagatattgttgcttacgcatatactatacatcccattatagtagtacggtatagtattaatttgcgtgttgcatatattaaattaagagggagtgtatgacaaaaatgtatattggataaatactagttataaatcttgaccccatataattataattatagttcaactgtaaattaggattattcattgtaaaattatgtgatgggataatctgtaaccataatatgattaacctaaacaactctaacatagaaagcatggatgattattaaccttttgtaatttattgcgacaagtgaaatatgttcataattaaagtaaagcctccatcaattaaataataatacaaatgattcattatttgattgatcctaaatccatccgacaacagaacctctagtatacgaccattttatttaggtagatgcatgtgtagccataatccttccatagccattagctagactacaccacatattagccagatacgtatctcatttatactacattgattagctcctgaatagaccaccaagacaacagaaagattaagtagcccttagcatgttggaatccattagcaaacgcgaataatatgagcaaccttaggttcgacctcaacaaatatattttgtttgtacatatttgattgttatttgaatattggtttttctcgcgtattatagaatttgtatatcggttagtcgtgaggcaacgtatgcagcttccaggaggtgaaggttgatcaagaattatatcaagaataaggactatcctgagcaaggcaagtcatcactattccttgaacatgttgatcccaattgcgaaattgttttgtttacaaataaaattgcatgcaatgatgaacatcctacttgtgattatgccatgccttgattattgtttaccccttattccttcgtaaccatgtttacgtatgagtccctagtcaattatgacaactgcttagaaatgctattctagaatcatgcatactcatatttatcaaatgctatatgcttgggcaattacctttgggaaggtaattgagatgcggcatgtggagacatgagcgccacattgccatgatgttgatgacatgatttgtgaaaggagaaataaaattaaacaactgttttcgactggggcggacggaggatttgggtggtatctggaaaaggctagtaccgttcccggtcaattaaggaccgagccatggagttaagcgtgaaacgacccccgtacaaccgtacttctcgaatgggtatagacctagcggattagatagccgagcggaggcagtatccctgcatagatggttcacccctgagtgaggcaggtgcgctacaatgggacagccgttgaggtagggccgagaggcgtgccctacatcggtgtcaccattggtaggactgccatgagtgtgtgagagagagaacttaacttgaaccataatttaatatgcgtgtgagacttctctttcccgggagcgccagaactcctctcactgctagaaacatggacgcctagagtgcatgaggatttaagttcatggagcgggtactgccaatgcgaggttatcgaaaagctttgccgtgacgcgtctcatgtgttgggacgaggctcatgtgttgggcagtcgcggagtgcgggtaaagtgtacatccactgcagtgtgagtaaaccaaatctattcgaatagccgtgctcgcggttattgagcaccgggacatgtattgcacttggctagactccaaattcttaacttgtgggggatgggatattgcatgatgaattttatgctgatggagccacatcccgagaggagggaaggtggacatcctcagaaaaccatgacgattcaatggcgggaagctatccttgggatcacaatggatggtggacagaaccgtcgttgtttaaagtgaacactggtactaaaatttgatcagtctatgctaggtcttaggcttatgaaaagaattgaaaaattagctttatgcaaaagaacctgaagcctttccttgaaataccttctatcatacgcattgttgttgtggtggcttgctgagtacggttggtactcacccttgctatttatatatcttttaggagagtgttgaagagaagcccttgtcggtacgcttgcgtatcccacaagatgattggagtgcggtcttgttctaggtctcgttccccagtcgactgcctgtggcatgttaaccgggcccttatattattttgtcttccgctgttgttctctgatagttgttggcctacctggccctaatgtaagtgtttaactcttttagcctaaattcattcgtgatatgttgtgatccaactatgtatgtgtgtaccaactactgatccagggattggtacagataaacacagaagatttccgatttccaaaatcgggggtcgacatgtagcgacgggctatggggtctagttccagttctccctttcctcttgtgctataacaaaaagagtatgtcatgtttgaagtttgaagctaagtcttctagtagcttttctttcttgtgttttatgttttcctctatagggggtttagagtctaagaacccatgtatgttttagctatgtatatccttcatggatatagaggccggattaatgaaaatccattatctaaaaaaatatggggcatttgcaaatttgctaccggttttttcaatattgcaaggatgccattcgaatgacagttctagtggtatttttgcaattttctagtggcagttttgcaataacgattcaaagtagtggtaaatttgcaattgccccaaaaaatatagctttgacattgtcctactagagctacttactggtaagatggccttcaaccttgaagggcctgaaaatgagaggagcctttccttgagcttcttgtgtgccatggaggagggaagactcatggacattataggtcatcacattcaaactgatgagaatgctggggtgctcgaggaggttgccaaccttgcaagccggtgcctggagatgatcggcaataaccgcccgtcgatgagagatgtcgctgacaaatttggccggctgaggaaggtcatgcagcacccatgggcgcagcatgacccggaggagatggtgcaacattcaaaatagagaaattgcaacatccaaaattcattgtctgcaacatataataagacatggtttgcaacatcttcactagctcttcaccagcctcactttcatcagtgccggctccaacctctccacctcctcaaacagtggtgagcaacactgagatggagacggtgactgcaggaatccccaacctaaagcaatctcccaatatcccttcccctctctagtctccatggcagccctcccgcagatccaatgctctaaagttgtgggtggctagatctgcccagaggagatcccgtgaagattaaggaggagaagaagttaggagaggagagggagcgggtagagaggagaacaatgggggaaacgtcctagatgacggtgacgaggatagagtagagagaaatgagcgagaggggagaagcgggcaagatgggtggggtctacgagcgtccgttgtccgagggattctctcgcatcggatggtcaatcaaaagcatttcccccctttcagtgatgtctctacaaagaaatcttcttttacacatattttaccgcatttgtggctttgtgtgtgtggttttcccttatgttgttgatgatatccgtggatttgacacaagggttcacccacaataagatccaaccatagtgtttcctgtacgtcgaagcaacttattgtactagcaactcagcttctcaaaatttaggtacattaaaaataggcttgcgcacatttaagcacaatacatcacagaagtcttttattcatatataatcatatataaaccacgtacgtatatagcgaatgtaatacaacacaaataaatgtatacgacactgacagaggtataacggggcactagtgtggtaaacccttggacctagtccaagcacatacacatgcacactatatatgtatagttatatagtgattgaaagaaatatcacccttaggtcttgttcggttcattcccaagagagagattagagagaattgaggggattaattccacacctcaataaatgtgaaattattctcctacaaatctcacttaacttcttgttgagggattaaacgaatagacctaggggtgaatttatcatgagcactgatccaaccatatatccaaggatatattcatatgtagataatatatatcatatgtggacataaactccgatagagtccacaagtgctcccgcgcgtccgaagaaaccaaccacactgccgctctgcagcgggaggctaaaagcagttccaccaccttgtccaaaattataagtggtgacattggtgacaattttaaggtttgtcacgacgttggtaaaagttccggagattcccttcacgaattcctgagatccaagtgtaatctgtatgcaaggacgtgcggaaatatcatcattaattgatttccaccagtgaatgaacttgaataacactcccttattttctttatatatgatgcttattagttttaacactaagcaatgtcatatatataagaaaaaaaaaagagagaaaggaacatgtattaacgggcagcaatcattatattcaggaagaatattaatgggcagcaatcataatattcaattttaactgtgctaactagctaactactggcactacgtgttgtttaaggtcaatacatatgacatgcatctacacatatactttctccagttttataattcttaatattttgaacaaagttcaatccaacttttataacttttattatcaataactttaaaaatatttaaaaatatttagtttaatttgaagtcgcttaaccaacatatatagaaactagtcctaaaaattactataaacaaaagtaaatatttatttattatgtataatataacagaaaattatagttaaaaacatttttttagaccatatcgttgttcaaaacgtcaaaaattatataactgaaagagtagcgctatagggtttacaaattaactgctaccttcgtccctgaaagattatttttaactataaatccagattcatggttgaaaacagagccttttatgaaactaaaaacataatatattattatattatatgtaccgtagttggatttccaccgccaccaccccaaggacctgcaagatgttccttcccatctgtgccaatgtatgtaaaggcaatagcatcaatggctgcaccactacggattgtcacgcttttcaagctccttgggagtacagataggtctacacgacctcctccatttccaccccatgtcccgatcttaacaagttgtgtggtctgcaaataaaacacatcaatgattatgacacatatgcaatagtgtgcatgttcagaggcaaatcttaacgatgcaattaaaacacgcagcatttcagaaaataaaaaaaaatattaaagaaaaaaggtataagagtgctacttaataattagctaaccattttaatttgtagcctctgtcctactatgtatctgtgactagttgtactgctatggttgcaaccagtgagcgcctcctatttatagtgctggatatataagcatgcagacataacaaatcttatccaaaacaacaaagcaaaattttgttttatcaacttgcgaattgtgaaggtttactagcttcttccttagaagcaacatttttctcacctcattccacaaaccttttttactgttgtgatacatagttgaccttaatatcttcctttgtggctagcttaatctgttcataaaaacggcatcacgtccatttagacagattatctgctatattttggactaatgtctgatcttaacgatatatatctgacgatggacttcatcgatgcaagcatctgccgtttgcgtgaggtttaacctggtcaaatcccaaccctgcaatcaatccattacctgctcccctaccaaacctttactctaatcgtaaactgaggctaattaatccactctgcgttaaattcgtattctgtgatcaaaactaatgatcagctaggtgcctatactgtataataggactgtagtgtcagcacaagagatgcacactttgggaagggcatgtttaatatgtctacatgtataatctcaatcacagtgtgaacacatgcataatccatgctggagtacaagctagccaattcctttgggagaaaaatatgaagattacaattaatgtgagtgccacattgcatgggaacgggttttcaatcaatatgctacaaacgtggtcatctctgaagccatataacggcaaaattggttacgtagcatggaaagttcccatttttattttttagcaccgtcctatttttatattttagcaccgaacattcacggtttactttaatagcatcaaaagatagctcatatttaacgctccgttcacatttccgttagaatcgctctccacttatacatacatacatacatacatacatacatacatacatacatatatatacatatatatacatatatatacatatatatatacacacacacacatatatacacatatatatacacatatatacacatatatagatatgtatacatatatatatatgtatacatatatatatatataggacactcatatggggcaccatggtgcccgggcaccatggtatgaaatacacaaattcgcctaaatttttcaaaattttcaaattgtgagtatatacctagttataagtattcgattcatacctatacctagcaacaaaacaactcaaatttaactttatttcacaatccattattacgtacctaactaattatatgtttggatgctatatacctagaatcaaaatctaacaaaagcaagtttgaattcagttcaaacttgctttgaactagttagtaaagtagttaacgttaatacctaaatatttgaaaaagtttcatactcatttgaattgggtatatagtaaatttcaatcatggtgcccgggcaccatggagcaccaaacaaatttactatatatatatgtatacatatatatgtatacatacatatatgtgtacatatatatatatatatatatatatatatatatatatatatatatatatatatatatatatatatgtatatatatatatatatatatatatatatatatatatatatatatatatatatgtatatatatatatatatgtatatatatatatatgtgtgtatgtatatatatatatatatatatatatatatatatatatatatatatatatatatatatagtaaaattaactggggcaccatggagcccgggctccaagattcaaattgagtatatacctaatttaaatgagtatgaattttttttaaatgtttaggtatgaacattaacttgtttactaacaagcacccaatcacaattagccatcataccagcacagggtacttcaacaccaacaaaatacactcctcctgctgcaacagatgagacaccaactagcaaatcaagctccttagtatttaccaaaaaaaaaagcattattgtctcaagctaactctatgccatctcacactgcaaagacctctaccgatagtaaggtatccttctcaatgcctactcttgcacttcctctgctataacctaattttcctaaatatctggagatacactctgacctattgactaactgtgcaaggcaaaaattggcacacatcatgaagagaagatctcacaaagtgcatctttaattgcaattgttccccatgatacttcggataaggtattcctgctctttcttttcataacctaatccatcaatttctgaaaaaaaatacttcttctacaaggcaaaggtcaccactgaatctccagatgagtctccacaggcagatccttcactggcgccaaagagcacacccaaaaaaaggtctgtaaaactttcagttcaaagttacaataataaacatttcttgcacacattgtatttgacatatccttataatgaacagagctagacctgcagaaaccaccacaattgccaaaaaaaattgttcaaggatagtacccagaagaaacccactgacaggttaattctgaataactcagctcacctctccacacatacacatcaattctttagtaaacttcactaaatttctaaactcatcattcattcctgcagtgaatgatatggatatatgcagtccatcagcaagccttttgtgtatatgtacagaacgaaccacccaagctagaagtgtagaagcaacaagttagctgcaagcccagaggaggctaagaagcaagcctttttgttcatgacccctaggtcatgattatcattgtaaataagtaatgttatatttaccttgccaccttctatgctgtgaaatgctgttcaaacagctactacttatatggaacccaatatagttatggctgcgtactacctaaacatgtctccttcatatcaaatgcaccattatacgcaaacattttttatctactacagctatatcgaaccatacaatatactacttccttcgtttcacaatgtaagtcattctagcatttcccacattcatattgatgttaatgaatctagacatatatatctatctagattcattaacatcaacatgaatatggaaaatactagaatgatttacattgtgaaacggagggattacatgataaatagcacaaattattgaaacaagtaaactccattgcctcaatcctatgggatggaaagatttttgaaatacactacactatctatattcctatacatataaacgatgaaaaaacttccaactccacaagtgcagcgcgctttgcgcgctcctgcccctagtatcaatggctgcaccactacggattgtcacacttttcaagctccttgggagtacagataggtctacacgacctcctccatttccaccccatgtcccgatcttaacaagttgtgtgctctgcaaatgaacacatcaatgataatgacagataaaaattaattaaaaatcctatataaaatagtgtacacgtccagaggcaaatcttaacaatgcaattaaaacatgcatccatgcatgcatttcagaaaataacaaatatatattgaagcaaatgagaggaataattagcccaccattttgatttgtatatcctatgtgccctatgtatgtgtgactacttgtagtactgctctgctatggttctgtgcgggtaggcaaccatgcagagccacctatttatagtgctggataagcatgcattcatataacaaatattatccaaaacaacaaagcaaaaatctgtttatcaacttgcgaattgtgaagatttaattcttccttagaagcaacatttttctcacctctcccacaacttcttaactgctgtgatacatagttgaccttaatatcttcctttgtggctagcttaatctgttcataaaaacagcatcacgtccatttagacagattatctgctatattttggactaatgtctgatcttaacgatatatatctgacgatggacttcatcgatgcaagcatctgccgtttgcgtgaggtttatcctggtcaaatcccaaccctgcaatcaatccattacctgctcccctaccaaacctttactctaatcgtaaactgaggctaattaatccactctgcgttaaattcgtattctgtgatcaaaactaatgatcagctaggtgcctatactgtataataggactgtagtgtcagcacaagagatgcacactttgggaagggcatgtttaatatgtctacatgtaagtgaatttaatttatttcgattggagaagttgttagagattgttaacagtaactgttaaagaactccctgaaaaaaaaggggcctgaaagaaaaactatatggagagggcatatgtcagtgcatttaatttatttcgattgtcaaactcaattgttaattaaagaagggaaaaagtctaatttgactctcttaaatatacgtccaatctgactcgtatccctaaatcacaaaaccagatatgatgatttctcgaattattaaaatcgtctaaaataactctctcggttattttaagggtggttttcgctgacgtggcgtacatatggcagcctagtcatcctctccctctaacatctctctcctcctttcttcttctcggtgctagcgacggcggcgttcggcggcaagggcgcggcggcgagggcccgatgacgagggcgttgcttgcagctgctgggcccgacgacgacagcgttggctcccggacccgcctcctcagtcgtcgtcctcctcgtcgaccaccccgccatcgccgccaacatctcggccccaccgcgcgccgtccgctcggccccgtcgtgcgccgtctgctcgcgtctgcgccggaggatttcgcccccgccgccgatggtgctgggctggtagcacgctccggactgcatgatctgggtgcagtcggcgctgcgccaacacgcgtagtcaattgccttctgcatcgccgccggactctggtcgggcttgaacacgcagaacgccccatctgcccgccgctgccaaatgggaacacaggttagctcaaatcagtagctcaaaagttcagaactgaatgcatgtctcaatctgattcaaatctagcactagcatagcctcgaagtgaatctttcctctttgatgtttctagtgtgcacaaaaacaaaaagggaaagaggctatgcaactaagcaagaaatcgcaagataacattgagccattgctctaggcaaagattcctacaagcaactacatggtggtaataataaaaaggggcaggaaactcaagaaaaactgaacaaacacgagttttatttgcttttcttttttttctcgcagaggatgcaggtctgggttggggcctcacctgagccagtggacatggccaacaagagcagcagcgcagcagcagcggaatcaccatggtggcagcagcagcaagagctcgagccctctcccaacgccggaccccgtcgcctcctccaccaccggggggacgtgccgcgcagtgctccccctcgccgtccatggccgccgggagagagagggggccgacaagcctcttccaacgtgctgctcacgtcgtcgctgcgcgccaaggtgggcgatttcgggttcgcgagatgggcgtcgggaagagtgacgccatcgtcgtcgtcgacggcgtcaagacgaagcgtcagctacgatacgctcgtggggttgtttcgtccgccggcgagcggaggcgatgaggcggcgtccacggcggccggcggcgggagcctgcggtcctgtactgccgaagcgccgccgccgtccgagaagggagaggagagaggcggcgtagcgaaagggggggaaggggacacagacgacgacgatgacatggagatggcgcggagctggaggtggtcgcctgcacgccgccgctgccgatccggtggggaagagaaaagggggagagaagagagagaagggagagagagggaggaggaataaaggatgacatgtgggctcacaattattttgtgtgtgtgaatgacagatgggttctacatatattttttttaattttaatgccatataagcgtcatattggataaagaccgggtcaacaccgccatgtcagcgccacgtcagcaaaaccgccctccaaaaccgttagaggagtcaaattgcactggtttcaatagttcggggaatcgtcctacccagttttccagttaagggtcataaattagattcgatgaataattaagggagtcaaaatggactttttccattaagtcacccatccagtatggttgcttcttctggcccacccactttaaccgcgttggaaatctgggccacatataaagcccataatttatgcggagccgtaagattaggcccacccacagtgacggcctcgtggcaggtaattgggccgaattcttctcgcgggcccaccaccaacgcggccacgccaccgtcgccgccttctccatcggccgccgacctccgtgctccggccaatgccgtcgcccaggacggacacgccggggaagaaggagcgccgagagagggaggcggcgccgccgccgcttgcgcccgggcacatcgacgctggcgccgtcgcagaatccgccgccgttttctctccaatgcgtcgtgagtggggttcggagatttcaactccgaacaccattagtagccgggttttttttttttttttgcatcgccatgccgatgatgatcaacttggagcaccggtgaccttatttttatctccatcaacccgtctgctcttgatctgttcagtgtctcagctataagtttatgaatctaggaaaatctttttttataactgtaatcagctcgaatatggattcagtaatcgtgttaatagttaatgcatcagcaagcacatggtaattaggcttcagattaagcagtgagcacatatttggactggcaggtttcttggtgtgaaaagaagagagaaatctggtcagatccaacatatataatgcagatgatccagcaggtaagacaagtacgactgcattttcagcacatgctaaacacagtttgagcttgtttaatttctacacgcaactgcattttccactggagaagttgttgggaattgtcagcttaactgtcaaataacttcaactaaaaagaactgaaaaccatgtgaagggaccctataggaaaggtagccaaaattgtttaccacttcgcactttgcactttgcagtagttaacaagtatactaacaattggttagaactgctctgtctgttcagataaaaagccgcccttttggcccctccttttgaattagtcttttcttttccttccaatctcatatatatctgtcatctcaacttttcttcagataaacagtgacatctgaatactttggtgggagagagaagtgagaacatctgtttttgctgttccgtttttctacccattcgaaggatgtggactgaagaggatggcaggatgccgatgctcgtggggtcgatgatgttcaggttcagcaatgtgcaatggttgctgtgattagagcaaatggaccaccttttaactactagtactcctgaagcttcggcttaaagcacaagctcctccaaaaacaaggtgcatctgtcacagatcttgtcaatttcatattgatgaatctttcaccacacttgctaccaatctctaatctccagtttgcatagttgaatactgtatcactagcaggttaacactgtatctatttgtactatgcaaatacaagaacagtgtgaagtttaacattttttatgattatttcaccacacttagttactaccaatctccaatctccaattccttagcattgtgtttatctgcacaatgcaaatacaagagactctgaacaatgtgaggtctgaacactctgaaccactgaaagcaatatactactatgctctcttatgcctctcttaatctatctttttagtcttaaagaaaactcgcttttactaccaatctctaatatccaattccataattgatcccccaaattaacactgtatttataatatgcaaatgctctctcgaagaatacgcatcaccgaacagtctgaagcctgaaccactagcatataacctcctgttatctgaaaaagacaccatttttaccatattctcttacaagaaaagcaaaaaagaaaacatctttttttttaaaaaaaaagacatttttcttttaccacatttatagcgacgtggatctgatcaccgtaaaaaaagatattttcttttaccacatttacagcgacgtggatccgatcgtcgtgtaggctcccacttctatccggccaataggttttacaaaatcgtacggttatcacacgcttatcgtggttatcacatacggtaaccttatccgtttttgaaatcacaatatatctcataataatcacacggttttcacggtaaccctgtgattcgcggagaagcgaataataatccggcgatccaccgggagaaaaagcagctcagcctcagcaccgcacatattctcttctcccatcccgcagccgcagctgcagccgcaacggttgcccgttggttggttggttggctcgcctccactccaatccgcgcaggcagcgacaactcgctgggggtgacggcgaccactcctccacacctgcgcgcgcgcagaaaagctactactactactaccgcctttccaccaccaccgacgccgtcatcatgacggcggcgacgacgacgatccacaccggcagccgcactggtggtggccgcggtggtggtgacgccccactgccactcactgatccacccggccgcgcgcgagctaagctaagctagtagctagctgcctagctcggctccactcgctttctgatcttgcttcgcctacttgtctactcccacgcacgcacgcacgcaccagcgctgtccctcctaattctcttctcctccctttcgctttcgcttttttgggcgcacttatctattggggtttggacggcgacggggcaaagaagaagaagcccaagaaccggtcatctcgagctctcgatggattcagcgccggtaggactcgaggctagttagctagcagcagcaagaagcggttctttgtttgtttttagctccgattttgggcctgcaagaagagatgccttcccggcggagggaggagcgcgggtgcgggtgctgggcggcggtggcgcgggggctacgtggggcatgcttccggccggcgggggtggcggcggcggcgtcgggggccgacgagaagggcgcggcggggggctccgccaaggggagccacgtccacgacgcaggttggcttcttctttgctctccctttttttttccttcttcttgatttttgtttgtagctggttggtgagtttgggatcttcttttgtttttgtttggttctgtggggggtgattttgcttgtttgttctctagtggttggatatttttgcttggctattgttgcggcgatgtgattgatgttcatcgaaaggggaaacttttctgtttctgggaaattctggtcgtgttcactggggactgatctgttgtgtatttgatcggatgattagtgcttagtactgtcagtgatgtaatatacgtgggaattttggatgttataatgagaaattggaacttgggatacagattcagagtaaacggaaattggatactgttttgctgttttatctgagatggaacggatcatgcctatagtagtgctgtaagggctattcatggtggtacaggcatacagcaatgatttcttacaggcttgagtgtcataatcttaaaaagcttgtgctagggaacattgcatctatatgagcttgatcagaattatcttagcaccgtgtgttcttcagatttcaatgagagtgttcgcatgttgttagctgttgccatgttcgtaacaaaaagacatgttttatgttgttatgtgttcttcggattagcatgtttcaataacaataagaggatgaatgggttttgctcatctttctatcataccgtgctaagcaactctttatggtatacatttaaactgtctgtcaaatgggatttttcttatccttgtgatagctgaagaagggttgttgtaaatatgacagaagcatgaaacaaatcgtttatccttttattcaggagcaaaatacatcctgctgtgtttctttctaatgtcatgctgatcatttttgctgaccttgagagacgggaaatgattaagctgaatagtagtactttcaaaataataacctggataacataagaaacacacactgatggtatttcaagtcaacttggtaggttttcttcctgtattaaaaattggttaggagtatgcccatcatataataaatcttggatcaatgtctatcaacttacttaaccaagagctaataactattgcccttacaatattctatcttggcttattctttcaagcttaatttggctctcaaaggacagtttgggtatatagccatgatatctactaagtactttctgttgttgaatttttcagtttttgggtgaggtgctcaagcattttgtttttctctataacagcagagaccagatatctaaatgctagcaatcgagagcttggtgatcattttcagacaaaccttgatgatgaaaatggtgtaaatgcatcaactgaaaagaaacttcttcggtttactttccaagagttgaaatctgccactgttaactttaggccagatagtattcttggagaaggtgggtttgggtatgtattcaaaggatggattgatccaaacagcacatctcctgcaaaacccggtactggtcttacagttgctgtcaaaagtttgaagcaggatgcacttcaaggtcacagagaatgggtggtaagtatgtgcttgtcctgtacatgtgtttgtgtaggtagagttataacttacaaacataccgtatttgcaggcggaagttgactttctgggacagctgcatcacaaacaccttgttaagctgattggatactgtatcgaggatgaccaaaggttgcttgtatatgaattcatggcccggggaagtcttgaaaaccatcttttcagaagtaagcaatctttacaaccatcttttcagaagtaaacaatcaaatacatgcattagtatttctttttaattcaaataagattggcatcacatttttaattcatgcaaaatatatactatatgaatactttcatatgccaatgtgttagtacatccttttgtcctaaaataaaatgaatcatgtaattgaaacatttagatattgtcatgtcttgagaaatatttcttgatgtagtgaagtaattaaactgctttatagaaactagtaacttctcccaaaaggagcaacaatggttgaaagtgaccctttgtttatttactcttttttcttccaaggtgataatgcatgcagggctgttttagaataagtagtacaatactcttttagaaaagctgttgttgacttgccttattgaacaccaagacttgacctcaacaatatcatttctaggtgttgtccattgaattgttaacagttcattgaaaactaggacctgtttatccttacacgccctctttgtttaggcttatacgccagcttatgagcctaaaagtctaaacctaaacagataagcagcttgtctgtttggttttttaaggacataagccactcttacactattaagccacaagctaggttgcagtagcttttttggcttatgtgaagtggaggtatgacttcaccattaaacttaaggcttcaaagccaccagcttataaaacatataagccaaaaaattggctaggcctaagcctaaacaaagagggcctaacgatgatctatatggtgttccctgatctattaggtcatccttgtctaacaattgtactttgttctgtaagtttcttgattggtaatgccttcaaattgtttcccaatctaaagttcctgttatcttactttgtttaatcttgaaggggctcttcccctaccttggccctgtagaatgaagatcgctctcggtgctgctaaagggctagcctttctccatggaggtcccaaaccagtaatttacagggattttaagacatcaaatattcttcttgatgcggtactatttcttatcaattcattcacatcatgctcataaatatgttgcacattttcacaagattatttcttgcatgctattctaacagcagtggaaattctgcttatacaggagtacaatgcaaaactttcagattttgggttagcgaaagctggtcctcaaggcgataaaactcatgtctctacacgggttgtcggtacctatggttatgctgcacccgagtatgtaatgacaggtattttacggaaacttttggttttttgtcgtctacttgaatcaaattttctttaatacgaatctaccagttagtattttattatgtttctgtgagtttctatggtgtgatatctacatctttgcttctaatttcatcacactgatattcctactagattgaatattaagatgcctcgggattccatctgatgacgtataaactgcagtatctagacatgatcaccaagtaacagctgatgatttttacttaagtaacaaatggcttgtttgtttagacaatgatacagacaacattcatcttggagcactcttccgtagcatgatttgattatccgaattcattggaataacctgaaaacgtggatagcaggaaccagtttggtattacatgttctactctgcctttctggttcaatattactgctgtatgcatcccacaagtttacttcctacgagatcttttctggcttcataaaaacttaaaataataaaaacaaagtaatgtcaaacatcagattatacttctccctctgagaaacaagcatacatgttcaagatctcattaaagtacacttttcaggacacttgacatccaagagcgatgtatatagcttcggagtagtgttactcgagatgttaaccggtagacgatcaatggacaagaagcggcctactggggagcagaacctagtggcatgggcgaggccgtatctaagtgatcggcgaaggctctaccagctcgtagatcctcgcttggggctgaactattcagtaagaggggtgcagaaggttgctcagatctgctaccactgcctcagccgtgacaccaagtctcgtccgacaatggatgaagttgtcaagcacctgacgccgttgcaggacctaaatgacatggcgtctgcatcatatagacctcgatcatctcagcgtggtgagttatcatctgaacaaagaaagaattaattcatcatcactgaagtgacctcaatttgtttgaactgcaagaatgaactgttttctctgctctctttgctttgcagttgtttttgcttttgtaaacttcttctgtagatcttttgcatattcgcgaaaaaagaatgaactgtctttactcacagctagaacgtgatgaatgattaaaaatgtgaaacttttggattagcaaatgaagctaactgtaattttttttcctcatcgcaggaaaggcacgtcggtgatggccggatccactgctaaaaagcagcgaaatttgatgatttttaaggtcatttccgggtgctttgttttggttttaattgtatagtgaaactaggcttgataatcctcaaatccctggagatgtgacgccccctgatgtctaatctcgcttattagatgatcagccgaacactgtgtttggtggctggttgcacaagcgaaaaacggcatgtacgtgtggttggctgcaacgtgtaataacaacttatttttctgacaagggctgatcatccggttgatgctttccaactgtgaataccgaatactactttcgagatgcatggtaatatagtggaaaggggtgtgtggtttaaccctcggtccctcacgtctcatatttaatccccaacacacttataatttcttctttaaaaataaatgtttgggatggctctccctccaatctcgtttttttttcccgaatactactttccctctcttcctcactttgtagctctgtatatttttattttattctgtattttagatctttatttactcgctcagcaggttactaaatgatgtgttgatacaaaagaaatttatataagattttgtgaaatgtttttagtagctaatttatttattttatactcttaaatagctgtcataagaaccagattactcatccgtctataatttcagctatttgaaatggggcatatatccacgtaattccattacttaaaaagtgtagcattgtaattgttgagttgtgatctaaattcatttgcacatatataaaggccaacttctgctggagcaaagcagaggtccgtcgccagaggcttgggccagaggcctgaggacgcctggggtgtaggggccccgcgttacggatcgttatccttttaagtttcaccttcatatatacttcttgtaagccgccgtttgacgttgtaacctcgccccgatatagtgaatatatttttctgtctggtgcccatggttctttctctcctgttttgagagggttttccacgttaaatctcgtgccttatatgattgatctattgtttttttatcatttgtatgtctatcattttctaacaggcctctcactctctgtttctcatagaaataagatcgcggtttgtcaaattacacaggtttttggttccaagcctgagaatcaccgtagcttatgcaaatttcgaatagaggaatgtcaactgaactaaattacataaagaaatcatttaaatttcttgcgcaccaaaggaacaccgacaatatagcaaactgtaaggtgttgtttgattggtatactcacgttaccaaagcttgccatattttatttaaggaaaaagtacgaattacccccccccccgaactatcgtggtcgtccgaattaccccctgaaccataaaaccggacattctttacccccaactatgcaaaccggacgaattacccccctcgatccaatccgcggtggttttggtctacgtggcgtacacgtggaatcccagtcagcgttttttaaattaaacaatggtgtgacccgcctgtcatactctttcactttcccctctccctctcttcatctcttctctctctcccactcttcgtctgtctctctcaaggatcggcggcggcgggagacactgaggggtgggcgggcggacggcggtgcacgggggcgggcggcggcgcgcgtcgcggcgatggccgagcggaggcggctgcaagcacggcgcacagggcgggcggcggacggtggcgtcgcggcaacggctgagcggaggcgactgtggcggcggctgccggcgctactgggtgagtggcggcgggcacggctgggcgagcggaggtggcagcagcgacgggctcgattgggcgccaacgtcgcctcgcgtcgcaccatgcccgtggtgcccgtggtgcgcgtggagctgaagctgctcccagtggtgcgtgggggcgacggcgcccgccgcccgcagtggatttccggccgccagccgccggacgcggcccaactctccaccacgcccgccgtgcctagcactggccaccaactcgcgggccacatctgagacagagagagattgagaggaagagggaaagagagagagattgagaggaaagtggggaagagagagaggtgggacagtatgacaggcaggtcccaccattttttttaattaaaaaacgctgactgggatgccacgcgtacgccacatagaccaaaaccatcgtggattgggtcgagggggtaattcgtccggtttacatagttggggggtgaataatgttcggttttatggttcaggggggtaattcggacgactgcgatagttcgggggggggtaattcgtactttttcctttatttaactaacatgcctaacatgtggctcataaaattaaagccacacttcagctgtatgaaagcaagtttgctacacttttactccatctatcccataatataagggattttgatattttgcttatactatttgaccactcatcttattcaaaaaatttgtgcaaatataaaaaatgaaaagttgtgtttaaagtactttgtataataaattaagtaaaaaactaaataataattctaaaattttttgacgaatggtcaaacagtgcaagcaaaatattaaaatcccttatattagaagacatagggagtatataccaataacacatgggacccacatcatggtgaaggaatcttaccttagaggttgtttggtttgctcctaaaatttgccaaacgttgacacacctcatgttagacaagtttgaccaagttaatttattgtttggttcatagccacacttgtggcaagattccttcttatctattataaccccacgtgccattaactcaataaggtgtggcgcaatcctatttcgctagttaaggtgtgatttacttattgtaagccacaacttagataagtgtgacataaaaatacggtgaatggtggcaaacttagtataacatccaaacagtcaaatctggctaacttgagttgtagcaatagtcaggcaataagtggtagtgaaacaaacaatccctagggtgtgttctgaccaaagggttctcaacccctctcaatcgtattccgcgcgcacgctttttaaactgctaaacgatatgttttttataaaaagtttctatacaaaagttgcttaaaaaattatattgatctatttttttaaaaaaaaattagctaatacttaattaatcgtgctatggactgttctgttttcgtgctagggtgatatgttcccatccatcagcagcgaacacaccctatgtccctatctgtggattgccagtgcgaatctcgacgtacgtggtggcaaatgcagccgcagtgctaggtggagccccaagcgggcgtccaggtcgccggaaaactccatggcgcgctctggcggtgtcaggtcacgggcgccatggcgcgtcccatggcgacaaccacctcagtctccccccctccccgcagcggcgtctcgacctcatcgtctgtgcctgtgcgcgccgtgctgccgagtgctagcgcgctagaagcgtcggcgcgcgtacgtccgcgcgcgcgcgcggtgctcgcccgtgagcgcccccgcgccgtggccgctagcgcgcgcgccccgggccaggtggccgcctcgccggctcgccgcgaacacctggcgcccatccacgcatgcatccatgccatgccatgcacgagatgacgagacgagactgagttgattaattgattaacatacaagctgcttggttagtgcagtgctttgtgaacttgtgattggatcaggtgttgaccatgggagattagtagcactagctagtggcactgacagtagttcgtgttcagtgtacgtgttcagtgttcagtgatcagcggaggcgtgggcgtccatggccgctctataaaaggcgcgccaacccatctcacgccaccgtgcaacgtcgagccgcgccaccagcatctatggctgcggcgctcgccaccgtcgtgtctttcctgctcgtcgtcctcgtctccgtcgcccacggctggaacaaagactgcccgcctcccggtagcggcagcagcggcggcggccaccacggcaagccgcccggtagcggcagcggcggcggcggtcaccacggcaagccgcccgagcaccaccaccaccacaaacctcccccgtctccccggtgcccgtcgtgccacccgccctacacgccgccgacgccacggccgccgccaactccgccgtacgttccatctccaccaccatacgtgccaccctacatcccgccgccgacgccgccatacgttccaccctacatcccgccgccgacgccgccgtacgtcccgccgccgacgccgccgtctcctccgccatacgtgccgccgccgacgccgccgtcgccgccgccgtacgtgccgccgccgagcccgccggcgacgaagacgtgcccgatcgacgcgctgaagctgaacgcgtgcgtggacgtgctgggggggctgatccacctggtgatcgggcagaaggcgagggcgaagtgctgcccgctggtgcagggcgtggcggacctggacgccgcgctctgcctctgcaccaccatccgcgcgcgcctcctcaacatcaacatctacctccccgtcgcgctcgagctgctcatcacctgcggcaagcacccgcctcccggcttcaagtgccccccgctctacggcgcctgaactgaacaaacgaagcagcagctagcaaagcttcgtcgtcgtcgtcaatggcggaggctactatactacaccctcgctagctagctatactgtgctacctttactctctcgatcgtactcgtgtctgcgatttgtgttgtattaatgtactacctccggttttaatccaagtgtagtttaattaattaatccacgagaaaagatccgacttatgatcaagtctctgtgcgaattgaggaatctctcggtgaattatactggaagcatatcaatctgaactagttttcgatttttttgtgtgaataatcgtccaaattacatcggttttccgtaggtaaccaaatggtaatgacaaagctgctcatcagtacttcagctttgcagttaagaatgagaaggcccaacaggcaacagcccattagatgctagctagtgcagtacttagatggtgtttagatccagggaattaactttagtccctgtctttagacactaatttagagtattaaatatagactacttacaaaactaattacataaataaaagctaattcacgatacaaattttttaagcctaattaatctataattagagaatgtttactgtagcatcacataggctaatcatggattaattaggctcattagattcgtctcgcaaattagtccaagattatggatgagttttattaatagtctacgtttaatatttatagttaattttcaaacatccgatgtgatagggacttaaaagtttaaaagttttagtcccatctaaacagggccttagcacggcccatcacatattgcatcggtgacgtagtgagtgacgcacgctgttgcagtgctctgcgcctctgcatctccttctcctgcacacttccctctcgaattcgaaaaactcgtataattcccctccacagctcaacggtcgggatcccatctcatcgtgcccgcatggcgccatcttctccgagaagaaaccggcatcggacggctacgcccacaatcatacggtccccgaaagtccacgccgccgtctcaatttcagcggccgccccgcaaaaaattcacaaaaaaaaaaaacccgcaacagcttgcactgcacgctgccccctcgccatgttccccgcgtttcctaccccaaactcactgacgcgtgggggacaaccggtagggcccacatgtctgtcggggtgggcggtggtggtgcccactagcctggttacctggagatattgccccccaccccacgacgccaaaatccgcgcgggaaacagctccgcgcccgcgcgccaaacttgctccaaatcgaagtattattttctctcgcgatttctccgatttttttttctagcgataaattaattaatgctcctctcgccgcgccgggaaagcatttaaatctccccctcctccgcgcggttctcccaacccaaaccctaccacgattcctccccactcccaatccaatcgccgcggcggaggcggcgggcgcgcgtgcacaccaggtgttcgacggaaggcctcgccgggtggggggcgaagatgtacgtggtgaagcgggacgggcggcaggagacggtgcacttcgacaagatcacggcgcggctgaagaagctcagctacggcctcagccaggagcactgcgacccggtgctcgtcgcgcagaaggtatgcgcgggtgtgtacaagggcgtcaccaccagccagctcgacgagctcgctgccgagactgccgccgccatgaccgcgtcccaccccgactacgcctcggtaacagccactgaacttcaccgttgttggtttttttgttccccattcggtagtaccttgtctcctcctgacatgtggattgctgttgtgaagctcgcggcgaggattgcggtttccaacctgcacaagaacaccaagaagtccttctcggagacgtaagcgattgattgcttttgtttcagttgaatcatgcgaagggtgttgggatttatggattaggatgtgaattgggatttggtcgttatggatgcaggattaaggacatgtatggacatttcaacgagagatctgggctgaatgctcctttggttgcccacgatgtatatgaagtcatcatgaaggtgagatatcaaattaaactttagggacttgcactgatagctgttcttgttctgatttgtaaaatttactgttccattcaatttattggtcattaggattattgatgtatgttatgcttcttacggtttctgatgttctgatccttattttcagaatgcttctcgcttggacagcgagataatttatgatagggacttcgattatgattattttggtttcaagactctggagaggtcttacctcctgaaacttggcgggaaggttgttgaaaggccgcaacacatgttaatgagagtttcagtaggtatacacaaggatgacattgagtctgctatcaagacctaccatctgatgtctcagcgctggtttactcatgcttcaccgacccttttcaatgctggcactccaaggccccaagtactgcacatttgaccagaaaaatcctagtcttggactctgaaattgcttgcttactcttttattctctgcaatgcagttaagcagctgtttccttatctgcatgaaagatgacagcattgagggaatctatgatactttgaaggaatgtgctgtcataagcaaatctgctggaggaattggtgtatcagttcacaatattcgagctactgggagctatatccgtggaacaaatggaacctccaatgggattgttcctatgctacgtgttttcaatgatactgcccgttatgttgatcaaggtggaggcaagagaaagggtaggttctatggtcaattttatttgtgaaaattactctaataccataatctccaggaattctcataccctcctaaaaatcaggtgcatttgctgtgtacttggagccttggcatgcggatatttttgagttccttgatctgagaaagaatcatgggaaggtaaattctcaaccagatcctcttattaattcctttgcatagaaaactgtaaccatttaaatcttctggatttgttgcgacaatgagctgatttcaatgtatccttgcatctacattttctgaacttgaaatggattgcttacatgtaatagatgttatgatgcagagctgaatgttcaagtctttggtgcaaattagttataccattagaaaaaactggtggatagaagaatagcaggctctagtgtatttcttcctataatgttcagaagcttttcactatccagcatactgtgatcactggacaatttgatatgctttgaacaatttgatatgctttgcttgtgctgtttatgtttctaatatatgccatttctcctaacttaaaggctttagcctgaagaaagatctgaaatgcatgtttttatgaatgacaatttaataggaggagcatcgtgcaagggatcttttctatgcactctgggttcctgatctattcatgcaaagagtccaaaataaccaagaatggtcattgttttgtcccaatgaagctccagggttagctgattgctggggtgatgagtttgagaaactgtacacaaaatatgagagagaggtaagttggaaacgaaatttaattgtactacagtttattgaagttggaaaagattacaataacatagctttgtactttcagggcaaggcaaagaaaattgtcccagctcagaccctctggtttgacattttaaaggcacagatagaaactggtacaccatatatgctttacaaggtaaatttggtagcaaaattagtagcaaggagtacttgattttggacccaagattcctccaaatatgctgctggctatagtcaggttccaagtattcattccgaatgctcttgttgtcccacaggatacatgcaataggaaaagtaaccagcagaatttgggcacaattaaatcttcaaacttatgcactgagataattgagtacacaagccctactgaaactgctgtctgcaatctggcatctattgctttaccacgttttgtaagggaaaaggtatatcttgttagtgctttggctgatttcaaccctaaatgttgtatgtttacatgtctgatcataagattctgttgcagggtgtccccatagagtcccatccatctaaacttgtcgggagcagtgattctaaaaatagatattttgactttgacaagcttgctgaggtctgctgtctgatcgaatctgtttattctaaaaatagatactcttgcctatgtcagtgaatgttctgacacgctgttgattttaccaggttacttcaactgtcacatacaatctcaacaaaataattgatattaattattaccctgttgaaaccgcaaaaagatcaaatatgcggcacaggccaattggcattggtgttcaagggttggcagatactttcatattacttggcatgccatttgattcaccagaggtaacttttcctagttcagtaatatagtagtactagttagtagtccttcctacacttaactgatgtaaaaaatgtgatcccctcttttcaggctcagcaattgaataaggatatcttcgaaactatttactttcattctctgaaagcttccgctgagcttgctggtaaagaaggtccctatgaaacatatgaagggagccctgtcagcaaggttttttgcttttactaatgtcactttttttagtagctgaatttaccaatttatttattggtgtagtttgactaaattgttggttggatatcaacaagtaatattctttctaaggctgttttctatccacttttcagggcattctccaacctgatatgtggaatgtagttccatctgacagatggaactggccatctctacggagtactatttctaaagttggattaagaaactctcttcttgttgctccaatgcctactgcttccactagtcagattcttggcaacaatgaatgctttgaaccttatacatctaacatatacagccggcgggttctaaggtttgtaactacactgttcttagtgctcgtgctcactacaggtgcttatgattgattttgtttaattcttttccagtggggagtttgttgtggttaacaagcatcttctccatgatttgactgaaatgggtgtttggactccagctctgaaaaataagataatttatgaagatggttctgttcaaaagatgacagtgatcccagatgatctaaaagcaatttacaagtatgttgttcattgtcctaaactcctaatgctatgttctaccagatgcagatattcatttatctaaacgtttaacctcaattgttccagaacggtttgggagataaagcagaaaacgcttgttgacatggctgttgatcgtggatgctacattgatcagagccagagtcttaatgttcacatggaacaaccaaactttgggaagctgacttctctgcatttccatgcttggtccaaggtattattaaggctatgtgaaagcatattcctgaactctatgcagcccatatttattctgtatttgtcatgccatgaaaaagaactgctgtctttagattgtgtttttgcaaggtctacaagtaaacatggtttcatcttggttgatttagggcctgaaaactgggatgtattatctacgaacacgagcagctgctgacgcaatcaagttcacagttgatactgcccttttgaaggccaatggagtatgtcttctggccctccccataattgttttacattcctgaatagccaactcaccattaaaaatattgttcaggaaaacggcaccaaggctgcagaggaagaggacgtggaagctaaaatggctcaaatggtttgttccttgaacaaccgggaggagtgcttggcgtgtggaagttagatgcttcactacacagttaaaatctatttttaaccaagacgacaccattatacaactggctgatcatttggtctcaataactgaaaagggagcccttcgtgtagtttgtatgagctgatttccatactggggggtagtggggctcccctgtctgctgaatttcatctttggcttgtactgtaacatcaaaattcttgggttactgcaaatgtacatatgtgttactgttaacgttattgacgtgtggtgttgccatgttggcaatggtactttgggtttgggagtctcatggttttgtatttgcttttgcgttatcattttttgatgtggtacgagtggcacatctttggctgtgtgatattttcaatttgttactgtaatggaatttatcaggagctgtacatcagtgtgtgcaacatgattactttttccgaaacagaccgtaagttcaatatgatggtattaatattagcaagagactaactagcattttccccatggaagtccagaaaaatggctaggtcgactgcttgattgataggcacatggatattgactggtgtactataacaatttaatgtagaattaatcatttgaaataattttttatttcatgataggaaatcactaattcttaattccctcaatctccagtaaaattaagcatttcaactgtaacggatgcagacagtagcttaagaaaaagaaaagcaagggctggaagcttcaaggattagtatgaatgaagaccaataacagattcaaagctttgacagattatttcatggactaattcttgcctaacctagtcaataacttgacccttgtacacacgcacagtactaaggtactactagtacaaagtacttcgtgcgatttagatcgtatctaagaaagagaaaaatattactactcccattgatctggcattcaatttttttaatgaaaatagtgctccattcatttcatattataaatcgttttgaatttttctctagtgaaatttctttaagtttaatcaaatattaaaaaattagtaatatctgcaacataaaattagttttatcgaatgtaacattaaatatatttttataaaatatttattttgtgtttgaaatattgctatattttctttataaatttggtcaacagggaaaaagtcaaaacgacttataataaaaaaatgagggagtacttattagtctcatattctaaaacaattttaaagatgacattccctttctatcgttcattaatacacatttacaactcttatgggctcatctcaacaaatcacagttaatacggctgctttggaaaaacaataggatgtatttaacaatgtgatttgccatatctctttaatttgtgtgagatttgttacaatgataaataatatgaaacagagagagtagcaaagtaccatgactatgtgtttttcccccactcattatccatttaagctgcttctaattgggggtggttatggtaacattcttcgaagttaacagttccatcaaacactttaatcctttatttatgtcaggtgaaagatcaaaactgtcccagacagaaacgatccatctctttcaacatgcaaaaaagacaactttaaaaatggaaaaacaaatgacaaaacaaacaagaacaccatccattggccgaagcaaacggtgtttggtgttgtgtgtggacacatcggatggcaagtcttcctacacgaccgccaaatccctcctccttcctttgaagttaataaaccctctcgagactccatagcctctcttgatttttcgtttcctttcccagcgacgaaacttcctatcaaaaccgcggttttataccggttctagccgccaagaaccccaacccccgccacccggcgaacgcgccctgcgagaaaatttggtgttttggggcctttttgaggtgggaattctgagaattctgagggttcttgcctgttgctccgaggatgaggaaccttctcacggtatgattgatcgccttgttgcctgttatgagttttatagttgtgttgattggttgttcttgtggtgattttgggggtgaaaattttgagttctcggttctgatggtggttttttttttttattattttgccggtttctgattattgaggatcgttttgtttgctgaagccttttgaatattttaattttggtgaacttcatgttatatggactcctggtttatgtttggatcgatcttgatcgacttcgtgacaggatcggatttggtgttcttactgatatctgtggaaattattgagttgttaagaaatatctttttaagacttttgtcaagacatgattatcataaatatcttgatgaccttttgtttttttttaaaaaaaaatcttgacaggattacgcggtgaattttgttcctgattttgtattagatatttgtttgaaacgaaaaggcaggaggattgccttttatatgttaattaatagagcagagcagaatttgtattagatatgctattatattttgcaagactatatatttggaatgaccacagtaccttcttgacccaagttttgattgcaagcctgatataatacttttttttatctctttcaaattttgagaaaaatgtgaaactaacagcatattttgtggttcttcaattttacaggattcgtttgagctcagcaaagtggaccaagcccctgcaaatgttgatatcgagctagggttgcagggtggcatgtccagttctgcgcagcctggctttgaaggcttctttgaacaggtgcgttcaagtttcggaatatcaacatagctactcagaactttcttaagtgattgaaatggttccattcacaatattcaggtcagggagatcgagaagctacatgaaacattgacaaagttactgaaggaccttcaggtgagctgcaatatcaaattggacctgttgctgaatttaaattgcagatattgaacatgcatcaaatctcagtagcacctacagaatatagtaatatacaagtgtgacgatgtgatacgtgtattccagatgctgttaaattaatagtgattaatttccctgaatttgtttgaatgatttttttattcaacaatgttactcttcatctctctaaaagtctgcgaatttcatgtagaactcaaatgaggagtcaaaaattgttaccaaggcatcagccatgaaaggtacaatacgggattttggttctttcctgcaaattggatagcttatggatacttgcgttgcttcaattttgcatcactaatttgattcctcttttcaaactgtagagattaaaaagcgcatggagaaggatgtcaatgaggtgacaaaaactgcacgtctggcaaaatcaaaagtagagaagttgaataaagacgtgagtaaattttctctcaatatttttttcccaatggtacatcattaagtacctactactttatctttattacttcctacagatttgatatatgccactttgattttcttttctgttacagaatgctgcaaacagagaaaaaccaggcttcggtaagggttcgggagtggacagatcccggactacaaccactgtgtatgcatcctacattcattctcttgcttctttcttgtcctttttgttatgtttttcacatcactgacttccagttgataatcttattgcagctcattgacaaagaggttgagagaacggatatctgagtttcaggtaccgccttttcactaagaatttcatcaattattgcacacaatctacctgatagaaattatttagcacacatggttgttaattcaccaactcatgtactctgaaataagcactaagcatcaggattgtacctatattgttcagtttgtaaaatgggcgtggttgttatccttactgtgaactatttttgcagacattaagagaggcaatccagaaggaataccgggatgtagtggagcggcgcgttttcactggtcagttatgttaaattctcaacatggtatcaggatttctatttgaattgcactgatagccttactcttgtaatcatccattgtgtaaaattatccaaaacagtcactggcgagcgtgctgacgaagaggtaagaagtatattaacttcaaatcatctgttaacaaatctgcatatggtgtgttgcttacacctggccaaattttcagacaattgacaagctgatagaaactggggacagtgagcaaatttttcagagagctattcaggaacaaggccgtggaagggtaccgattcttttggcccctcttatgataattctaacatagaaagcttaatgccgaaaaaaaaaacatggtttaacctgaatttatggcttttgcaggtgcttgacactctccaagaaattcaggaacggcatgatgcagtgaaagagatagagcagaagcttcttgagctgcaacaggtaatgaataagcaatcttccagaaaatcgaagctccaaatactgtgcttaccttgcaattgtgaatgcagattttcctcgacatgtccgtgttggttgaggctcaaggcgagatcctggacaatatagagtcacaggtaaaattttacatgccatttcagaggatctttgctactcctttgtgagccacatttttgttctgacttctgaatccctgaacctatgacctatctatctctcttcaggtttcaggtgcagctgaacatattcagactggaacaaacctcctccagaaagcaagatttctgcagaagaacacacggaaatggacctgcatagggattgtcatcctcctcataatcatcctcatcgtcgtcctctccttaaagccgtggtctaagtagaaaaacctgcatctcagaagcatcatgttcatgtcgattttggctggcaatgtttatcttttgtgcagttctacttctagttgtgtatatgccacggtgtggtagtgcgtcatgtacattctctgaaattttgggtgcgaacttattcagttctctgtacttcaaataatgaacatgcagcttgatcatacataattttgctcataaactttctatataagtatagtttttgtatatataaaaatttgttttgaacatcattaaatgtttgttggtcatcataaaataaacaaacaaattgccagaattcaaaagaaagaacaagttgtgcctagccttactagcctcaaggacgataatgggatgacatgtggaaaagagagagaagggaatggaacgccgcgggaaactgacaaaagaaatcagacgtgcatacgtggttgacgaaaacaaaattttcgaccggttcaatagtcttttttaaggtgtgtttgctgctaagctgctagattgtttgaaccttgaagcacctgttgataaattgttaaaagggaagtctgaaggctttaagttctttacagcttttcttttttcggattcttcaaacagatttgctccatgagaatatattttcttgatccgatcgatgtgttgttaaaaaccacttgttttaaattatttgttaagtttatttattacaatatttaatttatccctacaattaagtaaataatcggtagccacaatccactcaataatttatttaaaactgagccttaaaagagaatgcttagtaaaacaaaagagaatgtttttttctcttctctatctctactaactaaaagaggagtgatcctctttcacctccatgtaaaaacctattttcccccataaaccatccaccctcaaaattgattttctctataacttaaaagagttgttcttcatcatcttcatgtaataacctattccctccaataaaaaccgtttcaccctgaaaaactgatttctcaaaaaaaaaagatagccaccttaaaaaaccgaacagcccacccaaatcctctcaccaaagaacaaaaagaaaagatatgcataggcctataactaatctactaccttaaaagcaaagtctttctccttccatcccatcttttcaccgagcgcagcgtgtgcgcatgcaaaaagtaaccattggatgtaatattttatcctcaattatctttatagcccatccctaattatatgggcctgacccgttacaaagtacatacatattactatacagactatactattaatagatggagtcatcctcccttccttccaatataccctaattatatgggcctgacccgttacaaagtacacacatattactatacagtctatactactaatagatggagtcatcctcccttccttccaatatgccctacttccatataaaaaccgcctatttctatctctgtcccacttccacctaaaaaaccttctctcccataaaaaccgttcaacctaaaataccgatcagtgtaaaaaacaagggtgtccctaatgcgcgatcagtcgtgcggtcgcgcaggcgcgcgaccaccagatccactactactactcagtacctctccgcgcgcgacacgtgtccagtcgcgcggggaagagagcgcgcgactagccgcccattagctttttcgtaaaaaccaaacagcccaatcgatccaaatccttccaccaaacttaataaaaaaaaacctgttacaattcatgggcctataattaattacacgaaaagagaaaatgttagcgtgcatcttttgatgaaatcggactgggcagcatcttttgttgaaatcggactgggcggttgtttcggcttcctttccgtaaatcccacaacctatataagctatagctgatcctagatcctgcgccactacaccacccaaacacttcgatggacgccctcaaattgtgattgcagattttccttgacatgtcagtgttggttgaggctcaagaagagatgaacatgcagcttgcttatgcataattttgcttatactgtaccacattcataatattcatagttcatagtgctaaggagcttactgaaccacaacacctcaggcctcagtaacaccagaacatagaatttgtcacttgactcgtgtgtttctgggataagatcaacatccattagaacaggtaaatgttacacatcaaatccttgatttgttttacatcatcatggcagtcgatggtacaacagaaaattagggtgacatctgataatacactgtaaaacagtcaggaagcagcttcctaatcaggctatttcaactggagcagcgtatctctgcagtggctattcacaggaagcagacgcagctcccagctatcaactataatttctactcaaacaatctgctccataaaatcggtatcatctttcctcaaaactcctctttcgggacttggacttgtgttttcttccagaactcttcacactgtgatcttgttcgtgctgctcagttttaattttgttatcccttgaccttttcccgctggaaaatttgagcatcacatgtaaaaaacaaaagctagaaagcatgagtcgattgaaataccagcacaaaaagtagcagagatactatgttgcatatccagacctgttgatttccaatgcatattcatcatcgtgtactgacaaccaaagcatggatccagtgtgaggtgggattaaagaaccagttacgtgacaattcatttctgcatccaccctgtgattgaacatcaaaagaagagaacatgatcaatctgtcactcggaatatggagcctgacattagctggttccaatcatcccatagtccctaatttaaccattcagttgtaccggggaataaattgctggtcatttcttgtacataacacaggaagctaaaagaagcttttgctatatagattagctgtgctatgtaaatgcatgtgtgtatttcagaaaaccattcacattgttttattattagacttaagagccattgtatcaaaatgacttttttcagggctcctgtcataataagcacaccaggggaaaaacaattctaacatgctagaacaatgcatgttcgtgaacaacgtacagcaagtactgcatacaactaacaaattacaaatatagtaacatacaagtgccataacttttgaataaaggtgtttcacagtggaaagcaaacaatgaatgaaaattttgaaactgtcaaggggactaaagatcagcccataccttttcacagaaaatcgtatcatgcttccctttttaatcacgtgctgtttgtccgaccggcttacaaattttcctccatactttttctgtgtaaaaaatatagaattatcaatatcattttaagataaattgtttttacgaaattaatattatttacagaatagataagtttgtgagccacatattgtgttcactattcagtgaccacacaaaatggaagtatttggcatttctttcacagtataatatgagattccataagattctttccagtggatcagaagttaaccaaattgtcacaaaacgtacaatttgtgaagcattgaatggactgccccacaatcaattctttccacaataaatttagtcatttagtaagcactgatcctaatatttccaaaaaaaaaaacacttgaaagcggtgcaacagcagtgatatgcttccaactactaacaatgatcaaacagtatttgaacttagttattacagttcctgccaagctatgttccccctttcacatggcagttgttttgttgaatacaatttgtgaagcattgaagcacacataaaaaatggatgctaccaataaaaccgattagtacactagagacacaaagagtttcatctataaatttgaaagtcacaatgaaaagaacagagagtactttcaaaccatcattaatcattatgaagagaaaagctgatcacttgatcttactcttttgaacttgaacttctcatgaatatcatccaacatgatggcggctgaaaatacccctaatacaatggcatgtattgattcctttccaagcatttcaaccttcccttctaataggaaacaataaggaaaaaaaaattcagaatcacatgttccataatttaccagattggttgttccattgaaaaaagatataacaaatggagccatctacttgcaaaacaacaccacacttgatacaacacaatatgaaaaatgttctgctcaagtgccgcaaatttgtgtagccaccataacatgcaggcatcagctgatacaaaaaatgcacttaagcaggacagtgtaaatactctacaagttaagggcttctgtaataacacaacctacccagcatcatgtctggtttcggagagtaaagcagcagatttgcgtgcacgggcacgccaaagtatggtaccaaaccattcaggattttgccttgttcactctctacagttgcttcatgagccaatagtacgccatcgaagcgatcttcatacctgcatatatgaaaatcaatcaccccgcggggaaaaagcgaatctcgtggaagcttggaagcatcaagaaccatcatgccatgagaaatcgcagtccctatgactcccatttcaccttcctttcttctttttgtaccgtaatttaatttataaatgtctttagaaaactagcatggcatggagccaagaacgaggatgaggaggggggcagtagagaggacgcacgagaagaggagcgagctcagctggcgggcgacggcgcggcggacgtcggcggcgttggaggggtgcacgtacacggtcagcttggcctctgcctcccggagcgcatccatcgcggcggcggcgaggcaggaagctagtagaaccctaagcagccagcttctagtggttgttcgatgcagccgcggcagcagcagtaaccataagcccctaggcaggcggcggccgccgcggcgaggcaaggaagctaaaaccctaagtccggcgagctcgagtgtttggtggcgcggcggcggcggcggcggcggcgaggggaggggaggacggcgactctgcgagaaggagctgagcaacggtttggatcgcttcctcggcgctgatcgaacggccacggtcacagtgggtagtgtatatgatcagaaaatgttttggattttgttgatcatggcagaaagtgtcggtgattatcaatgagaaactaatgggcaaaaattttaatatcaaatctatataatggcgtcccatatgacgggttggttgattggagtatcatcttggcaccaaatggtttcatgtgttgtgagttggttgattatttacttgttactagtttaattggcttggagaaattagtgatgtaattacttaacagattctatcttgattatttggtatgattatacgcagatcccattaagtttttcttctagtaccatataagcaagttaacatgtcacgtaggatgaaactgtcatccaaactattaagagactttgatatattccctttgtgccgtaatataagaggctagtgttagcctaatactggataagacatatcctggtgtcatgtccagattagtagtcctaggacgtgtcatattcaatactactaagttcttatattttgatacaaatatagtgcattggttttaatagttgaaaattttagacctaattaaaaaggtcttattggacacttataaaaccatgcgttaagaatcgacctataaaaacccagtggcagagtcacctcacgggcgggttgggcaaccactcgagctctaccgctaccgtgttcgccatcaacacctataaaaattaattaatcgatcctgaaaaaaatattttattagtcactcgggcttaacgtcgccgccggctccgtctaaaggaacatgtcctcgtgtacaaggcaaaaacctcaaagcacggattaaaaaccgatttggtagtagcattccagcccaccaagcctgcatagcccagttgcctaaagcccaaaggaaagctgtgctgtgcccctcacagcctcgcttccctcccttattaatccccctcttccacgcaacacaaccgcgggtgttctgctttcgaacacagaagggggagagaaagagggggaaatcaagaagcagagagagaagggaaggcgtccgcgctcgcaatccccaccttctccatgccgcgccccgcctcgcctcgccgaccaccggcgccacctcctcctcctccacgccgcgctccgcctcgctgaccaccggatccaccgccgcctcctcctcctccatgccacgctcagactcacttaccaccggcgccacctcctcctccaagctgtgggcgcccccgacaatcacccacgagaacgcctccccctcctgctccgccacgcgggcaccactccggccaccggcagctgcctcctcctcctcctccaagctgcgcagttgcacctgccggattgataaggtgacagagagctcacgcatctcctccccattcacgttctgttgttcattttctttattttctttcttggcacgatcgcaaatagaggggctttctcctcaagatcgacgatgcccaagcggcttgatccagagctcgtgcactctttatatctcaactgcaagaaggatcagttagttatctacattgatggttttctatgattcagaagacagggcgtgccatgcgatccgccgctcggcgatgctgcacctgccgagctgcgtgctcttctggtagatccgttgaaactgtgattctgagttctaattcttgtacattcgaatctctttaagtccattgaatcgattggttttgaggcgagaggagaccaccaacgccgggcggaaattgtttggcaactcgtgcaagattccaggtctgcaatgatgcagcgattctttcttctttcttatatctcaactgcgagaaggatcagttggtgatctacgttgatggttttcttgatgattcagaagacaggtcgtgccatgcgatccgccgctcggcaatgctgcacctgccgaggtgccttctgatagatccattgaaactgttgattctgagttctaattcttgcacattcgaatctcttcaggtccattgaatcggtaggttttgaggcgagaggatcccaccaacgccgggcagaaattgttcggcaactcacgcgagattccaggtctgcagcgattctttcttcttcttcctcgcaagaatcacaagatatccatcatgtgtttgttgcaattcagtacttgcttatctgtttgatgtagattgtgtattgctttgttaattccttgaatatggtttgcagaatttttggtgaaatggatttttttcactgaaattccttgtatatgctggcgaaattttagtgtattatggttcatggacgtcagaaattggatttcatatctgatttagtgaaagttctcgccagtttcctcttgttctgaataaggaccttctatctaattaaatgtatcttctttattcagatttgttgcgcctcaggcagctgctgatctgaccagcggtgcttcaagtaaaggtttagcgtttgagcacatcaaattatttggctataaaaattacagacttttgatattggcttaattgatgagggtgattattatattaagtttcatctttgtaataagattgataagtttaaatgggctttagttttggtgtacgggccagcacaaaatgaatttaaggaacactttctttcttttctgagttagtttatatgtgcagtcataaaaccttaccaattatcattggtagtgattttaatattttatgtagtcctatgaaaaagaataatgacaattttgataatagatagccctttccatttaatgctattatagatgatcttaatcttagagaacttttaatatctggaagaaattttacttgagccaataatctagcactgccaacttatgagaagttagatagaatgttaatgtcgatggagtgggaaaaaattcttcagagaagttagatagagtgttaatgtcgacggagtgggaacaaattcttcatctacttccaatcgccatcaaaaattttaagtttgagttgggctgtctataaagagatgtttttgtggatatggttaaggaaatttggttaagtgttgttgatggtaatactcttttagagagttggcaggctaagattcgtagattaagacaatttttaagaggttgggccaaacatactaaattttattataaaaaggcataatcaactttgttaactcaagaagagcttgattctagactttatttgaggaatagattatcttgtcttctaagggaagagaaaattaaatggtatcagcgagctaacactaaagatattttgaaagggactcaaatactaaatattttcatttcgtagcaaatggtaagcataggaaaacaaggatttatcagctacaggatggtgatcaggtagttaatggtgatgcgaatttaaaggcgcatatcaccacttattataaaggtctttttggccatcccgaagcttcttccttaacgttagatgaaagccaaataagtgatattccccaggtttctcaattagaaaataatgctttagtacaagattttttatgaggaaattaaacatgcgatttttcaaatggaacataataaagctccgggtccggatggattcctagctgagttttatcaggttttctggaatgttattaagcctgatttggttaatttatttaatgattttcatggtggtaatttacctctttactctcttaactttggtactactattttttttccaagtgcaaagaggctttgaaaattcaacaatataggcctatttgtttacttaatatcagtttcaaaatttttactaaagttgctacaaatagaatttctggagtggctcagaaggttattagtcccacacagacggcttttatacctgagaggaatattatggagggtgttgttattcttcatgaaacgatactacatgaattgcaccgaaaaaaagagtggtgtactttttaagattgattttgataaagcctatgataaagtaaaatggtcttttgttcaacaaacttttagaatgaaaggtttctcacaaaaatggtgggattagattgcgtcttttatccaaggtggacatgttggcattaaagtgaatgaccaagtgggatcaaattttcaaacatataagggtttaaggcaaggggacccgttatctccaattgtttttaatatagttgttgatacgttaactatattaataaagagagcaaaagatgatggtcaaatttctggagtggtccctcatctggttgatgatggtttatctatcttacaatatgctaatgatactatcatttttctagagtatgatttacagaaagctaaaaatatgaaattaattttaactacttttgaaaaatatctggccagtataaatcacttatgtttaaaagtactttaagatgaagattatatatacgttcgtagcatagccgatcaaatagatctaacatgtatcagctagtactccgataccactctatgtcaagatattaaaacagacaaaatatatcaaacagcaagtctaatatactttaatgcaataaaatcttaatataaagggcagatttagcatatcaagtgaacatgtagggatgaaaggtagctaaatgaggtaagatcggctgaaaccccgataccatctcctttgacgatcataagacaaactagatatcgcagttatgaatatcacttaatagatcgaactcaatcgatgcaacattaagcataagaataaatacaatatctagacatgttgatgaaaacctctaggagatggtagatatgctatataatctagattaacaatgatatctaactctatcggcttcgggaggccgacgacgatgtcgtcgatctcgccgccggtgaccctgaacccaccgccggcggctctgccggtgcggcgccgactgttgggccctgactcgtgcagacgcatttgaggcgatgatatatcccccttttttttgtttagtgagaacaatattttatcatgggacgtaactacacagctagtggcaaaccagctaccactccatccataagaggcaccatccacctatacttcaaatacaattttctcttaaactactcatccgatctacgatccgattacaccgttgtgttcgtaacaattaaatctttacaacaagatctcacatgattatattttgacgaaaaatcacaaattacttttatgatatgtctaaattacttttagatttcactaagttacttcttagatatataaaagtaaattcagtaaaacctaaaagtaatttacatatattatagaagtaacttagaataaaatgaaggtaactttagcatgtcatttgaagtaaatccgttgtagagataaaaacatgactctatctaaaaattaaattaatcagcacaaattatggaattaactaaaataataataaaagtaatcacctcagagcattatgaatgtataggaagtattttaatcaaatctaaaaataacatatatatatatatatatatatatatatatatatatatatatatatatatatatatatatatatatatatatatgataatttgttcaatgaaaaaaggcattaattaaagttactttctttttgttataagttatttctataatatatgtaaattacttttaagctttactgaatttacttttatatgtctaagaagtaacttagtgaaatctaaaagtaagttagacatatcataaaagtaatttgtgatttttcatcaaaatataatcatgtgagatcttattgtaaagatttaattattacgaacacaacggtgtaatcggattagtaatttaagagaaaattttatttgaagtatagatgataggaatatttctcctacttgcccaatgaattaatagcaaccaaaactcctaaagtactagcacgtgggtgtctctggttaagactaattggagtggcctctccaattagatttaccgtttatcatgacaagatgagaacgaggcttctgtttgttttaggggtagtttgaattagtttatgtttttcaatcacgatcgattaggtaccctttgaaacacaggattgttaaagtacaggaataggaaaaacgtaggaataaaatatcacgttcattggattcatattggatttgattttggaaacacgggaaagcttcgaaactactgtttgatagtcatacatgaaaaattgtaggaattcaacacaggaagaataaaacatgaggtaagagcaagagctgggcttgtgtacgtcatggactcatggtcccgtactcagctcactgatgtagtcgccggcatcagcgagaaacaacgtccggttgaagagctcaccaacgatctcctggcggccatagacgccggcgagccggtctccggccagctggcccggctcgaagagatgaacgccgaagaggattctgtgcattttaatttagtgtgaatttgtattagtacgaagttgctggcatcctttctgataattgggcttgaggattgagactgagtttatttgtatgtaaactccagggcaaagggctgatatgaactttcaaaacaaaaactggcatagactttcaaaaggtacttcgtttatttagcaaatctccagggcaaagggcattcggcacaactactttgcatatgcttacagttgcgtccaacgaaaccaatacaaaattccacagattatgttttacttttgaagtaccaaaactatggaactgccggctgctgaccaactcagtgtattgctaactacaatatgatgaagtatgcgatctctctgactaaccatgggaagaacattttcaagcaccacaaccggtgctttggcaaattaacacttcagaaagaatcgtgcagtacaacaaagggaggatttaatcttcataatctacaccgtcctcatcgtctagctctgagctatcggctccacccatgagcgataggaatagaagaaccgcaacgagctgtgtcgcaaggaaatactttgcttttcgcctgaacttcttttcctcctctgttcgttccttcttagctctgggttttggcttataacctagaaagtatcaggttgattagatcgcaaattgcaaataaatgtttgaaataatccagaacatagtaaaaactctactgtgcaaagatctaggcaatattgaacttataatatcgattggcaactttgctgcacaaattgcagtccaaacattactggtaaggcctctcacagtgcgtctagctggaccgcgccttagtcgtgccacgtcggaattttgccgccgtgtcgcttggacccgcgcctaaactaggttcctcgtctcctaggtgagcaacgcaaaacctcgcgaaatcgagggcacgcagcgtggagaagacccgggtcgcgcgcgctgtgggcggcgtagcctcgccctggcatgccctagcgccgaaaccgtagcgcgaaatccccgattcgccctcccaaaacccattcccgctgcaccaatttctctctcccgccaccgattcctccgctcccgcgccgagaatcctcaaaatcagcaagcaaaaccaagaacacagattgcagcggcgacgttacaagaagaatcacacaaaatcacaaaagaaaaatcaagacacaaaatcatacaagaaaaatcaagaacgccgtcgccaagaacgccgaggaggagcgcgccctcctcccggctgccgtccgttcccgccgcccccgccgtcggcctccgcggatccgtccccggaggcagaagcggtcgaagcaagggagtgggggagggagaggggaggggcggcagacagatccaccgccgccgttgtcgccacaacgacctccatggcggcgacgacctcctgcgccgcggaggtgtagaagccgtccgcccgtcggcgccgcatcgtccactcccgccgctcccaccgtcggcgtcgcgccgtccactacaaccgcccccatcgctcccgagtccgagcggaaggagaagcgagcggcgcatgcggcgcggtcgacggcgaggcgacgcgcacggcggcggcttccccggcgtccgccgcgagggaggagagggaggagaggaaggagaacttgagggaggagaaggcgaggcgaagggggaggagaaggcgatgcgccgctgaggataaggggtaggtgaggaaaattaatccgtcggtgcgctacccgtgtcctcgtgtagggtcccgcccactgtggacttcgctttctttacctgtgtctctattcaactaagccacacatatatggatgcttgcactgtgaggtgggtgtctttggaccaattttttgggctaggggtacgggccccatagcttgcactgtgagaggcctaagtgccaatctagtttactacagttgacttaagtagtagtactacatgtcatttatttcataattcatatggagaagtgcgttactcccattatcaagcccaagaaaatcctgaaggaacacagtacaatacccacatcaaatttaacagattgacaaatgataaaaataacttgaaagcatatggatgtcatgcaacaagcaatcttggaattccggtgagaatcattcattgaaaacaaattacagaagatgagggatatctcatgaacaaaaaaaggtgttcctaatactccctccgtcccactttataaggcgtgtaattatttttactaagacctgcatagaaaagtttttttactgttatacccctaattaagtgcatgcaaaaggatttaatctcatcgcttcagtcggaagcggagaatatttgagggcccagcccatctgcatgctgcgcgaagctgcatgctccacgcacaggctgcactgaaacagctaacaagggctaatctcaggacaaatcaaaccaatttgaagatgcaccttatgttgtgggacactgggaaaaaaaaactaggcgccctctaaactggtacggagggagtattaagcaaccataaatatgtacactaatagcagtctgcatcacaatctgaatgaaaataagtcaatataataacttactccgaccagaagacgctcttttcctgggtgtagaggatgatgatggatcagttgatcccaatcctgttgctgatgaatcagaatcagcttccagtaattggaccttgaggtgcttggtaaagtttaccaagttgtcatacttctgcagacagcttcgcagcacagacgtatcctatggggcagaagtaagaattttgtcaagatataatcaacacagtattttgggaaatgtgcttgacagcttatgcttattgttagagaaaaaaaaatatccacgacaaacagaaccctaatgtaactatctgaagaacttgagatgtgcaactgtgcttgcagtgcaggtgcttcacaattttcaacgtggcatgcatgcaattatatactcatatatcaatataaatatataatcactttggcaagttaaagctgagtattgagtgttgtcagaactcaccggtaatacattaagaacaaaaagcgcatgtccaagaaaaagagcatcaacgtctgtagggctgcacagattgaaacaaaggaagttagtgttctgtaaatatcataccatatgaagagcaattatcagtcagtatgaacagaaagctgataaaataatacgaagatacattttcatgcaagtcaaaacaagataaagtgataatacctgttgtcaaagagaaagatctgatctcctaatctcgtagataaggcatcataagcagcatttgctttctggtatatctgttcaaaaaagacttaaattgtatcacgagattttcccatgtgatgaacaaattagccttaagaaatatgagtggggaagtagaaacctcctcttctttttctgcagcattaagcttagttatgcccagttgttgcttcacttctctcgttttcttccaatagagtatctttccaatgggccaggagagatcagaaaagtagatatcatgtggaatgcttccatcagaagccagccagagctcatattgcaaagcatctgaaagccaggtcataaccatggcctttgtggataatacatccgaataagaaacactaggatgctttgagttcaagtcaacaattttctcctccttgagatattcaattacaccacccttttcattgttgaatgcaacacattcaccaaactcgacatatggtatgtgatctgtggaatgaaaactaaggtataagaacagcgagcagtgaatatactttacaaatagtaggaaaaaaccaagatttcaagtatctaccattgtaaagatcaaatatgctctttcttttgtttatccccctctacactacaaaaaagtttacggacaggtgggacatacttcatcccccctttaactttcatagaactccacccttcagcacccaaaccccagatgtttcgtccctcagttccaccacccttccaaatccctttaacatcaaaccgaagaaagaaaacaaccaggcttgcaagttactctgacgctcgaacgatacagccagttactcactatgagctgcttactgtcatttaaacaagatctcttgaaatttcagctagccagttttagaagctgtccttgcaacacagaactggttgtggcattcaattatctgatgccgcattagtgttgcaaa

SEQ ID NO: 10421 - DNA, 57448 bp, Oryza sativa
aaaataagtctattttacgtccctattctttcgaccgtggcaaataatatgtctatttttactccctattgtttatgtgtcgggcctggcctgcggcccatcgtgccagtggagaggcccaggcacggcccggtggtcgggccgggccggcacgggcccgacccttgacgggccgtgccgtgcttgggccaggccaaaacaccgtgccgtgggccgggtcgtcgggcctcgggccttttggccatctattgatctagttgtactaccctgcggtcagtgcaatatacactctatgtaaaaacgttcggttaaggtagtaggtaggtacctcttattttgcaggtggttcttcagccctttgatgagttgttcctgggacatggtttcaatctttgcgtgtctgcttcctcctcgtcgcctgcggtcgccaccaccactggcagtggcaggcagcatgacctgactcaggatgctcctgaggaccgcacggtcgtcaaacttctggggcatcgtcacccacgctcggcagtcgaaattttggccatgcttccggtacagcgccgccgcgattgtgctcttgcccccgccaccaaacccatggatggctagcacaccgcggttcttgtgactttggcttttcatccacgcctcgagtttctcgatggcgcgcgccacgccgatgggctcctttacggttatgagccggcgcccggccacctggttctctcccgtggtctggtcaccattgcgggtctcgccgcgctgagggggaatcgggttgaggacgacgccgtatcgcaagcgccgctcgcccacttgctgagcacggttcttgagctcggcgagcttggcggcgatgtcacagcgaggcctgcaggtgtagatctcgtacagcgccctgtacacctcgacgaggcatccgtccccgcggggatcgtgacggagacggtgggcgaagtcgtcgacgcagtcctccatgtcgtaggcgatgtcgcggacctgcttcatccagtccttggtctgcgcgtcgtggccgtcgtcgttgccagagctgctgagattggtgaggaaggcgtggatgctggccatctcgtcgctgatgtactggatgtcgccgcggacacccctgatgagcgcgtactcctgggcgaggaggtttcccaacttgcccaggagggccttcatggtggcctccgaagcgcctaccaccaactccatcgtctagctcgaacctcttgatttctctgtgcctgatctttcaccttcttggcaaatctctcgtattttgtttgggaatgtgctgaatgaggtatggagtttattcctagagaggtctaccagctgttcggaagtaaacaaacatgaaacatgatagtctctcaacaaactacatacgggatcggaggagcatcaatagagagcgtggtcttaacgcgttacaccttagtgtcctctctccctttaactttcccccatattccacacccatgtgggcataaaagaccaacccggaagatgtgacttttgtccagcttggttcagatcacataaaaagaccatctataagacgtactattaaataccgcccctagcgcccccttcccttttctcattttttcatcatttccacgaatcctagcacaggaggtatttgttcatgtggcatactgctccggtctccgttcaccagcaagttggattttatcgtcttgttcttggcaatggtacggtacggtatggatcagtttcatcagcagcaggcagccaggcacttgctctctcgccggcaagccacttttgcatcttctcttgcgccacggattacatgcaccttctcctgctcaaattggaatttagagtttgctcagatcctttgacaaattatagttgagtttgatcagatcctcagaggacaaagtgtattaacggaaattttcagttgatgatgctttttttcagcacctcgatggtgttcattttgtagctttggctgcccgggatccgctccgggtggatagctaatatagctccagcatcctgagggagaggcggtagtagtactcgttcgtcgccggcggcggctatgtcgtggtcggaattaagatcgatgcagatgaaccagcaaaagttggacagcgttttggttcgtatagtacatgcaggcgggcatcggcattccgatgtaacggatcggactacgagaccagatgtgccacgcgatggagctacttgtcggggagaaggtacgacgtcaagagggaattggggctggaacttgtgttggttaattttatcggagcccacgagtcggatgtagagcatctccagcagggatctcaaacctagcccctaaacagtatttgagggttaagataaaataactagatccagcagggatcctattagagcccccaaagtgaagaggccctcaaatcctgccctcaagccctaagttctgggggctcggagcacagcctccatcgatgttttttcttgcgcggaacaatttcactccgccgctctcatcttctacccgcgcgtactggttctccttcggcagccgccatcgacatcccttgcactttcagcaaggttgcccccaaagggtgagattttccctacctccgttgcccgtcattgcaaagactccgaccgtcgccctcctgccatccgactagacacacgccgccatctgcacgccatcccgttgtcctccagcgccgccgtccacacgccacccgtcgtcggcctgcacacctcccatccgcacaccacccgcacgccctccgtcctcccgccgtttgctgcctccacgccgcccctcatgccccctgcagtccgcctaccccccacgccctccacctgcaagccgccctcctgccgcacaacagcacgccctctgcccgcacctgcgttacctctgcacgcaggcgaaagggctgccacctgcacaccgccctccgtccccctgtcgatttatctgaagaactgcgctgctgctgctgcttcttgtaggcaccatgcggctatagtgaagtgaagtagtagtacttgtggttgtagtggacaactgaacattgattttattcagtgaacagcagtacagcacttcattatattggagtactacatgtagcattgaatttgaattgtgatgtttcaaattgtaaatctaaatataattgaatttcatgctctagaaatatttatgttttaattatcatggtcttaaactatgcatgaacataaacataaacataaagtctatcttaaaatagaagagaaaagtaaataggggctgagaaataagggttgctgctagagttgaatgaaattttgagatcctaaagaattaggggcagccctcttttttcctttaggggctctaaaataggtggtattactggagatgctagataaagagagaaattagtttttgcgattggataaaattaattttgactcctagtataggagatgagctcctgtacaccaccagtgctatataaagatgacttcgcagagaggagaggacgctctaatatctcaccaaaaccctaagacctaatagccactaatcggcaattgcactagaaggcactcgagacgctgtctctcaggccagattcttgtaatttagaactccaatattgtggtatcatagtagcataatcaatcccttattgatcacatcatccctgttagaagccatctaagcaatttaaaattcaattatgtttcggtttgttttagttagatcaaaattagggtttcaagtactactgttttgcatattcaattttcaagttatttaatcttctgcttagaagaagggaataaggcaattcaatctatgccaaaatccacaataagccggattgaatcaaaaccccaattccccgaaatccccaagactcaagaaccctaattcggcctaaagatccaaaatcccaatttttggtgaatcaaaattaattttaagttcaggttatttaccggattcaaaacccaaagctcgccggatctatatggcctcctcaggagtggagttttccccaccgttctcgccgggaatgggaagcgttggcttggcgttgcttatgctccgggccctaccgacgatacccagagccgcttggcgcccgctgttgcttgcatcctcacgcttcgccggaccaccgaagccgtggaacggcttggtgccgcccttaggcgtgacccctccgatgaagatggaaccgcaccacacgacgcttgtcgccgtgcgcgcgcttcacatcgccggtcgctgtcagcgctattgccactgtccgctctcacgcatcaccgggggaaggggatcggggagagaaggggagataattgaaattagggttagggttctcaccataaccacccaccggtggttactacgacgtggagacgatccgtgccatccatcagatcggatggctcagatcatccctgcgtcgggccatcgtcataatgggccaaggttgtgggcgacatgcctcttgccccgcgcattcgcagaaatgtgtcggcccgattttgtgtcgattctggaagaaattgggccaaaattagaagtttaatttcaatcccatcaaattagatgtttaattttgtttatactttttcttagcttaattaaattgctaaaagtattatttgattaataagtaaattatttttggttaaatggaaccaacgagaagtttaactagaaagagtaatgatatgaaattattttttgaccaatgtgttagggttatggataccacatacccaatagtaatcgactaagctcggcggggtccactgcataccaagtcttatacagaatcaaacctcgtatatagaaggagtttcggataaagaagaacaagaaaagttctacatggaaacgacaaggattactcggattgtatccatattgatctccctagctagttccacttggacaaggggacacctatgggtataaatacaaacccccctgggaggagaggggataagccacaagacacaacatatacacaagccaacactcgttgccacatattgacatcaaagattagcctagacataccctatccggtgcctacggaggccggcaagaggaatctagcgccatctctgatcttgacgagttcatattcgaggaggaagactaccctatcatcaactacgagttggatattcatgccgccaagtcgacgatagctagataagttatcccaaatattgtacttgtgtgatccagaggaataagaggaacaccggctttggctaacaggagtagagctatttcctgtcagataagggggcccgaacctgtataaaaatccttgtctccatctcttttacctcaatctcgcatataccatggtccaacgatccccataccatgcaaataccatagtcgagatctcaaccgtcgacacaatattattataaattcatgtcaaatatatttattatattatcccttagtattttctgcccaacggtgatataattaaggaattaactttaaatattgttttatggttatttctgctcaacagtgttttgtctatgaaaattctatatttaattcgcacgtaatagattaagccaatttaaatcaattatatgcattattaatattttaaatgtttatgtttagcaatgggacattataagactgttgttccctttgatggatctaattacacttaaaggaagaacattatgcttctaaacttagccttgttggatgctagtatttcttacgttcacatataaaatccgcaagcgcacaaatataccgttgtagcactttatccggaagtattccaaggtattgaatttccacattgaacgtgtgtatttaactcttcttcatgttcatccaaggacacaagataaatgttgaccaaaggggaaagaagattatctaatgtggtacatgatcatttagaaagcttaactttaatctaatcgctatgcttcaggcacttgcttgcttgctattattagaacgcactctactccgtagccggatagggaggactacggtgatctcgagggttattaacacctctaacgtattgtgggatacgcagcaaacactgggaattaactacataaacaccatgtctatgcaattaattactactctagcgttaactaaacactaaaataatcactatttcttaatgaacaatactgaacaatgatccaacaagctaaatataactaacaaagaagtataccacacaagataaatcttaattacttaattaaaatattctcaactagagcaaagtaattgctatggtacaaaagaaatagagagataccgacaattccggaactcctccaactctttcttcctcactctctcccttattctaagtataaaaaaagaatacaaagagcctcttataattcagctcatatcttggtgtgtattgaaatgaaggaggagaaggccttttatagcttcctgaaggcggttggagcatgggaaccggccacaaccgccgtaggaaggtcggcagtaactaccaaaggcggttttggctgggctgggctaagcctagatcggttggccgacacctagctgcccctctagcccactccttcctcctgggccctagcatgtgggtccttattctattggcatggtggttaattgggtccagttgcaggtatttcgttaggtttatgggcacaagactccccagcatgctaaactctgggtgctacaaaaaaaaatgagtatgttggaatgtttgtaggggtgtcaaagtctcatctagttactttgcaaacattaagaaactagttaacatgaaaataagaggttggtgaatgaatgtgaattgattgaaatttttgtgattatatgagaaattggtagatcttgccttttttttattgccaatatataagtgctggtttttattacaaaccggcacctatagtcattgtcatgtgaccaggccggtcaaaaaccgacacatatatactacttataggtgccggttgtttaaaagaaccaccacctacatggatagccatgtggcatcttagtttataaccgacaactatactaccatgtaggtgccgattattttctaaaccaacacctatatgtctgataggtgcctgttctacaacaggtaccgatgaccagagacatcaggaccaactactaggtgcccgttagtaaatccggtacctaaaggggttttcctacttgcaccaaagagcttttctttagtagtgcacaattcacatggaggatatatatagacgccaccgatagtgtctgcctttgttgagagtataccctgaccggttgttgtagagagcatgcaattataacatgcagctctccttgatttataagactgcctgtgactatttcctaaccacactttgataaagaacccaagttcgtctttaaaaaatatttcaggtagcaagtgggatttgagaaaactatagaatgatggcggcagcacacaaatttcagccttttcccttgtttccattcatgcttggctaaagcttaggctagctttaacgattattttcaaacatcttctttctttgtagggactcgtgaatctacgcaataaaaaaatcacaagacctaaagacgggtacatgtcgccagaaaccttaactatgaccaaaatttgattttgaccacccaacgatgaaatggttcgctattgcctattggtccctcaactatcaaaacagttcatatttcattccttggtctgaaccgtgctgattttttatatttatggcattgtgtctacatggagcttacttagatgagctgtgatgacaccattgtccctgtcaataataaaccaaaacaaaataacgaaaatgcaagaaaccacatgtagcatccttgcttccttttcctctcgctcgcatcctacatatcttttgttattttgacttgtcaaccaggtgtgccacgtggtgccatgtcatcgaaaaacgattgcaagagtttgaaggaactatagtaaccgattcctgtgagggaaaacattagaatgaggtgatcttaatgtgaaaacagaagcaggatgaaaataattaaagctacctagttgtgttgcaacccggtaaacaagctgcagcagggtcgtaaacgtacgtgtctcagaaagtaaacggccatatgtcagtgactgtacaatatatgtccataatgctagctaacgacgtgactctaggatcgtacaagaccaaataaacctaccagaaaaaggtgaatggtaggaaaaaccaaaaacccaaatatcttttgcgtacttaaagattaccctcaaaagaagtcgatgacgaagccctgtcgccgctggtcgaaccacccacttgccgccggtcagactgccgaagcctcgccggtcagaccacccgaatacctgcggtcagaccgccgctatcccaacggtcagaccgtgcgcacaccagcggttagactgtcgggatccagaaacacaggtagatgacaaactcaaatatgtagattgaaacatttcgactttattacatcaactagtgtttacaaagtgcacaaacatcactcctcaccaaaatctcgaactaaactcgaaaccctaactttctctcaactctagtctctctacaaccgatactaggaggcctcaccctccctctctatttatacatgaggtaggctgtacaaagcccacgaatgtaacataacttaggactcctaacccacgtaggaaaccctctcctgcagatatacaactcatctctttccttatctcaatcaaacttcccgaattcggactcccttccaaattcgactcctctttccatacgtacacaattcctcttgtatactatatggatttcttcatcaccacgtatattgttctctagcctttagtattccgcatgatctcctaatccctggtatcaacttctcccaagttgactccgatctatcaccggcaacactctcgtgaggcctcaagcaacacctgcacatacaacaaccaagaaaccatattccgagcccaagttcgtcccaacttgactcacattagtataacaacagtaaccatacgcatagaaaccatctagaagccaaatccccgaaggaaatatccaaatccaacaaaacaacccgaaaccgaacacgatcaggatcctaccggtcagaccgtcgagccggccggtctgaccgccgcaacaccggcggtctgaccggcggcactcagccggtccgaccgccagggtcaaccgaaaacatccacttcacaaaatcaatcgtcttataaaatctccaacttaacattagcaaaccatcaatattttcaacacaaaacctaaatcaactccttaattttacagtgaccacggtgctaaagtgctaattccatgtgccaactaactccaccgatgctagaatagatatatagttgaaccatgcaacatgtagcttgctttcacgattaatactagttccagtgctctactaagtacattttcgttgaactaaataagctgacacattgtatttgtagtgatgtgacaaaaaaaattaggaggaaatagaacaaaatgtttctactcaacatccagtgatccagaacatattgagagattagtggtattaaatcaacatgttgaattaatattgtgtgcattagaggagttggattgggtttaatactagtttctaagttagagcggagaatatagaaaccacagatatcattgtcttgcctgtagaatgcttggacggttggaccggttattccggagtgcaggcaataacaacatccagctcagcatgatgtatggggcataacgcaccacaaaacaaatgcaaaagctaaagaaagacagagcgcgcctagactatttgctaacaactttgatgcatgtagaacccaagttcatcttttaataataatcttgcagcaagtggcatttgagaaagctctagaacgattatgatagctagcacaaatttcaggcgccgtttccctaattccctccaaatcttggcacgttactgctttatttgtaagctttatagatcactttcaaaatcttctttcaatgtaggatctcgtgaatctatgcactataaaaaaaattcaagactacgggaacatgtcaccggatacaccgagaaatgcaaatttagtttctatcgatttgtcccaaatgcatgttcttttatcatcaagaaaagttcacatttgattcataattatagccaaggttagattttagttacttgatcacgaaaacgttcacaatttgtccctcatctctcagaataattcatgtttcatccttttccgtccaaaccagggtgatgatgtattatgacatctaatctacatggagcctacttagacgattgggatgacaccatcgccacacatattgcatttggctccctcggcgggacgggttacacaagagggcgggcaggaacactgtcagggaagctgatgaaggaggtgtgcactgtggtgaagccgacggaagtgtgcacataagagatgcttcgaatagagacagaggtcttgggtttgaatcaagcttggcacatttcatgaatatgggttgaaaagaattatgtgacttgtgataagtgaaatgtgatgtggtaggtgcctaataaaatgtgaaatattttttttgattttttcacatctgcaaatgtaaaaaatggattcaccctacaagtgtcggttctaaataaaaaccggcaccataccggtaccaatgattacctccattagtgtcgctaaattggtacaagtttgaaaactgacacctatgagaggtttagaacgggcaccaataaaggcaggttttttctactagtgaatgtttctactcaacacccggaacacagtgagagattagttgtattaaatcaacatgttgaattaatattgtgtgcattaggggagttgggtctaatactagtacgtttccacagatatcattgtcttgcctggagaatgcggaccggttgttccgagtgcaaagcaacaacaacatccagctctcagcgtgatttatggggcataccgcaccacaaaacaaatgcaaaaagctaaagaaagagacagcctagactatttgctgacaactttgatgcatgcataacccaagttgatctttaaataatcttgcagcaaatggcatttgagaaagctctagaacgatgatgacagctagcacaaatttcagccgtttcccttctctccaaatcttggcacgttactgctttatttgtaaactttaaagatcactttcaaatcttctttcaatgtaggacctcgtgaatctatgcactataaaaaaaggggcattttcatggtccttaagaagctatcacgaggtaccaaaaatttagcgtaaaatttggtacctcatagtatctaagtaccaagaggtactaagtaccaagaggtaccaaaattacaatagaaaaagtggtacctcatagtatcttctcaaggaccgtaaaaatgcttaaaaaaaactcaagactacgggaacatgtcaccggatacaccaagatatgcaaaattagtttcgatcgatttctcccaaatgaatattcttttatcatcaagataagttcacatttgattcataactatagccaaggttggattttagttacttgctcacgaaaacgttcactattagtccctcatttctcagacgattttttatgatatcctcttccgtccaaaccacggtgattttttttatgacatcgaatctatatggagcctaattagacgattgggatcacaccatcgtcacacatattgcattcggccccctcggcgggaggacgggttgcacaagagagcgggcaggaacactggtggtgaagctgatgaaagaggtatgcatgaggtgaagccgacggaggtatgcacataagagatgcacgtgcattgatgaggacctggagctctgtcgtcggcggatctcacgacctgagctccagctaccagatctattatctataggacaggagaggaggacatccacacggccggatccatggtgctcgaccgccagcgctgcccctgagcatcaacggtgccaatcctaggtgaaggcgaggccgtctccacgttgcttgagcaatcgctggatccgccgtgctcaagcactggcttcgctggatgtggatggagccgacaacccgtccttttgtgcaacctgtcctccaaccgagggggccaaatgcaaaatgtatgctagcatggagcgtcatgtcggcaatcctacatgatcagacgaggtttgaacctgttgtggtaagactatggttctacatatgcattttacaagatcagtaagttaactgacaccaactcgcaattttaaagaccctgtcgtatatcattaacctaattcatttaatcgatgatggccacatgagtagataaaaaacaataaatgtaagttagtgggaaacaattcatcgtattatatactagtaataaaagattgtatttctaaagcacatgtaaaagtagtaaaaaaaaacatctagctggcaatcaatcttcctcttcttcttatctcattacaaatagaaaatactacctccatacattaacagaggaacattgtatgcaccaaatttcagttgaaagatatcccttataattgtggacggacgaatcagcatatatgcaggctataacccactctatcgtatctttcgaactacatatacagcacacagcccccgcagtctgcactcccaaaactcccaatcccggacagtgtcctagctagccacacgcccaaatttccccaaatcgatcacaccaaaggacgacgcatccactcaggtatttgtgtcggacttttgatttgttttccacttccagtgtggtttcttcctgatacgaggatgcatgtttctgcggttctagaattttgttttttgggcgatatatctccctcatcattttctacgaagaatatatgttttcgttcaatgaaagatctacttaatttttacacttgttatttgatctatttgtttgagctctcgaacacatttaatttgggccgatgcttgctcacttcactgagccctcgggcaaaatttggtcagcttagttcgttaaacttactacctgaccaagcgaatcaattgtatatatattgttagatggaatgatggatcaacagagctcaaacttaagaagatacagtttcttcactggaagattttcacataatgtacatccagatctggaaatactatatatttacagatgcaatgtatacctatatcatactatattagattaattatcagaaaatcattttctgacctccgggttgttcgtattgaaataagtaaatatcagtttactcggcgaatcatttggttgggtcagtaatggtctgttgtgtgtatcggctacgctacttttagctcaagaacttacttgctagataaagtagctagcttagctagctagttggcaatgcatgatatttcctagtttgttgcaggcacggactatggggaaattcagtattgaggcgttcatgcagcttggtgtttctgatgagatcaactggttaaagggcacggtgagctccatcaagaagacacttgcagatgctgactacagtgccctgaaagatgatacagtgaggtcttggtcgaggaagctgaaggatgtcatgtacgaggccgctgatattcttgatgtctgtgacgaaatggagggtgaagaacatggtggtcgctccaggaacagcccggtggccttatgcctaccgattcagggccacaaaatcaggcggcaagttaaggcactacgccagaaggcggatgcaattctggaggaggggaaaattttcgacctcactcatgtcagatctgatgaagatcacaacgtggatgctactactgcctgccatgttccgattccccgaactaatgttgtggggagggtgcaggagactagaatgctggttgataagcttacagggaaaggcatctcaggcccagggatgactggacaaaacgttgaagtcatcgcaattgtgggtatgggtggaattggcaagaccacccttgccagagaaattttcactaacgatatgatccaagggaagtttgacaagagactgtggatcactattagtaaaggtaataatagtattagtctattgcaacaggttatacaaggacttgggtgtgagcatgaaggtattcgtgatagcgcagtattggagcacatcatttccagtgaagtaagaagaaagaaagttttccttgtgatggatgatgtgtgggaagctagaggggtggtggacatttttaaaaaatcatttgtgggcaacgctcaagcaggcagccgaattctcatcacaacaagatctaaacaagtcgctcaagagatgcaagctgctatagtccacgaagtcagcaaactaagttctgaagattcgaggtcgctgtttcttcaggttagtaacataaaaattgatgcccaagaaaacatttcctcagttttctcatcaatacatgtcttatcatcactcctcgttcatacactttcgattcttgttacgatcataaaaaccggttcacaggaataacgtgtaccagcggtgatacttggggtatcactgtctattcttattacgatcattccggctcattacaagaactaattaacagtgatacttaaaacatcattgagctatgaattcacagtgacaagtatgtaggatcgcacaacaaaaccaaacctaccagagaaagatgaatggtaggaacatcaaaaaccaaatctttttacggaacttaaagattaccctcaaatacctgatgaagatgtattggtcagaccgccacctaaccgtcggttagaccaccgtgtcaccgccagtcagatcgctgccctgtcatcggttagaccgccaccaagcctccagtcagaccactcctctgtcttcagttaaaccgtcaagatccagaaagcacgtatcaacgaaactattgaatgtagatcaactttattgcatcaatatgtatttacaaagtgtatctaaatcactcctctctcaactcataaactagtattaaaacctctaagcgaaacctaacttttccctccaaaaagtcaataccttctagcctcaacccctcatttatttatacccacaacgtggcagcccctagccacccctagccacaaacccaatgtttgaggtatatcacaagggccttcaaccgaggctaccgaaattacatggaccagggtgaagcaccaaccgaagaatcaagttctcacattgggcgaacatcaggcgaagcaggaaggattcgccaagggtcttgacgccttcaccatagggccaaagcattgtaaggcctaaacaggttattcaccatatttgggcccattaaggggcctagagcaaaatagacactagttacccttataaatgttcccatcataagaggacccatgtaaattcccatgtactcattaactctagggtgcatgagcttatactaaagctataaatggccctcctaggggcatgtaatgggaggatccccaaaaattccatcattaatacatattgctttactattccactgtgtaaaccacgtccttcggcgtgcacggttgtctttcgacaacagctggtgccgtccgtagagaacccagggcgaaaccactgatgccacccaagaagtcgatgagagagagagttgtgcctaagggaaaggagggcgaaggcgaagcggagatggccggcgaagagtttgcgaggtccgaaatagtgttagagcaaccaagaggcgaagggggcggagggcaagaagggggcgaagtcatgcagacgatcgccataacccaagcagcaacttcgatcattcccacctcaactcaagctacaacgcaagctacgactcaagcaagcacaaaagccgaagcgtcaacggcacaaagggtagagatggaagctatgcgacaagacatgatgaggttgcaggacacgcttcgccaaatgcaagagcagcatcaagtatacgaagcagccctgcaaacctggtcaacctctttagcaagacccactccatcttcgatacccgcggcaaccactctagcgattcaagcttcgactcaagcaacgcaaccaagttcgactgttcaatcgatccaagcttcgtctcatgtggtgcagccgactgcgaccgtgcaagcgattcaagcttcgactcacgtggtgcagctgcttcgaccgtacaagtgcgacatatccctaaagcaacaatgttgcatgtacgtccgacggtcgccccgatcccgccgatgaggccaattcaggctccaacacctcaagctttggtggaggccgcttcggctctccaggcacaattccaagctttccttcaacaattgagtcaaccccacatgattccaagtgtaaccccttcggtccaaggcaatgggggatcgagccaggacgctatggcatggcagccgacgaaccagctccacatgtgcgcaccaacccaagcgccttcggcaaatcctcaaggaacaatggctggtcttggcagtattcgaaaagttgttcaaccaaacatcgtggctcagtcacatgacattagcttcgccatttgcacaaccatacctaggcctcacatcgcagtaccagcaaggcatggcgctgcgggcagagggtgacaaggtatggcgctgcgagaaatcatctgaatccccccccccctcccagttcaagtactcaccagtgacaaggtactcgggtgaaaccaatccaagcaagttcttgtcgatctatgagtcagcaatcgaagctgtccacggcgatgaaactaccatgtctaaggtaatacatcttgctttggacgggatcgcctggtcctggtattttaacatgcctccaagcagcatttacttatgggaacaattgcgtaatgtttctatcatgaacttcagagggacgtataaggagccaaaaaccaaaccagatttgttcggcattcggcagaagctaggcgaatctacaagtgagtacgctaggcgtttttcacaagcaaggtgccaagtgcaggaatgcaggatatcactgaggcctctgtgatcaatgccgcttcagcaggccttcgcccgagcaagctgacaagaaaaatcacaagaaaagagccccagattgtcaaacatctgttccacatcattgacggctatgcccgtggcgaagaagacaccaagcgaaggacccttcaccttcacatgcattgttctctagcctgagcatccctcaggatatccttgactacatagacctcaacttctcccaagcttagtctcgacccatcaccggctatactctcacggcctcaagtaacacatgcacataaacaacaaagaaactccatatctgagtacaagttcgcaccaatttgactcacttcagtacgcaatagtatcacatacgaatagaaaccatctaaaagtcatatacacgaagcaatctagatatacatgaagacagatatacaaacgcaatggcaagaaaaacactccccttttcaaaagaaagaatttcttgaatctcttcccctatatttgcaatcaaatcacaaaatcgacatatgatcaaaactactacctcaaacacaagcatatgaaaaaactaataaacgaggaagtagaaaaaaattatatcaattcaaaagtatattgatgttacccagaaaagcaattgccgtatcaacattgaatgcacatggggagtttgtcgccgaaatacctccaaacaagaacataccgaggcctccatgttggggttagaaacaagaaattttgaaatccaacaccgagtcacatgaccaatagaaccagtaggtacatatgcacgaataaaatcaaaaccagaattacctgaaaacttatcttaatgtttcacaaaagtctgatttgaattttgcatataatttgccgagactggtctgatcactgttctctagccagtctgatcaagcctggttgatctgacggactcgcccatgttagtctgaccatactcctctaaccaaaactcgatttttgccacctttgtttcgcataaaagcaatttctctttattttttctattacaagcaagtccaaaataaaaaccatccaaatatccatcttttccataaaaagaacaagtgtacttctcatgcaaaaaaattttttgaagttgatggtgtagaaattaatagttctgcaattaaagattttgtttcttgtattgttgaagaaagagatggcaaaatactaacagatttaaaaactgttttctctagttcagtttttttcaaagtttcacctttttaagttatactcaaaattgcaggttggtgacatgtataatagacattagtttcaaaacctacacaatgattataggtgtgcacttttgatttatcaaaatcatatgaaatttctttttaccagcagaatacatttccaaagtttttttttcaaataagaaactttttttgtcaaatttgcacaattttcgcaaccaaccaaaacacctttgttgttgtgacacttagaacgagaaagcacttcatgagttttcaaattgttttacaaaagctctataagggaaagtgcatcttttaatttcatctcattccaaacacacttcgagcaattttgagaatccaaaacatccttatgttgtttaatcatttttgcactcaaaaacattgaacaaagaacttacataaaaagcttatatttattcaaaactttccttatcaaaactaattcattaacaattcgagcatgcaaagcaaatctaagagcaaaagaagactcgagctttttccttttgtcaatcttagattccaatcttaagcaatgtgtagtattaacatctcttattcgtgaaatttcagaaaataaaacctcataacttttgcaattatcatcatcaggaagaagagattttaatctagcgacttcagcattaagagaatcaacaatgaaatcatgttgtttaagtttttctcgtattttttttattattggaatttagagaaaaagttattttcaagaaattctctttgggtggggggtcctttgcggtctgaatctgattccccacgagccataaagcgcacaccagagatctttcccttgtcattgtcatcgctttccgaatcaatatcacttgagcacacttgattacctcttttgatgttcctctcattattcaaagctagagataatttgttaataagcaaaaccacgtcctcctccgagattctctcaagatgaccattggacatgaccattgaagtgggcaaagcaaagatcaacaaagaatccaaataagaacttgatgacgagattaagggttccatcttttgtttacaaacttgaaaatatattccgtcaacaacatggaccttggtcgataatttttcagccatcgcaaaaactcaaagatcggtaaagaccacaaagagtaaacgtggctctgataccacttgtaggatcgcacaccaggaaccaagcctattagagaagggtgaatggtaacaacaccaaaaaccaaatctttttgcggaactaaaagattaaccactaatatgataacaattcggcccaggtagggttggccgaggcccaacaaattaaagttgcctagaccccaacagttcttaggcacacccactcggggaaaggcctaatctccctaaaagactagtccaataggggaagggtggcactcccttttaaggtggcttcctcctcccaagctaagcaaggtgggatcattcagaggctcacacggtcgccgcccgacttttgcgtctttgccagtgggtaatagtggaggatgtcctcatcagaatacctgaagaagcgttggtccaaccactagataaatgccggtcagaccgctatctaaccgcctgttagacaacggtgtcactgccggtcaaactattgccctgccacctccaagcctctggtcagaccgctcctctacctttggtcaaactctcgggatacagaaaaacatgtatcgatgaaactcttgaaagtagatcaatcaatagtttcgtctaaatttgttgtgtgcgtatggaaagaggagttgaatttgcaaagtgcatctaaagcactcatttctcaactcacgaactagtattgaaaccttgaagcaaacctgtcacgcccggaatttctatccaaaattccgaacgcttacatgcgtgttaaaccctcgtccaggaatcaaccgaggcacacaataacaaattgataatagagtacaaataaataactatttaatattcgtaaataataaatcattacagaggtggatagttcctctcaaagaataacattctacgcagcggaaaacaaaactaaaacaaactacggaacaactatggcgactccactccacaggcatgtcaaccaagaacaagcttaatcctccagatcatcaccttcgctgagatactcctcttctgatgaatgaatattgcaagaatgagcatatgacatactcaacaagccacacagcaaatatgcaagtgcacaggataacaaaggatggcataatatagctcatttgcataaacagcatttaatatttaagagaatagtaaaacagttaagtaattagtcaatattaaataaacaccatacaacacacccgtgttgtataggcccaacctcatatgaacaaccaaccccggttgaacataccaaacctccaaaccaggaatataccattccaaaccaggagtcacattaattaacacagttaccatttaatgtgtaatatgagactaatcacgaaaaacattgctcaactcacccataaccgcgggtacggctattcgaatagattaaactctgatcagaggtgtaccactgtacccacaagacacaatcccacaacatgttaccatgcgccttagtaccaccacggtacctcggaaaggaactgtgacattacccctcgcacaacacaactcaccacagtgcaccgttcctggatcataatctccccctcaaaatcagaggcaatgcagcgacccccacggacttctcgccgcttcacagtctggcacactataatgaatcatgctatacaaaagataaagccgttgcccacgctggcttgtggttggcacggtaaatgtttcacaacagtagctcgcgaaccggtccttaattgtcatgagcacaaccatcaaaaccatatgctcacaatccaccttaactaggttttaattatccattaattaacctcacacaattaaccatcgtgagctaccattgaatataaccataattaataataataatataatatagtttataattaaccccttgagttagctaatgtgtctaagcatggctaagcaaacatacatatagcatttagctgaaccaatccaatatataaggttcatgctaatcaaattataacccataggaaaataaagtcatcttcggccattacttatacgggaaaaggttcaccacccgatgatattcgaaaacaatgcatagttgaaataaaataatagctttaaatgggttcaacatgctcaaagggttgtttgggatctgtgtgacttgccttgggcttccgcaaacgcttcggaaccttcctcgacagaaacgctctcctccggaacgtcggaaactaaagaaaaaatgctaaaatcaataaaacagtacaaaaacaagcataaacagtacatgtggatatttttaacatgtagatcttgattttagaaaactttagcaacttgaaccacctgaaacggatctacggttatttagttatgatttttcgaagatttaatctattagaaaaagggaaaaagaaaaaccgatgatgacgtcatgatgacatcatcaatggccggcccaggttggcaacctcgccggagattggatggtcggctgcggttttggagcacatgtacacgtagaggacgacaagacgaacgcaacggtgctcaccaacacgtctaacgaccaccgacgacggccggcgacgagaggagatggcggcggcggctcggacctcgccggcggcgagctacggcggtcggcggcggaaaggagagggtggccgagcttccccacggcttggcgaagcccacgacagtgacggcgaccgacggcgatggcgaacgcggctgcgcgacggcgccggagatagccggcggcgacggcgagcaaagcggcggtggcgacgaggctacggagcacgggaaggcttgggagttggggcaaacgaaagaggaggactagggggtcctatttatagccttggattgaagagatcggactcctcccgcaagaaatcagctcgggaaatcaaaaactcggttttggagataaactcaaaaacgagttcgattcggataaaatactcaacgatttgctccgatttttgggggtaaagatagaggaggatgagaggataaaaacccctcaaaaatccggaagaaaagaggagagattggggcggattcggaggggaaagggggcggctcgggcggcatgggtgggctcggccggccggctgctagaggttagggaagcgtccgacatgtggggaccacatgtcggtctcccgagtggagggggcggctggcgggttggctgggccggctgggccgacttggccgcgggcgagagagagagagagttgggccaaaaacggcccaacaacttaaggaagggattttggaactttttaattaaaataatttgtgaaatgttgttccaattattaaaaatacttcccttgctcaaataattcccagaaaattctagaaaatagagaaacaagcaaagtatttaataaaattttatctagcttgtttttatgttaaaaattttcctagattattagggtttagcttgtaggcttttaatttaatttctaaaaatgacttaaacaatgcgttttaaaattaggcaatttttagggcgtgacaaaaccctaactttttttttctcaaaagtcgatgcccttctagcctcaatcactcatctatttatacccacaacatggctacccctagccataaatccaactagaactagaactcctaatcacataggaaacccaccaaaccaaggaaacaatatcccatacaacttcatacttcaatctttctaaacttggactccaatccaaatttaactcctctttccatacgcacacaacatcatggaaacattcacctccacatgcattgttctctaccaagagcatcccacgtgatatccttgaatgtctgaacctcaacttctcccaagtctaatcccgatccatcaccggctatactcccacgggctcaagttacacctacacatgaacaacaaagaaactttatatttgagtacaagttcacgccaacttgactcacatcagcatacaatagtatcacatacaaatagaaaccatatataagtcatatacatgaagcaagctaaaaattccacgaaaacaactcgaaaccgatgccctcctgaagtttgcaaattcaaaactttcagttcaatttttttaaaactttcaagtcaaatattaaaaaattcaagtcaaaagttaaaaattttcaactcaagtttgaaactatgaacttaaaatttaaaaactttcaagtcgatatttgaaactttcaacccagatttgaaaattttcaactcgaaatttaaatttttgaagttaaattttgaaaactttcaacttttcatctcaaatttgaaaaactttcaactcaaatttaaaactttcaacccagatttgaaaactttcagcttaaatttaaaaactttcaactcaaatttaaaaactttcaagtcaaaattaaaaacttccaattctacatttgtaaagaggttatcagaaagaaacagcgctaaaaaaagaaaaaaaggtccggaggcaccaaaatcgggaaaaaaagtacgaacataaaaaaacgcacggtgaggcgggccaagtggggcgcgcgccagctaaattgctagcgcgtatgcgcgcattagcaacccccgtttatccccaaatccgtatgaatcagttccgtagccagttttgatcatattatcaccaagatcaaaagctacatcattcgcgatccaagatcaatatgctacctcgacaactgtatgtgcacacccaaccttttttttttgggtccgccactggtcgtattaatggagataagtaaggaatctgatacaaatcaaatctaacctaaaatatcaaactaccaaatactgtaacaccgttagtccatttgagatttctcataattaatatcacatttattttatggatgaaatgaaacccagtggtatagtatagattaagagcttattaataatttgggatttaattgttgcaggtgattatgaggaagaccggccaagatgagaacgagagattaaaggaagttaaagagaagatcatagcaaaatgcaatggttcaccactagcaataatcatgctggcagggcggctcttggtaaacagaaaccgaagcgcaaatgaatgggagatgcttttggaatacgctgcagagccaacagatcatggagatattgacagcatattccacctgtgctatgcggttttgtcatttcctttgaagcagtgcttcttataccactcgcttattcccaaggatcatgtgatcagctgtgacaaagttgtccagatgtggattgctgaaggatttgttggggctgatgctacttcagagttgccagaagtcttggggatgaaatactacaaagaattagttgcgagacatcttttggaacctgttgacgagtatgatggccaaggtcattacaagatggataacttagtccatacatttgctaaaaatgtagtggaaagtgaatcattagtggttgaagagggagaggaaaatcctgaaccgttcgacgtcgaagagggacatattcgacgatcttgggcagcaaaagagaaaattgaatggaaagctccaaaggagctacactcattaaggacattaatcataattggaaatgttattgttcaggcaagcacaggcagaaccttgagctccctttcaaggctaaggacgctacacgttaacaaaaatgaacatgtacatatccttctcgatagtttgcatcatatgaaacacctgagatacttggacctgagttacacagatgcccttgctttgcccaatgatattggtgagatgaagtttttacagtacatttgccttcaaggctgtaaaaaattggtgaaacttcccaagagcattgtggaactgcacaagttaagatatctgaatatctctgagacaaaaataaagtcaattccagaagaagggtttggtggactgaagaatatggtgtcactgcatggtttccccagtcagatgatggaaagcgtcatagcaaaagattggtgcagccttggggagttaaagtatatgtcccaacttatgcatcttgcactagagggtctggagaactgtgcttccggctcaatggctagtcttgccaaaatcgatgataagaagaatcttgcatctttgaggttaagctgcacaagtagactgtcggttaacggcgaggtcgataaggagacagtcgaggaggtgtttgatcagctttgccctccacccaaattgcaggagctaaatattaagggattctttggagctcgactcccgagatggttgatttttaccaaccttgcggaactgagggtattaaagctagacaacttagtatgctgcaaccagcttccatctactttatggcagctcccttgtttggagtacctctacataaagcatactctgaatgtcaagcacatcgggcatggattcctcctccagtcatctatacctggtcctcgtgaaaccgacgttgcagcgacaacaccaacagcagcaacatcagcaactgcagcaacagcagcaacaacaacaacaacaacaattggaggaggtagtacccacaaccgggggccctatcatcggctttctggtgctgggtcagttggttctggcgaggagggagagattgtggctgagagcgcaacagaagacgcagcaacaactacgggaagcagcaatgcaattggcttcccaaagttgaagaaacttgttatgtatggcatgatgaaatggaaagaatgggagtgggaagatcaagtggaggccatgcccaagctagagaacatgcatatcagctggtgcctactgaatcaacttcctcctgggcttgcatcccaggcaaggtctctaagaattttggttgttgataatgtcaagaacctcatctccatcgatggtttctgttcagttgtccagctccacgtctcctccaacttcaaactagagaggatcagtgatcttccaaaaatggaaagcctgacagtttccagatgcccaaagctgaatattctgcagcgtttgccagcattgcagagcatggagttgaatgaccaagagatggaaaggctcccagattgtcttagagatcttccagcaaaactacgtcatctgcggatcacttgcaacttggatcttctcaccctgatctcccgggggaaaggcacccccgagtgggagaagatcaaacacatccagcaagtgaatgcctgtacagatgcggaagacgacaagaccgacaaacggtttgtcttctacaaaagagattccgacagcactgagacgaatatcgagccgagcccgagcacatcccaagttggaggtaactaagttgatgccgctgttaagtgttaatactgttgtttcaggtcgtttctcttatttcttttttattttttgttctagtttttataactataaagtatagctatggtatcttagccaatctgtctagtcaacaaataaatggaagttttctctcaaaatgttgacatgtatgttttaccattagtttagttgcttactgtttctactgcttggataattcagtaggtgcacagtaacatggtaagaagatcatatgagtatatgggccaattacaagtggaaaacgccatggggattttgaagggggctaatttacatccagaagttttagctgaagatccaagattgggtgaccgcaaagatggatgacgactcaaggccacaaatagcaggcgattctgttaaactgggagatcagtgaaccagattgattttgcttaggggtgtacttgaacactaaaaaaagtgaaaacggtatgtgggcagttttttgttttctttgcgatttgatatttttcttgcgcattcgtggttaccagaacatcacaattgtcaggtagatattgttcaggttctatgtattaatgtactcattactgaataaaaactctccaaccctctttagataacatttggtagaactcctagttgaagtaggaaacatatccgggtcacgaattcagatcaaatacacatgttatatgtataaaagtgtatgaaccgaaatgcagaaaatgagattgaggtacaggtatgcaggaaatgagaatgtatgaccaatgtaggcccagtagatatatatagttagagacggtttgactaatgattataggttattcaggtatctgtagaaagtctgttaattaacagacaatattcttttctttttttcctttttcctttcttcacaacatcataaaagtcccatgtgacatcttctcaagaagagaaatttcacactagtgttcatgctctatttagactgtcttggcttatgccgtatgatcgagttttttatttaagagtacatggtcggatggctagtatagtaaacagagcggagtggctaatgtttgtgtggctgaatatgtgttgtgatggttgtgcaaactgtaggtgatgctttgcaggtccatcttctgctcccctttatatatagagttagtagccattgtacctgtacaatcttgatgatgtattgtgcctttaaccgctgatgaaggttgatgatgcatcttttgaaaatatcgttcaccatgataccccttttgacatcttaggatatttattccaatatatcttattttcaaattaaaagtagcctcctaaactttcatcggggatcaaaggaattatataaagaagcttccataatagctaccgaggctttcataatagtactagctaccacctaccaaggcttttatacaaaggaatttcatcagcaataaaagagcactgtcatcgagattctccataatgggtagaattttgtttttattttttgtactttttattttttttattcttaaaaataaatcctcataaaacttatttttagaatctaaatcgtttggtctgacgtgacaaaacaacactaacacttagcaggcatgatatttttgttctaccacgctagtaaggttgacgtgaccaaataacgttgccacgcttatcaaactgacctaacagcgttgttttcccacgccagttcgactggcttagccaaaaggcatgagaatgtattttgaaaggcaaataaattttggaaatatttacctttcaaaatatctgccattgatcgctagctccaatataaattgaaatggaaattgaagtcttgtcttggaaataaattatgaaagggtttatttttaaaattaaaaatagaaaagttaaaaaaatatctaatggcgaccaatgtgagaaggaatgcaaggcatctcgtaacagcccacacgaccaatcagtccatcacaccataaattaaagtcaacatgcctcataaaattggaccaatagagtattttgctagtatttcatagtcatattagcatttcctttcaagtaaagagttaatacaaacacgaatttcaaagaaactcgagccaaacctacaaattttacctcgatttttttttcaatgtttacagtacgaatttcagttacaaatgcgacagaggccaagaaaactgaggaagtaggaattttatccaaacattgacagctataactaatggctaaaactctgaaaactattgatttgtttatgaggtggcctaaccatagctctttcctactagtcctaagtcctccctcatctgtatagtctaccaagtaacacatccaacacaacatttttcatacggaacatgtaaaactgatgctttttccacataggggagatgtttctaatgtaaacacaacaagaaatgcatctagggcctcaacgctctcttctacaaccacattgccagccacacccacaccaaaatgggataaacacagctacctacattgccaagttcacaatatgatcagatgaacgccaccacaaagacaagatcgaggtacagatatgcagaaaatgagaatgtatcgctagctggctacgcttcctcttagtcggttagcaatgtgaagaaggtggtcgatgttagtcggtggatagtgctgcagcagctggatgttggcagtgaagtctccagctaggaggcgcctccggacaaggatgagcatggcacagcatattcttagcaacgtgtcctgcacaagaacatgcaaagcattagccccctgcagttgtacaagtaacatggctgcaaacctagtttggaggcttagtccagaggttacataccggaggaccttctggatcacccaagatagcatcccaaatgtgaatacacacattgaagctgaactccattgtcaacagtagtgtgatccatctaaatgcatagtattgtggatatacctgtattttcaatatccatgcatgactatcaacaatggtgggtgacataccagagtgactaaatttacccacaaaaacaatatagcaggctatcaatattagtatcttgttcagaagataaacctaaaacagtaacatactgttaaattgacaaggaaataagagcaactttaactgtacaatgcgagaaaatagaccagttcctgttcctttccagtggtaatactagcattttcacttaggacaagctaataaaatagaagggttaattggatctatgccattgtaatggcaaattgtaatggcatgacttcaaatagccataggttaattaaccctaaattgtggaaaagtgagaagaggtgacattacggatagtaagatgtccaatattagctattgaacaaataacatgacaagtttttctgggtgcaattccatgtgcactttctcagcatgcatgctacagtagattttgcagtctgtgaaatatattactgaatattccctacctttgtagtgatctccatatgtcgccatagctcttcatcatgtctcttcaagagctgagacaactttgaaagtgtagaccgaatacccacttggctgttgtcaagatgcttacagtagttgtctttaaagccactgagcaattcaacaaagcaaaagaaagtgtctgcttcagctgaggcctgtaattccaaaactgaatggttcagctaatgaacacatttcagaaccaatcataaaacagaccaagttgtgaattaatattcatataaatgagctattctaattctccagaaagaattcatttagtgttgattttagaaactcaaaatatccacaataaagtttttgtgttccatgtaatgagcgagagagaaaagcagatagatatccttatgatagataaattcctcctttgtcaacattcaaacgttccatttaaaaccatgtgatcaaatagtaaaagaacatactgaattgcttgtatcagggtcattcttgaacacataaaaaagaggtgccaaaacttcattcatcccttgcacatatcttatggtaggatttaattttgagaagataatgagaacacgccttagagattcctgaaatgtgtttgaaaaatttagtccaaatgacaattacttgtagtttaaatggaaataaggaattccaaggcactgaagtgaaacctggttagccttggcagagaaaaacggcatttcaggatgtgttcttttcacatctcgatctatctgttccaggatttctgattcctgtaaatttacatttatcagaatataagaaaaagaacaaatgaaatcttgtggctgccatgccagaaaaccatgtttaataattaacatctagactatacagaacataaatgttcagtgcatatcaaacacataggcgagaaaacataaatgttttcgcatcgctcaatacagaattcagaaggactaaacagttgtgcactttcctctttccttgcaatatattcccttcatttatttttacttgcatcctaaaatcaaaatccatgaaactaaactttctaaaattgatcctccatatgttatgaatatatagaatggtgattaaaaaaattatcattacatttgctattagaaatacttacaaacacttagtattaacataaaaaaattacaattaaggtcaaagctacatcttggactatgacaaagcccaaaaacatcatgtaaataaaaatcgagagagtgcttgtccttagcttttcacaacagtgcataaacaaaatgtaataccctgaccattagtagagggccgtgtggcccatggtgttgtattagtaggattagtctcacaagaggagtttagataggttgggcccaataaataagctcaaatgttttaaccatggcacctccagattaaccattttatacagcaacaatgagaaaagtgtcaaagtggggtgctatgcatatgtggggcttgctcctaaggaagagatgagctaatgtagatctcagaagctgaggtgttacacaaaactaggtccagtgaaaggcacgcaattctgaagacggacaacaaatgcaatgtgggaacttaatatgagccccaacataccgaacagaacaaaatcaaaacctagtgaaaagaacaatgaccacagactggtgggaaatactggggactgtacacacctcacagaccacatgttatgcaaatactattaaaaatcccacagccagatcagaaaaataacaataacaagaaactgtacctaccagcaatttaactagaaagaattaaagattataatgagaatgaggataagaaattaagattccatatctagatataacgatcatcatgagcaaagacaaactcataataccaaccaccaaacaacttaaaagcagtccaaacaatttctcataaagtaaatacattataatgtttcagattaactaaacacaattcaggtcttgaagggaccataagagttaagacacgtgaaggaaccagctggcaaccatgggttcccaacaagccttgcagatttatttaagatggtaataagtaatacctggaagtattgattccacaagctagatttaccaaagctcaaagggtgctcttcattagtaactttggctcttggtagaaggccaattttgtcactatttaattctttctttcttagcaactttgactcctcaaatctccgtattttttctgactggtcaaaagaaaatatcagtgtattcatacacaaccaattgacgccttgtttcgcaaggccaaaatctccaggtatggaccagggttttggcctagccaaacaaggcttaaaatgccttacaaaggataataaaaaaagtcttttggactaataaatcttcattgataatttaataaatattttagaggggcaatcataacttacaggatttaggagaaattcatctttatatgcactatactggctccgcttcttttctagctcatgaggccaaaaagcacgctcagttggcagatatcccaacagaagctgcacactataaatataatagaataaatttcttgtgtatgaactatggaggttgccacatagcacggttcttgttaaaagctaatttagaaaccatcaatagatcataaataacaaataatatgctgaaagtggtcattttcctataccacttgggcattaaacttgatgtagttatagttacaagacatacttattcaatatacatattagattgggaaatagagcaatttcagatggtcatgtgattgcatgatatgagaattggcaaacaggatagggatacgcaccaataatacagaccaattcctttttgttcccatgccataggtaactagttcaaggtacttaaaagtaaaaaaccagtatccttctaaagttcactcttgaaaattagtacccatctaaagctcattattgaaaattgaataatggatgtttatttgaggcaaaatctacactagacatggaaatggattactttctttcagcgtctccacactggaaacataatcacttccataataccatgccgggaagcagaaatggttcgttttaatgaaactgttctatgctgtccgcctgtccgtgcttgctcacggtagagtccccaaacaaatatgtaccgagaaacaacaaaaagtagtgcagcagcagagtagaagagaatgcgggtgggggaccttccagacgagcgggcggacggcggcgccgccgtccggcacgccgaggcaggcgagcctccgcagctcccccatgttcaccaccttcttcgacagctgcaaaccccaacaacacacgatcagaaaatggaaattccaaacaccccccaattcgtacttcaccgcgaaattccaatcccctcatccaaaccaaaaccccccctcccctcgtcaccacccacccacccaccgcgagcttgaagtcggcgagcaggtgcgcccggagcgcggccccacccccgacctccccatcctcctcctcctcctcctcccaccccgcctcgctcctcgccctcctcgacgaccccaccgcctgctcgtacgacgggggcgggacggtcggcggcggcttgggcggaggaggcgggggcggggagaggtcggcgccgtaggggtcggggggcacgggcggcgacggcgacgaagacgaaggcggcggggccgaccagagcgggctgttgagccactccggcaccgccctcgccggcttcttccgcatcgggagaagcgtctagaaggctctagaaggggaggttagctagcgacgcgacggccgcgcgtgcggcggcggcggcggcggcgtcgtgacgtgggggaggcggaggcgcagatctggagcggcaggtgtggccaggggaagggaaggtgcggggaagagagagagagagaggtggaggagtgggttcggttagtcgctgcggggtggggccgtggtgtcggtgtagacgtggggcggtggggggtttcctttcccccaagagttggcacgtgacctctccgccattttccgtgttttcacccgtgcgttttatcctaccagtacttgtcgtcggttgtggagcgttttatcggtctactacctctttttcaaaacatagcaactaacagatgacatatcctagtactataataaatttagatagcatgagagagtattctactttggatttggataccgccgttatgaacaagtagtttaatactacctctatcccataataattgtatctctaggatttaaatttgttccaaaataattgttagtttaatactacctctatcccataataattgtatctctaggatttaaatttgttctaaaataattgttataatataggccgtgtttagattaaaactttttttcaaacttccaacttttccgtcacatcaaaagtttagacatatgtatgcagcattaaatgtggacgaaaaaaaccaattgtatagtttacatgtaaatcgcgagacaaatcttttgagcctaattacacaatgattcgataatgtgatactgtaataaacatttgctatcgacggattaattaggcttaataaattcgtctcgcagtttacaggcggaatctgtaatttgttttgttattagtctacatttaatactttaaatgtgtgtccgtatacttaaaaaaattttggcacacgaactaaacacagccatagtactaatgatcttattaatcaattatcatcctaatttctccctactttatcctacccttaactacccttcactcttacatataaaccatttaataaaaggtattctcatttttttctcaaaccttaatatatgctaaacaatctagaattacaattaatttgggatggagatagtagaaggttataagccaactatgaacttatatgaaaagataatttaaaaaataaagacagttggtccttatgtaaaagctagctattcacatactttaagataaatacattaaatgaataggtaagaaatggagagaggagaaaaaatagagataatcttatataattcatcaaatatatatgttaactttaatatgagctatttagaaattgcttcaaaatatcaaataaatatattttttaaatttatataactaaaacttaattaataatgagctaatggcttttttgccgtgccctaactttacattcatgcttattataaacgaacaccacataggtaaggccactaagaccattcccagcagatgcgctatcccatcctccatcgagaaaatcgtgctccaaacagatacaccatcgctgcctccaaatttagtgcatgggagatagaaacgtcaaatttggcgttcctctctcctcacgccatattgcaaccgcttgcttcgagaccgagcttccgcatctagccgaatcgatgctgtgtggggtggagtagtgaaggtgaagactggagaggtagaagtttaccagagatggagatgtggatggcgaagagaggcctacgaccactagaggcctacgaccactgcttcctcgtcccaccgcccgggtgccgactccgaccgctacttctccgcccgccgcgccgcctacgccacctggtcactggcaccaaccgccgcttctctgccggctctgcccagtcgtcacctcgactaccacttctcctatcatccttcttttttcttttttttcggtcactctctcttctttcaataggtacagataaatatgtttgagcataaaaatgagattatggtattagtcgtcttctactattttgatagttccgtaatgtttgtaaatatagcattataaaaaataatacaaatgtatggatagttgaaagatattattattaaaatataggaggatgtgatatagagtatgtaatatggatggtctattggaggaagaagagtatcgagtgggaatcttttttaatggctatacaaataaagatatgggtaatcaaatttggatgagccgctcaaaatagtagaaaagaaaataactttcatgtgactgggaacagcagaaagcaccaccatcaccatgttgacgatccaacaaattgaaaaaaagaaaaactccgcctcttcaacaaatggagaatctttcttgcatgattcctttcaacgcctgcaccgtaagtactcaccgggtacaataaaatactgcggatcccgtcttttgttaggaaatgtttttgtattcgagtcgataaacctactggctttattctaaacctttgattagagatgtaataactatgttttcccatcaatagagctagccatatggcattcaaaaaaaaaaataactgcagatcccgttgcaaccatcagatttactaattgagttagtgctgccgtatagaaggaagactgctatcatatactccaacctagtacttagatggtacataatccagtacaacgaatctatgtaccatccaagtgttttttttggacggagggacatgctgtgtataggtagggtgacatgctgtgtaaactgttggttacctttttttttgaagcattgatgtacactcctatatcagttccttcttaactttctgaaaatgtattacattgcttgctgcaaaagatgcacacaatgcaacgacgatatggtatcatctcaagtcaatttcaacagtccaggatgaagctaagacatgatggcctggatgcaaaagcacaacacctagcgctacagtcgatataatatatgatacataaacgaaatgatcaatacaatctacagccgtggttttggacattgctcaaaattgtacacaatggcatcaatcctcaactgtttgacaagtaatgaagtgagacagctactaccgccacaaatacaaccttgagtagcagctttgttgacaacagagatgtaggtgaagatccttgtggtggtgggtcgaccttcttcccccttagcttggctatcaacagaggaatcagcccacgcttcgcggctgtagtaagatcgagattggtgagttgaaatttataaatctgagaagtcgattataaccacaatagtagtgtagtaatgcagcacccaaaacaacaacatgatgatagtgatacaagccgtaacaaacggtatgtactaaaaagttgttcatgtgtagaaagtgtatgaagatcaagaactacagaagatcagatgatagggccaatggtgcagcaaaaataattttattcttgatatccagtgccagaagcaacagatggatggctcaatgccacaacataataaccaatacttgtgaatttttggccaggcaagctattataaactgatttttcctgcgctacatcaaaacacaaggatagtcttgaaaactgagacaagagaactgaagaaaaaacaacctgaaaattacacctaatgaaactccgctccacaatggctatattgaaatgtaactccagaatccagagagaatggttcaaatcaaatcaaaagaagacaagaattgattgaacagataccagagaaaggtgtaattctataattgtttcctatttattacaaaattaaatggtcaactttatatttgccagaccatgtattgtttaaaacagcatgtatctgttaaagcagcgaataatgtaatcacccaaacacaagcatttctaaaccatgttttcttcaaactaaattccttctatgccatcaagggttatctcaatcaattatttgccgcaggagaacttctcttgtatgccacttcttgtaggaccattacataagttgccataaccccttaaaaaggatatgttagttttttctaacaggtactgttgccttcttctgttgacttacctcaggtagctatagagataaagaggacatgcccttgacaggctgaacttaagtccagcttgctcctggctgcagaggagcagcttggtggacgggtggaggttgatgctagtggaagtagtgtcaagatgtcccagcacttttgtgaacctgcacaagcctagagtttgtggttctttagatgtttaccggcatgtataggagtgaagaacttcatgaataatctctgccttgtcaggacatagctaatgatgagaatccagctgatttgggtacaatcagtataatttgtcattttggcatgatccacactgtggatgagaaaggggccttgaggatttcttttttgttgacttatgctgtctgctcagtccaaagtaagagtgaaaggtttgggagtggcagaaaggacaaaggaatgcacaggcagagattgatgggccgtgttgcatccaagaatccatctcagtgacagcagtgatctacttggcggagattgggggcagaaaacagggctcagacggcagccggcacaatagcaggaggcaaggtggggaatgaggtggcggcagaggaagacatgttttgatattttccttgttcagttaacagcatggtgacaggacatggacagctggcaacccacaagggatgaaaattgaattccagtggcatataaggatggcaaatgtttttcaatagcggacaagggatcaagacaacattcgattgcatagaaggaatcttctctttgttttcttcagcacatcacattgatttatttctatcttatatgaattctgagaagtcattatctagcacaaactataaaatatcctagaagcactctagtcgaaaataagaaagatagtgcagtgtaatatggttcagcacttcagctagtaaacagaacaattgataactatattaatctgctgacttttccatagcaaatttatgaactctcaccaaatgctaaaacaaaagaactcttggagaacactaaatttatcaagatcattaaattattactaggcaataccaaataaaccaaatgttttttttctctgtacatcctgcataaaatataatcttcatataagtatgaatattgcttgtgcaattcatagtgtgagttgtcttaacacctgaaaaaactcatcctaactcatacccctttcatacgtgagtagaacactaaatctatgttccagtcataagcaaaatactgccattgtccatccgcatgatactaattgttgtgcgaatagagcactaacttgtaattttatatttcagatcgaacatccaagtaaacaatatcaccaaccagatcaaagaacacaagaagtcatgaactcagggcattgtgaaaaggtaaccaaatgaacaaagtagtaaaattacctgcttttttcaattccctctcttcttcaccaattcgtcgtctcaaagcattaagtagtgaaccaaaataaagtgctaagacggtgcaagtgaaggtgatgacattgtatggcatgctgaaatcaggagttgtcaagggaacaagcaatacttctgtatatgacttgaccacgccatcttccttcaagttataacaatatcgcaatcagtaagtattgaagcatgtcatttcagttcacatggtagtctttttgcttttgcttctgatactattagtcaagtcacaagatataccttgaacgtttgtagcaaaggtgacacaaataatgtatcaccttcaggataacttcggctagaattgaactcaggaaatgttaccaaagctgatgggatgtcaaatccttgattagcatcaggaggatattcatcgatatgcagaaacccctgaaatatgcattcatgtaaatataagaccaaggtcaacatttagttctatatatcactaaataaaacacaaaggggaaacaagtaaatttaagtagcagaacaaaccttgtcaaagtccagcgacagggtagctgattccatactgcaaggtaatcttagtagcatctctagagtaccaggtaaatgtttgtcttctgaaggagtgacatgaatcttctcaactacttctgaaatagccttactgttcccatcaatgaaaatttgtaagctgtgataataaaccttaacataccatggaacaacttggaaaactacagcttttattgagcaatcatttgagcttccaaataactgcttatgcaaattagtggatctaaatgacagagcaatcgaccctctttcatttccactacccatgagaaatctgtttgcatgatacggtgcaggggtgcaagaccatatgaggggaagtttccaggttatgccaacatccaaaggcttatcattgttgtagttactaacatcatattcatatagagaagaagattgggcatccatgttatttaattccttgagcaccctgtctggggcagttgacagcacaaagagttcattagtccaagaagcttcagttccagatttgtcaactatatcgttctcaatctctaaaaatactctgctcgatttggagacacggcattttcctgataacttcctgttaaacagatctttcatggaccagctgggctgcagttgtccatcagtagaatgtagttgctgaccccaaaaagtatccggctgcagaaccactgtcaatgtctgatcgataataataccaaaagattgagatgatgtcaatttcagtttttgggaatggtaatatcctttatatattgaaggcctgtacagcaaagaagctatcccagctttgtcacgacaaggaagaagtttcaaccaaggtgtgagattctcagtgcacaccgcttcacgaggcaatgcaccatatcttagattcccttcattcaatttgaatccccaacgaggagcagaaaaggcagtggatgattctaaaaagttaatggatgcacaaaacaggcctgagagtgtgtgtgtcaggttcttccatgtggcatcaatctcatccaaaggaaggtcaaaagctgcccacagctcaacaccaggaggctttgcataattggtcgacattgggtcatatccaccccactgctcataattccattgaccttgtgtgaaagatagctccaattcactaatatgaaattgttggacctggtttaggaagcacagcataatgttaacagtaacccaggacattctttgaaggcggtagaaagttaataaacagatggggaatggaggatccattcttctgatgtgacagaaggaacaaaattattatggttttacttgatataaatccaatagcatagagaatccatatgaagggatatttaggttggttatttagagagcatgagcacattaaggaaatcttagtaatctgaacaatagcacattacagaacgttagttaatagtagtatctattattagctacatgcaactatggacaggggacatatgctacacagatcttcatgattcagtattatctcatcgttttattgttctaaaaatagttctcaaagacttgtttttcatattaggaagtgctgatatatcacaaaatctgcattaaatagtgtttttttacttatccatcataacatttatcgaaaacaatgtaaaactgttaatataaagaataagtttgctttgtagctttgctatcctggtcctctggggacacattctctttgtgctaatttatggttcctactcataccaacactttcaatattgcagtttagacaccatgtgttttacagacgactcaagaaaaccaaagtccaaacggcaaaacagattgagtcgattggaacacaaaatatcatgaagccattgttttacaaaacaaataaagtgatccaatacaaaattgtgcctgagatagtcagcattatgcatacagcagtgaatatcctcgtcgagtcccaactacagtgaatcaactgaaaaatctctacaggagttgctacacctcaccgttgctgcgcataaaaaacgagccaattgctctaaccccgtctagtatcacctgattctacagctccgcacggccaattcacccaattcgaacgaccactaaccatcgaaccctaacttcctaggtccagtgaccagtcgcgagatctatatctactggggcagtgtgggggagaacacgggggtgcacgtaccagctgggcgatggccttggggaagaggtggtggtggcgtccggcggcggcggcggagggcgacgcggaggagcggaagtggaagtgggccagcgccttgcggtcggggagcgggcgcaggagcagctcctccgtgaactcctcctcctcggccgccggcgctgccgccgctgctgctacggatgcgaggaggaggagcgagaagaggaggaggaggaggagacggcggagagccggcggcggcgccgccattagcgccggcgaggtggggggtttgggcggcggcgtggtttggtgcgagagttgttgcggggtcccactccacaggttagggacacggtcacacggtagtaccgtgttactacgacacatggtgcatcagccattggttgagctttgagattcgtgcgtataaaaagaccaatttaatccatagagaattgcaaccacttgtttgttagaactatctccgtcacataatacttgtcattctaggttgtttagcatgtgctaaggttagaagaaaaagactataatacctgatgtgaccatgactactacggatacaatcgttgctcacatcatagatgaacaagatgctatcaagatcaagtcctccaagtgctggaatccgatttggccacctgctacactgctaacttcaaacggccgccgaatattcatacgacatccgtttttgacccgtgagtacttgatggaaagctctcggagtcctctttcaaacggatctaacctcattgccaaattccttcacagtcgtgatggaagaaggtgttgcgtcacctgtaataggcctatgggcttgtaatttcgtttgggaccctggcccaagtggggcccatgtggggtgcgccccaaccaggtagaggacgacctagaggtcctcccaccttcttaaatagttaggtaccccttcagggtttcttgggttttgtttagatgaaagtttagccattgctacttccttgcagcgcgcgtgtcggctagaccgtccgtctgcttgtattcgaaaccccaacttatcttgtgtattcattcctatttgcaattcaaattgcttttatcttcttcttgcttgtttcttcgatttgcttgcaggaataaggttgatctgcatcggcaagatcaacaacccacggagaggtgtatcgatcgctaaggcgcaacacaacgtctcgtacggttgtagttggatcgtcaacgtttctcccaaatcgtagttatctcaactcaccgaaagatcgcgccaaacaactgccttgagtgtcgagaggaactcagggttcatcaggtggtatcagagctttcgttactcggtgagtttttatctacccataaccagaaaattgccataaaaaaagaattgcatcctttacctagccatacttgtgccattgcattgttcttttcagtttttgatttgttgaattttgtgttgcatcgtcacatcgtgttgctggtcatagcgtctagttcgtttagagtttcgagttctggtcacgttttgtaccacagtcgtcgccgcccgccgtgtctttgttgtcgtcgggacctaggaaaatggaattgtcttgttgttgggatttcgcttttctagtttccagaagtttttgtcggtcggttttggagttgttgagttgcatataaggttgctgagttggttgtctttctgttttggccgtgcttgtgttcgtgcacgagaggaggaagaaaagttaccaaatcattttttttggcagtatgcaagttagatctggaaagaaatagtagattggtttggtttctatctggggccacgcagaaaaggaatcggtatcggtttccttcttttagaattctcaccaagtcccaccaccttgcatgcggcattccttcctcagtccggctccctccaaatcacgtacatcacaaagtgtgagtcgtgttaaacaccttggtgaatttttgtttggtgtcagtttcgagatttgtttgggaaaacggaaccgacataaactcagcattccatttttgtataatttttatttttgtttagacttttacatttgagtcctagtaaattttgtatttacatttgagtccctataaacttgcattgaggtccttaagtctgtttttggtaaaaaaaaatcataaaaaaagtgagaaaaggcagaaaggtgcataaaaaaacaaagaaaacaaaagccgcaccgaaaagaaaaaaaagaaaagaaagtaaaaaaagatagaaaaaagaaagaaaaggtgagaaaatcaattgctatcattgaggttgttttgatatatcagagttgtgcttttattgtgctatcttgtggtatcgtttgtgtctaggctcgcgtctctagtacgttctagcctaggaccagcacagtactgagtttgaacttttattcaactttgcattctctgattttaacatttgctattcctttgctagatacttaagcctacccagagctccacagatttgattgcagccgtacgacaggtgtttgccaaggcatcgatatatccaacctccattggggtgcttggttgagttggtgtatgtcaccattccgcttgcattggtaagaatttgtaagagctcgatataaagcttgagtgtgtgtgatttgtgagcttccactacctagtagttgataggaacgtatatattcttgtatatgtttcttgtttgctactaactatggcagggttacataaagagtttggagctgttcgtgctcaatgtggacattttcacctgggacatcacatggcaagtgaccaacatgacgcaaataaggtacatgatcataatcttgcaagagtagagtctgttttgacatcttttgatggaaagtatgattccgctgcatacattaattgggagctagcagtagaaaaacaatttgataagtatgatttttctaatgctcaaatgattaaggctgctagtaataagtttaccggttctgcatctttttggtggcatactggaaataagcttgaaacatgggatgaatgcaaaatactgatgagaaaaatatttgtgttttcatactatagacgtgctctccttgagaaattagaacatctaaaacagggtgataaaaccgtgcgggagtactttcatgactttaaaatttgtatcacttatattggtccaaaagaaagcaatgagaacacaatgactagattttttagagggcttaattctgatattcaggctgggcttattaacgtaacatataatcatataggccacttgttcatgcttgcttgcagtgttgagagcaatattttaaagaacccaagtaagaaacaatctatgcttgtgcctcctattactgacattttgcagggagctaagaacattcaccatgaggagaagagcaatatgatcgagatgacatctacatcgctcacgaaggaagaagagaagactgatgcacctacatcatccgaagagagaaccacaggtaatcttaatggtgttgcaattaatcaaggtaagtgtgccgttaatgaattaaacatgtctagagaagagcaaccattagtggaaccaattgctgagatgcctttgtcacaagttgatttacttgctgttccttatgataaagaagagttgtgtgataatgcttcacttaaatccatgccacaacaagtgaatgaacatgttgtttcttgtgtttctttgtgtgctgattttaagcatgttattcacattgctaatgaagtagaggaacgtgaattgacatcttttttaaatactttgggctatgttcaatgtgatgatttttgtgagctcgatagtttgaaggagaaattatttgataaaactgatttgccatgtccgactaatgttatttttcatatctttggcgaatataatgatagacagatatacttggtgtataaaatttatatatgtttggatttagaacctcctgtagatgtgaataaaatatgcaagctagagagacctattattgctaatcatattatctcgagtttgtcttgttttgattagaagaaacagattattctaaatggaccatgtgacgagcaccatatggaaaaaccgaggacggttttccgtaaagaaggggaggatgatgtgaccatggctactacggatacaaccgttgctcacatcatagatgaacaagatgctatcaagatcaagtcctccaagtgctggaatccgattcggccacctgctacactgctgacttcaaacggccgccgaatatttaaacggctgcatcagagtcagggtttaccaaactgtttggggtggggttaccgccaccccacggtttgacggttatcgcgagttatatcgtggtttcaaaaactgaaaagattaccgcacgtgataaccgcgataaccgtacggttttgtgaaccccgatcagagtcgaggatgcaaagtagtatgctcacagaagaacgagagcagaacttgcagctatataggagaaatgctaggttgtcgttatgcttacagaaaaccaagcggtggcttttgtcaatctatcacaccagatgctcacatcagagtttcataggtgctattatttaaggcaattcctttggtactagccctttatacttcttagggggtcttatttttcaagttctattcatgggatgctctggtctgaaggtataaactgcaaagtttaatgttagtaaatgaaacaaaataaaccaaaagatttgacttgtaagttagttccagttagcctttaacttttatattggcaatttctgtaacttgggatgctggttgctgttgccactagctggtttatgccataatttgacctatgaaatttaagcagatcaaattaaagctgctcacctcttgcagattccatgatcatggagggatgattcagttggcaggaaagagtctgactgaggctgatttgtcactgtgaagaaggcatataaaacactggcatttcaattcagtcaaactttttgttggtgcaccacatattttggaaataaaaggcctcagatttacgctcatcaactcttgtatatactgtggagttcacctcatgattgaattaaacacaatttttggggcccctaattttttttttttgccctgcgcagctcgcacgtgcccaagacaggccagattttaacattcacaaattacctgcctttatattggtgctagttgcatggtaggtagcacaaaattatcggcctgttttatagttattgagaccggaccgacaattgaactggtgagtctcttggttcaatggttaactggtttaatcggttggatcataggtctaaagctctaaagcagttcattaaccaattaaatatattacttatttcttcagaagcatagcatcccatgtggttctgggttcaaatctcacttgagcttgttttgtagccggttctaataaaaaccggacagctcaaattgagaatgtttggttggcagtcaatgttttacatgccaaaccttaaggtgtgtcacaactcgccttttgttgagcttaatcaagccacactttattagcatatttgtcccatatatcatactccattttgaccatactctgtgtagctttgtcacatttatgacaaattagtctccaaccaaataaataggcacttatgatatcattttttttatgtactgtgcatccagagactatatagggatagagtaaaatgattatgaggccactctccacgaattatgagccacaacaagtttagaatttattttaaaattatttagaattttatactaaaattattttcatcaattcagtcgcttgtgtacagcttataagttaacatatcaattatagattcctatccgaacatacgtttttcaaagcaaccgtatacatatcttgctcccaaaagctggggttatctaaaatatactgtaaaatttgactaaaattccccaagtttcatgaaaaatattttgttttaaactgaaggatgttttactccatatgaaatgtgtcagcctgtcaggttaaacgaaacccccccaggcctcctctccaacccgatgacaaaagagaaaattgacatttagccatcgtcaggatggggtttcgccagaatgccactccggattgtggcttcgttataatgccattttcgaacgacgccacattgctactttgccatttcgaccaaattagctgatttgcaaatgatttccaccgtggtgtgacaaaattgcccctgtgaccatttagttgacttgcgtggaggagatggatccctggcgccggcgcggctggggacggagatgatgccggcgtgggtggagaaggctgctcggctcagcggcgtggctgggacgatggtggcgtcggcgacgccatccgcgtcgacgtaggataacatccccacttgccccaaccatgtcggcgccgccgccatccctgtccccgtccccgtccccagccgtgtcgccgccttccccatccccagctgcaccgacgccaccgcctgtatgtccacatgctccaccgtcgccatcccaccctcacgcaagaagcatcccgatgacacacacgacggtggcgcgacgatggctagttctgaaggcaaggcggctgctacatctgaggccggggtgacggtggcggctatggcggaggcggcgtcagctaggtttgggggcagccttccccacccacgccggcgtcgtccccttccccgtccccgtccccagcttagctggcgtcgtccccgtccacagccacgccaccgagccgtgctgtgtatatgcaacggagaggaagaagagagagatgagataggataaagggtattttagtcatctcagcaagaaaaaacactacaaaaatcattaaattgagaagaaatggataaaatggcattacaacatgttgcccctgtttgaggatggcattttaacgaaaccacttttgggagtggcattcgagcgaaaccccgttttgacaatggcaaaatgtcaattttctcatgacaaaacccttttcacttgagttctgcagaaccagtggcagcagcagccggcggcgagccatggcaagaagccagcaagccgctccgccgcctcacctccgtcgtcctcgccgcgccgccgcctgccgtcctatggtacgtagcctcctcgcgcgcctcgaaccccctcgtacgtcacgacggctgtgccctcgctgcagggaggcccccccccacccgttcggcgaaatgcgcagctggagcgctttgcctcggcttgtactctggcgtcgatgccatgattatgtcggtctccatgggtgatgcattcccggccctgggatcctacccgcaaaagagctgctgtcccgcggtgggtaattggtttattctggttatcgagtacaaattcgattagctggtggtaatgatttgtttgtttctttccatgatgcagaggccccgctcgatttcgttcttgcccctgccagaaggaaaagcactgggaggggaataagtgcacatcaatggggattttctctggctggaaagcaagcaaggtatggaatccaacatcgatgcttgcacaacatgtcttttttgctttgctgatgtctcaagaaacggatcaaatttttttccatgtcagatagcagaaggcactcacatagcttgctaccttctgcagcactataaatacgttgttgctatcttccacaccactacacacaaatagcttacagcccttgtctgcgaacaagaaaaatggccgttgtcctagatgcttttgcgtcctacgtcagcgacctgctcttgcaggtggccaaagatgaggtgggcatgctacttggtgtctccgacgagatcaccaagctagatgaaaagcttcaatttctcaaggactaccttgctgatgctgaaaagaagcgcatcaccgacaagcatgttgacgggtgggtgaggaagctgaagggcatcatgtatgacgccactgacatcctagagctctgccagcttaaggccatggagcagggttcttcagttgacttgggctgttgcaaccccttgctgttctgcctacggaatccattgttcgcgcatgacattggcagccgtatcaagaagctcaaccagagccttgatagcatatgcaagacaggtgccgagtttagcttcatgaagctggaagcctatcaagatcgaaggactgcctctccgctcatcagtcgtacaacatcaccggtgttggagcggtcaggtgtggttggtgatcagatcgaagaggatacatcagcattggtgaagttgctaactgatgacaaggagaccattcatgcggagaacaatagcctgttgttagccatagtgggtgttggtggcattggcaagactactcttgccaagaacatcttcaatgatgatgccatccaggagaagtttgacaagaagatatggttgagtgtcacgcagaagttcaatgaacctgatctcctgaggagtgccatcattgccaccgggggtgatcaccgcagctcacatgacagatctgtgcttgagctaagccttctgaatgccatcaaggggaagaatttcattttggtgctggatgacatgtggactgaaagagcatggaatgacttcctccagataccattcagtcatggtggtcgaggtagccgagtcattgttaccacaagagatgagagaattgccaggggggtgaaagccaagtaccttcaccatgtcaacaaactaggatctgacgatgcttggtccctgctcaagaaacaggttcctctttttccatctttcatttgaagaactgttctttctttggttatttacccgtctctgtcctatctgtcttgttaaaatttgctgatacaaaataaagttacctttgtagggtaaaatggactactggaagatattatttctagaaatacacatggcaagtactatcggcgctagataactatgacacaaaccgtgttaatgttgacatgtagtgccaacgttcacctttacatctaaatatctaaaccatattgatgttgacattttgtttgacatggtctattagttgataatatgcttgacttcagttcatttccaaaaaaaataaataaaaatattgatgtaaaagttttgcaagctctataggtcaagatgaacaatatgcatgtccggacttcccactggatttattgtatggaaaaatatgcaatttatgaaagctctgttggttaagataagaatgatgataggcagatctggaattcacacacacacacacacacactattgtagcccataattttaagagcacctttttagggtgaacaaaaactacggggtcatgaagactttcgtttgtgttggagtccatcttgaagacattattctgcacgttgctacttgcaatgcaaactatatcatcccatgtgtgttccatagtttacaccacaaaatgccttcatctgacgctatgaagaatcaacagtgctaccattctttgcggatgatttttcagaaaaggtgtagttacagattttatgaacctaggtgcatatgcaccagcaatcttgaccatccataggcctgtgcagatcttacagcatgcatacttggcactagggtaaaatgtacctaccaagctttgttcccttatagtgagagcaggggttggtacatgatctaaaaaccaagaccaaaatatccttaaagtagtactccattggttctgttggacaataactcattactcactcaaaattccctcttgacccatgcacatggtaatgttagaagatagaaatcactcgattaagttatatcattaataatcattgttagcacttgattttttttttggcagttcacctcaaataatttcttctggtgattttgattccacatgagttcttataatcttttgtgatacatcaatttgtttaacaaaataatgccaacacgtatatataacaaatcgatatttcattttgtaattgtcaaattttttggtgaatgaagatataccgttcttgtaaatgtagatatactatattgaaatttcattgtatgtagatatatagatcaaagtttctttttgtaaaatgttattttggtaaattggcacatattgttttctatattacatttgtaggtataccatttaaatgtaaatctagctttatgtcattagttcaaatatgcatgacattttatttgaatttgaaatgtgtataaaaaaagcaccacaaaagtatcatgtgagtgtctcgtacctctttattggagtaatgtacacgtggcataatcttataatttttattattacgtcatatttttatttaaaaatgatatagatgcaatttttctcctcctaactattgtaatatccttccttcagtggatttcaggagaggtatcatttacaaatgtcatttagtaaaagatcaatttattaggtgcatgtaatgtagttgtatgaaaacaagtacgagtgcttatttctgaaaaaaaaaagggaccatgcaaagttgcacaccatgagatgaagaactcaaaacaacactaagaaaaataaagtaatattaattgtgtgtttaacatgaaagagagctataatctagttcaggggtaaagttggaaggctaggaagtgatgtcaaagtcacagtgacactatgtactaccttctttttatgcctttatagttagacttcacaagtacagagcaatgaacacttagtagcacacatcttggaacacatcaatggttcagattttaggtgcaaatgaaccttggttcacatatgcttttccctatatatatatatagaaatctccaaactcaataagaatgatcatttcctaaataatgattccatacatgatttgattaatcgatgaatatcttttgtcatgtattgatttgtaaatatcaattccttaaaagtatgagaaccattttattgtaaatcagaattagaaattcctgcaaatggagacataaatatatgctaattttgtttgagaaataaacattactgaagataactatttgccaatctttcttatagaaaatgtcctacaaacaaatgaatatgttgagttcaaaaacatttggaatcttctcttcaaagatattgtcgatggatgtttgcttgctattatatccatctgacatgatccaagatttgtgcgacggaaaaattatttatttgaaaatgggaggttgggtcgagctttcaaattgaacattaatttcccacgacgtcaaggcaacaaaaggtgtgtatataattgtacaatgcataaagaaagtacaaatcatcttgaccatccaacatatctaaaattgaaagcgatggtttagttttcttactgtgtacaaaaaagaaaggagaagataggtagagtacgaataagtagatgtatatgtgcatatttatgcatccagaagaacaaatagacttccagccaatatgtgacaatcaactgcatgggtgctgttgtggcttacaccttacaggatgcatgtctgctgccgtatgtaggtaggatttatttttaattaattaaacctggtagaaaaccaactaaataatgcttaaaattatatctgtagtactccaccagaccaccatatttaaaaatctaaattgcatggcattttagtatctatttttttagagaaaaatggcataggatctaaacttcttcggttgcgccgtttcttatgtctgatccagggccgcttcagtattttcttaggattgaggtttttctacaccttagggtttctacttgtcccaagcaaagtatgtacatgatcttcttaatcaagcttctcttactgatcagcaaactcccatggatcttaatatttatctttctgctgctaacagtgagcctcctatatataactactaggcaaggtgtaatagtactttcaataaaaaaaatcctgaggacctcacatgttactattatctggttgggaggtcttgttatttgggtgtcactcgtcctgacattttcatgtccagttcttattttgagtcattttgtttttcctcacactcacctccactataaccatcttctttgtgttctgtgttatcttcgcgggactatctctcattgtctttgctttcctcgctctacctctttatagtttcaggcttatttctgatgctactgggctagcgattcctatgatcgtcgttctctgtcagcttactatgtttttctttgtgtatctctcatagctcggaagactaagaagcagttcttagtcaaataagaacagtgagcagtgacatttttgttggtagaggttactttgtctgacttgtgagcagtggcactaaagttcataatagactatatattccttaccaatacctgtaattttcgtgcaaatgtatttcagtattaatattatttgatacaatacaatcaaataagcataacccaataggaaatgcataccatagaaaatggaataaaatgcggaatgagttaatagtacattttttgcgatcagtcgaacattatagtgcttaacttatatccttattttttttaaaaaaaaaacaaacttgcttatgcatgtgcatgggttgatggctagttcttacataatttgagtttttgtaagctcatgtatgttaaagaaaaatagacccatttatgcatactactaattgaatttgttgacttaaattgcctacaggttatccttagtgagatagatgagcctgagattgaggcactaaaggatgtcggaatggagataataggaaaatgcgatggtttaccactcgctatcaaagtgctagggggcctcttgtgcagaagagatagaaaccatggtgtttggtcagagattttgagtaattctacatggtcagttgatggaatgccccaagacctaaactatgtgttgcacctgagctatgaagatctctctcctcatttgaagcaatgcttcctgcactactcacttatccctaaaaatgttgtccttggttatgataccattattggtatgtggatcagtgaaggacttgtacttcaatgcacaaaaggattagaagaattaggagaagattactacaaggagttgatcatgagaaatcttttggagccaagtatagagtatgttgatcaatggcactgcacgatgcatgatgttgtccgctcatttgctcattatgtggctagagatgaagcattggtggttcaaggtagacaaattgatattagtaatcttcattcacagaagttctatcgattatccattcaaactgatgatgaagtagagtggaatcttctaaaagagcaaatgtcactcagaatgttaatatcagtaagtgatatcaagctaaggcctggtgattcattgggcaacttttcaggtctacggatcttgtgtataaattcatcaaattttcttcctttggttgactctctgtgccaattgaagcacctaaggtacttgtccttggcaacagatgatatatctagattgccagatgacattggcaagatgaaattcttgatgtacattgacattaatgcatgtggaaatttggtgcaacttcctaagagcattttaaagctaagacagctgaggtatctaagccttggtgacacacatataaatgcaatacctgaggggttccataatctgtcaagtattcggaaattatatggttttccagctcacatgggcactggtggtgtttcgccaaaagagaattggtgtagtttggaagagctagaatgtctttctgagctcagggatctagacctaaattgtcttgagaatgtctctgccagctcttatgctgcaaaggcttcactttgcaccaaggagcatcttatcttcttaaaattacgctgcactagtagattgggagatgatgggttactcaaagaggaaggtttatctgagatggagcagcggcttgttgaggaggtgtttaatgagttctgtcctcctcgctgtttatacaatcttgaaatttttggatactttgggtgttcactgccaaattggatgatgtcaccaatatccagaacgcctcttacgagcttgaggtatctgtttcttaaagacttggcttgttgcacccaactacctgatattttgtctcagctccttcatttgttcatgctacaaattgttcgtgcaccggccatcaagcgtgtcgggtctgaattcctgctctgccatgatcatggccatcattccctgacggcgaaagcatttccaagattgcaagtgctattcttcgtggggatggtggaatgggaggagtgggagtgggaggaacaagtgcaagcaatggctgtcttggaggagcttttacttgagcgttgcaaactgaggtgccttcctcctggccttgccttccatgcaagggctctgaagaaactatggatatgtgaggtccagaacctcaagtctcttgataacttcgcttgtgttgttgagctcagtgtggatgacaaccctgatctgcagaggatatctaattttcccaaattgcggaagcttgacattatgttctgccccaaaatggaagtattggagaatgtgccagaactcagaatcctcacacttaaggactatagtattgaaacactccctggttatttgcagcaagtaagcatgaggaatttgttcgtggactgcagctttgagcttcttagttccatagccatgggagatacaggtcctgagtggaacaagatcagccatatccagcaagtgaaggctaattcagatgatggatacgatgaaacgatgtggtatgtctcctacacaagagatccctacagcttcgagacaaacatcatcccttcgtccaatcccagtggtatattttttttcttgggcttctgctcctttagtttctttcacatattttcctcatgttgattccatctttcatgtgcatatcatagtgcaaactaatgtccttctgtttgtttag

SEQ ID NO: 10422 - DNA, 774 bp, Oryza sativa
attttttttttcccccgccgccgccacggaaaaagagagatatttttccccccccccaaggaaaggattttcttgagcaaaacccaatggcaaagtcatcgtaattgtaataacttattcgcctcttgcgtttcgtgaaagtaccacctttatgctgctacaaggtacctacaaacagtccattagttctcaggaccacgtctaccattttattatcagacatcacgattggtgttcatttgtttcaggttgctacttgaaaccaaatatcgcagattgcttgttgttgatagcactggtaaattggtgagttgatctgcctttccttccttccgctttcgtttcagtagtatctagtcttaagtaaagtttcttttctcaaggttgggatgatcacaagggggactgttgtcagagctgccctcaaaataaagaagacagctgaagaaactgcttaaattagacagtgtagatgattctttataagtcatttctgggactgcagtcacttggaaatttagtccactgaaacattatttggtgaaatgaactacatcagccttacagatactgcgaattcgacagtcaattcttcttggaacatagatggatataggtattgtattgttgcagatatttggaatatagccgcaatctgtttggggccaccagatttggtcgcctctccttattaggtagcataacatggagaatgttattatttttatttttacttttatcattgacttgtattcaagaacatcagtgtattga

SEQ ID NO: 10423 - DNA, 2782 bp, Oryza sativa
  unsure (1)..(2782): unsure at all n locations
gaaaccccaacttatcgtgtgtattcattcctatttgcaattcagattgcttttatcttgttcttgcttgtttcttcgatttgcttgtaggaatagggttgatcagcaccggcaagatcaatacccacggagaggtgtatcgatcgcaaaggcgcaacacaacaacgtcttgtacggttgtagtcgggtcgtcaacgtttctcccaaatcgtagttatcatcaactcaccgaaaaatcgggccaacaacagccttgagtgtcgagtggaactcagggttaatcacctattcctgcaagcaaatcgaagaaacaagcaagaacaagataaaagcaatctgaattgcaaataggaatgaatacacacgataagttggggtttcgaatacaagcagacggacgatctagccgacacgcgcgctacaaggaagtagcaatggctaaactttcatctaaacaaaacccaagcaaccctgaaggggtacctagctacttataggggtgggagaatgaccaaganggtcatagggtcgtgctccaccagattgtggtgcaccccacatgggccccacttgggccagggtcccaaacgaagttacaaggccaaaggcccatgacaggtgacgcagaaccttgtttcttaatatgcgaatggcttggatggaatttggcgatgaggctagatccgttggaaagaggactccgagagctttccatcaagtactcacgggccgaaaacggaggtcgtacgcagattcgggggccgtttgaattcagcagtgtagcaggtggccgaatttgattccagcacttggaggacttgatcttgatatcatcttgttcttccatgatgtgagcaatggttgtatctgtagtagccatggtcactgatggaaatcaggtggcacatgctttattgggggttaacgtcttactaatattttacatataaatagttgcttgtgcaaccctaaataattcttcatccatcatcattttctgtccatccaccgccactaccattgttgccaccacctccgccatccccatcatccaacctcaatctcacacattattagctttatcatcgccagccttttttctaccttctccatttctatttgagtttttctgaccatatcttgccatttttgcatcggcttggcttactatccttctacatgtatctatggcgagggtgatcacaattcacacacatcctcagttttcgccattgccgccgctgcaacatgagagatttggtcaatataattttagcaagtagatcactatccttttgtggttttgtttatttgggaaggtaggtatggtgtcacgccccaattttcgttcgggattgaaatcatcgacaaggcctcgatatcacacatgggtaccattcgtcctcgctagaagatgaatatcagaggacgaggatgaagaactagatgaagaacacatggtggcggttgtggtttcttgtttggttgtagagtagatgaatggaaggtctttgtacatggtgttggttgtgcgattctttcaactatgaacataggagatgctagcggcatgatgcttgatgcatagtagtactactgttctatctcgagagtgatacggcaacggtctctgtatagacaacactaaaactaggactaggagtagtatattagtatgcccttcgtccaaaaaaaatcacaggataaatcacataacaagtttagccttggattgcttaccaaaatttttggcaagagtggctaggctagtgtttggttgctaccatagagtattcctccatggactttgccaaaatcaatcaaaccaaaaaactggcaacgccaaaattttgggtacaaacccaataagttacaaaatttttggcagcaccaatattttggtatggttgagtttggcaaagagccaaacacaccgtatgatttaatatgacgtcttccctctttgaattgggttctaacacaatttgatttgtagctctaaactgaaaagtgtgtgtttggtgttttctgttcctatctatccagtcaactaagaacgtgcatattttgtaatgcagcaattggatggagcaatggaggacacaccaatcaaaaatagcatgccaatcgtagagatgcatgaggtacctgctgaggctgaacccacagttgaggacatgcaggaggcgctcttccagaagcagaaggaagaacagctccagctgcagctgtttcaacaggaagaggaactggaagaccaacagcctcaggtggttcgctctctttcatttaatttgatgcattcatttcttgatgatcatccaattctcatgcttcatcttaccatcaactggttgctgggggtctaatcgtgttatctctttttttagtaaaagctctctatatgttgaaatgatcacaactatcataataaacattttggttttttagttctaatatattgtgcatatttgtagttctagtaactatttttggtatcagagagtttcttttataatacattgtgatgtgtagttagtaaatacatatgtaatattgcataatcatcaaaattttatatttccattgcaccaaaattgacccctcttaaggtctgaaagttttcaaaacgaaaatcaaatgatccgaatcgaattgcctcaacttgataatctgcttccacccacccaactctgtgtgtgtcacacacacacacacaaaaacaaacaaacaatgtgcccacacaacaccgaacggcaacacgtgtcaacacatacaaaca

SEQ ID NO: 10424 - DNA, 5963 bp, Oryza sativa
  unsure (1)..(5963): unsure at all n locations
ccaaatcaacagcttccttaacaacatctacttactgctgctgctttttttttttttttggggggggggggctatatattcatcttttttcctctttttttgctggactacacaacaccgctcccatcccaaatagtactctatttaattagtgctttgttgctgctgttgttattgttgtgtgctcatctcaaattagtgcttcttctcaaatctcaaccatatgtgtacctttcttccttttctcttggaatttcatgaagctgtctgtattcctctaactgaaatatctattccttttcttttgtgtgagtgggaggaatatctattcattgtttcccaaaaattcgtcataaatgattttcccattaattctccaaactgatttattttacttcgaatatattcatacatactgtataggagtatgctaggagtatacatggatgaactataaagtttcaaattaatcattattaatttctgatgagatgcaccatcttcctccttcagcacaacaacggagtctacacagttggtgacttcatgaccaaaaggcctaatctccatgtcgttacacctgcaacctcggttgatgaaggtactaccttcttctctacttctataatatgaagtatgtcctaactatgcttgctgctaaaccaaatcgccaacttattattctgttcgtttttacagctctcgagacgctggtgcaacacaagatctctggtttccctgttgttgatgacaccggaaagttggttagtgcccatcaaaacttcactctattcaatctttttctacttactctctgcaatttttattctcaaaacagttatgcttacaagtcaacaacgttgggcttttctcaaggggaaatgatttattgctaaatagttatctcagtaacatgattctaggatattttctttctcaaacacggtttcaaactttatacctttttacatgctaaattcgaactagtatggtgattctacctaaaggatttagagatcttggaatgctcacatctagaatgtagtgctgattcataaaacggtgtccttgtccccatgacatgcgggccttttgatctcctctattatgttgtgtcttaagaaacattacattgacattatggttgaattgtatctgatttctcattctgccactcaatcttacttccacctgcaggtgggtgttgtctcagattatgatctgttagcacttgactcaatatcaggtattccttcttggaccttcaaatcacttgcttacaacaaattcatattactagtacaatattgcatcctctaaactgcataagcctagtatttgtcattaacacaccattgcactaccatctaaccatctgcttgcagtcatacatggtggtcatttgtcaatatcttgatagcctgataggcaggatcacaactagaaagaaccataagtagtggcggcttggaccatataatcttttgcatacctacaaccaaaccttgtttaaaccatagcaaccataactttgatctgaaattctgaatgcaacaaaagctttgcccacactgcaacttttctggaactctaagctgcaaagattaacttgagctatttaacttattttttgaaagtatactgttgggtagtaaatgccataatccttgtattcttacattggtggtattttaaatccattctttcaggaagtggactgactggcacaaacacaagcatgtttcctgaggtggatagtacttggaaggtatgttctaataaagatagaatgttacatgtttttttatatatattttctagctatgcaccattttcttagattgggttatctttaccacctactgccaggtgttaggatggaatggtctggtttggaataaaagcaatttttaatcatggaaaatccccagtttctatattcagaagcaatgatcctccttaaataaaatgttcccaccacaaagaaccttcacatgttatgacaaaatgctgtttgactaaataataaagtagaagtgtaccttgcatagtggctgatgtaatggactgtgttaggtccagcaaattgtcacttgttttccctatcaagaatgttgttacctctcaacttaggatgcttagtcagtattgggttaaatactaaatcccgtataccttacatatattttgtaacagtatttaccacccattttgtagcacaccccagtaatgatctttaaaatcttggtattcttcactcttcatgcattagtctgaaccacaatttagtacttcaatttggtaaatatattgtttctagcatttaaataaataattagtcatgctccacatattgtttgtagtagcagatcttttttttttatctttatcaattattttttatttcacacgttaatatattagactcattacgatcgctgtacagacatttcgcgagatacagagactcttgagcaaaaccaatggcaaagtcatcgctgatgtgatgacttattcgcctcttgcggttcgtgaaagtaccaaccttgatgctgctacaaggtacctacaaacagtccattagttctcaggaccacgtctaccaatttattatcagacatcacgattggtgttcatttgtttcaggttgctacttgaaaccaaatatcgcagattgcctgttgttgatagcactggtaaattggtgagttgatctgcctttccttccttccgctttcgtttcagtagtatctagtcttaagtaaagtttcttttctcaaggttgggatgatcacaagggggactgttgtcagagctgccctcaaaataaagaagacagctgaagaaactgcttaaattagacagtgtagatgattctttataagtcatttctgggactgcagtcacttggaaatttagtccactgaaacattatttggtgaaatgaactacatcagccttacnagatactggcgaaanattntncgtcnacaggtnnncaattctttctttggnaannncatagnnatgngnanntataggtnnattgtattgttgcangatnnatttggnnaatatagncncnngcaatgcttgnntttgggnnngccaccagatttggtcgcctctccttattaggtagcataacatggagaatgttattatttttatttttacttttatcattgacttgtattcaagaacatcagtgtattgaaatgtaacacttctgatatgatgataccttccgcatctgggttgaagtgaaaatattttccaatgtttagattatacaacgaacaaggttgtaaaaggtaaatttataagttagagcctacgtttaatttcatcatggtagttgtgtagtttttgagaatgaagttgaaaaagattatatgtttgtcagcatacgaagtaaaggccaccccttttgcgtcactgacgttctttaaaaaagaaaagaaaggttgtaagatcttctaagtatatttttggggtttatgttagtttgatagtttctaaaactgataagtcatcctcttgacttttgtaacaattcaatttactcctaaactataatactagacatttgacacccatccatgttcatgctacgtcgagatccttgatcatctactcgactgtttgacgccaccgtcatctttccgaacatgtgccatcgtggcttagggctcatggtgcttctagactcgtagtcggtaagattagattcttagtgagcaatgaactcatttacgaagggaccctacctccaatggtaagataccgaaaataaatttgataaaaagatgggtgcagtagttgatgcctatcgcaaaagtagggaaggggagggttagtcatttaaaatcagacgttaccctttttatgataatttgtttatagtggtgaaaaaataattcttgaaccagggtgaaaatcattgactaagttattaggtttgtcacatagtgatggtgtgatatgacacctcatactaataaaatatgttttaatagtactggttgtaaatgacttgtatgtttaatatgtgtttcatacttttaatagtaacaaccatggtaattgtgtagttttttactcttttgatttattttgctgaagttccactaggaaacaatgaagttggacgagattataagtttgtcagcatgtgaagcaaagaccacccttttataaaataaaaggttgtaaaatcttccaagtatttttttgagggtttacattagtttctaaaactgacatgcaatcccagtcactcttaaccactataacacagtttaactccacatacacggtacatccaaatacattcataacagtacatttataattgtctggtaatcatgtgcaatttaccccaatcccttgacttttgtgataatccaatttatcccctaaacaataataccatacatttggcatccaaccatgtccatgctacggcaagatcctttgtcatccactcgacagcttgatgccaccatcctcttccgaaaccgtgccatcatagcatagtgcttatgctggttctagatttgtagtcaataagactataatcgtaatcatagttaccaaggagctaatttacggaggaaccctatttccaagagtaagatgttgaagatgaagtcgatcgaataggcaggtgcaatagttgatgtctattgcaattctcaaaagtggatggagggagagttgtttaaaattggatgttacccttttcataataatttgtttatagtggtggaaaaataattatataaccaaggtgaaaaacattacggctaagctagctaatggatttgtcatgtagcgatgatgtgatatggcacttcatactaataaaacatgttttaatagtatctagctatgcttataatttagtatgtttgtcatacttttgttgttttcatatttattttaatttcaactgggccatacaagtgatattgttcaatccaaatcaataatcttttatgacgatatcaacgaagtaacataagacaatgcatttaagagctccttgtaaggctcgaacaacaaatggtaacaaatcaaattgaaaattttcaatataacaatattggtaaagacaatccattaagattgcgaataaccaacaacatattataagtttatgtggcatttttagtcggactaactctaacatatttttatctagtttcacgctaatagtgttgcctaaacatgatagctcgatagaaagaaaatataataaatttgctcgtacattggtccgttttagtctacccactctatttgtggttaagtgacatgattaaaatgttacacaaatttatataagtaggtataattcaactagttaggttccttgtggtagaaccgatccacttaggttcaagttctagatagacttgacacgagtgtttatatttttggctaattattctttcattaagtggtagacgacttactatgtgaggctgtattcgggagcgccacagaaaactatatatatgcattaacacatgattaattaaatattagctaattccttttttaaaaaatagattaatatgattttttgaaacaactttcgtatagaaaattaataaaaatgtatcgtttagttgtttgaaaaacgtgcacacggataacgagtgtaagcgcgcggtgaatccatacgcttgcgctgtgtttcttacaaagaaaaataactagaaaaaatgcccgtgcgttgtaacaggtgaagtctattttaatcttattattgttatatggtttagttaagataaaattcaccgtgggagttcgcttggatatatatatttttagaaaatcatgagctacagttaggagtccgattgtctcaagttagcatgcgagttttttaaaaaaagattcttatatgtttccttccgtattaccaaaagtaaacgatcttaaaatcgactcaa

SEQ ID NO: 10425 - DNA, 15418 bp, Oryza sativa
gtcatctattaaaaaacggagggagtagctgatctattgtattagttggttttttattaactgtaaaatgatatagatattattggagccagcagctgactacactattaatccaatccttctaagagctttctcttaggacaaaattatttttaatagtccttttgcatttttttccataaacacccaaacaattactagttttccaaggaagatcgaatggaacattactcgatcagttttcatctttacttgtttcttcttcttttttgagataagtttttcatctttacttaccatgtcgttatgtatgttatcgtaggcatcaacgatgtgtcgcacagaaaaaagaaggagaggcccagggcacgcctgcctgggcatcatgccaagagacgccaagcccggtcttggccgggctggcaacgacggtgttttgagcgtcgctttccctcatgagggcattgacgtgatgccccattgcctctaaggggtttgccgggtgaaaacccagtctcgattctcctttcagacctcgacgtgtttccgtcacggtagcggtgtttccgtcgctcctctccctaaggacatcatctaggagactcctagacgaaacccctagatctcagtcctcttgtgtcgacgccctagattatacaagttggccatgtcggaggtcctagagggagaacggttccatcttctctctcaccctctctccctcaatcatggatacagtacagttcagtgttagttggtagggttgggttttgggcctcctggttgcagtccctttgttggcctagcggcggctggttcggtgctagccttctactaatactgtgtcggtgatatgggcctgggggtacctggactaaggggaaggaagcctttcccttcgctacgcgcccgggtggcccggacccctcccccctccccgggggatcgggcactcggccaatgagtagccaaaaagcggctgcgcattcctggggggctcggggtacctcgtcgtacccctcgggcccaagggactgagtcacccccgaggcccttgctcggctaccacgtggcggccacatggaggcttgagcgggcgagggcaccgcctgccagccgcatttatgggcggcgctccaagcgccctcccccctcacatttaatgcgacgtggcaggttgcacaccgcccgccgatagaagtgcgccaggcgaccgtttcttgaccggtctgcgacccggcgatggatggatgggatagtcagcagcgcacccacgccccaccttgtgtcaggcggcgtgggggctggtatgccccgtcccatcatctgtagagaataggcgtgcaggtcggtactccccacgcgcgtgagcccacgaagtcatcaagaagttattgtggaatgacgggggatgtcccctatgtcagacggaggatttcggtgggggccacctgaaagcagccgcatgaatcgcttccgatccaaggcacggaatgcctttcgctaccagcatgtgggcccctctctcaggaggagagcgtaggagcagtgcatgtggtatccccttcatcaataaaaggaggaccttgccctacgagcaaggggatgactcttgatagatcggattctaggaaaaggccagcgaagccctagctagttctcccaggatccgagttctctgtaaccattcggaaatcaatgcacacacaggagtagggtattacgctccatagcggcccgaacctggataatccctttctctcgtttccttcaccatccaccttgaaaacttgatttccactgacatactccctcacacaagaacgcgctcttcagctcttgcacccggtcccccggccgaactcacaaaggggggggggggtctcatggcctcctgctagagaggatcaccccttgacagactgtgtgttggagctatcggtgagcggatggtggattttttctttgtttttctggttacgacacttcaggattgtaatcttgtaattttttcctggtggattttttctttgttttcctggatacgacacttcaggattgtaatcttgtaattttttcctgctctatctacatgaacttcgcactgtctggttgtgggtcgttaaaaaaaagttgtggtcggctagtggcatggcgtgacggtgagcgaggtcgatgtgtatcctgggtcatgtatttcaatagatttggggatcaaactatttcagttcctggttatgtgctgtcgaattataaccttgcttttgtcacgtcccaaaatgaccttaaaatatatcctgtaaattatgcctagaataattaaaatccgtgtgaaagcctccaacaattaaaatgtgcaaagtaaaagtcaaataaggcttaggggatttttttatatttcctaaaggcctaaaatgtgtaaataaattttagtggaattttcagagcacaaataataattattaagaaataaaccaagttgaaaaaggttttataaaaagaaaaaccctaaaaaccctccctccctctcttgggccggctcggcccactctcctccccctctctcctcttcccccgcggcccactcggcccctccccgcgcgcgcgccgctgacgggcgggcccgcccgccaccctcgctgatgggtggggcccacccgtcatctccttcctcctgccgctcccgccgcctcgcccgcgcctagcgccgccgcaaccgccgaatccgccgcaccccgccgtccccgcgtgcaataaagtgaggggaaatactccccgtgatcccctctccctttccccccatttttccctctctctctcgcattcaaacggccggatttgctcccgcaaatctcgccggcgccattgatggcggccggacctcccggccggtttccttcctctcccggccgccctctcccccttccaatcctatttaaaccctccccgcgcctccctcgcccgtttccgccccttgccgcaccgtctcctcgccggaatcgagctcgcgccgtcgccctctctctcctccgtcgctgacgaccttcggccggctctctccgctcgccgggaccgtttcccgccccggcgtcgcctcctccggcttcgccgcaccgtcgccgtccccgtccaccccctcgtcgagctcgccgaccgccgaagcgccgccgtccccgtcgacccgagccgcgccgccgccttcctcctctccggccgcctttttcgtcgtcgccgtcgacctagggtgagccgtggaccgccacctcgtttccccctttcccttccctctctcggccgccgctccgccgtgcctatggccgccgccgacgaccataggggcgcgggcgcgccgcctcccgccggccgcgccgacgtggccgccttcgggcgcgccgagcggctgccgcgtggggcccggccgtcagccgcccgcgccctcgggtgcggctgacgcttggggcccacggcgccggccggtgtgagcctgggtgcacccggtccaccgtggaccgtgaggctgccgcgtgggccccactcccgtggactcggtccgcgcgccctctcccctcggctgacgcaataaaccatttttaaattaaaatttaaatgaagaaattcgtaaatattcatttaaagagcatataaacttcaaatggccataacttggccatttgaactcggaattggaccgttcaagtctctaattttcccttaagaagtcaagaacccatttttgtgctttgttcctgcttgttatatggagtttattagagtaaaagcctttttcctttctgctagtcgtgtagacgctgcagcttcggaagatccgctctacgtggaggttgaagccgacgtgtgggaaagcgagcaaggcaagtcacatcatccttgaacatattgaatcccagtttataaaattattttgatttaaattattgcattatcgctttatttaaattcccgcgttatcattgttttatttagccatgcctatttgcctttgttatgaccttattattattgctattgttattattaccttgttcaccctagaataaacaaaaccccagctagtgggtactctatttatggtaccactagtatgaatttaagtagatgcttcgctgcttaattaggcaacattaggtggttttacaactctagactttgggaatattcatatcacctggacactatggaatggttggattattgtggaattggactcacacctccccctctattcaaaatcctcaaaatggttttaggctgggctcggggtgcatggttttgatagtagcacctcggccacataaggaccggtcttcgggcctctgttgcaaagcactaccgtacttccacatgtctagtgggtaaggcttagtttgtggctcagtctggttataaacaaaagtacacggatggagatggatgaagtcgggggtcgatggacatctctagggcaaatgaaggctacacgagctgcggcccggtagtcgagatgtcatggcacagggctggtgtcctgctgctaggggctcagtcctgcctacctgtcccggaggttctggccgtaggtggggttgggtcggtactcttgtctatggctaggatgggttggaaactatgtcatgtcttccgtccgtatgccgtggtggtatgtggcacgtggttacacgtgaggaagacatatcttgtgggtaaagatgtacacctctgatcagagtataacctattcgaatagccgcgccctcggttatgggcaagcctagcaatgtacccaagttagtgttttaattcttaaaacctgcttaacaactaaaatgtggaatggttggcctgggttggcttgggacgagctgggacccagggtcgggttgccagttcggtctgaatcatcgtaggccttgggttaaggcaggttcatgtgggttcatggccttgattaataatcttgtatagctctaggatcgtgtttaccaaatcgctttgggcaactaagtgacttttaaatactgtttactgcaaaacttaacccctatattataactcccttgtactcccttgcatttattctgcacttgtgggtgtgtcttgttgagtacggtggttgtactcagtcttgctcaatttttcccaaacccagaagaggagttcctggaagatgaaggctttggtgtctagctcgtgcctgccgtcatgcgcctgtggtcatcgccctagtcttctgctgtttttcgtttgtctcttgtgtgctgggccttcgccgcccatgtaataaattatctagttacgcttccgcttgttaaactctgtattgtatcaacttttggtgtaacttgcctcctgggacaaggaataatacacgcacgtaaggaacgcccgttgggttatttccggtcgtgacagctttttatgtacttagaaattaaattgttaattcatgagttatcgtgtatttttgagagttaatattttgtatgtcgtgtttaaatgtggattactaagagcctgtttggttggtgccctcacctccgtgcctgagaaatttgtaagcctgagtggcattcaagtttgtaatgtaggctacctggtcaggcagcttgagcctgtgcttgtttggttgtcacttgtgcctgagaaaaaaaattcaattagatgtttgattattatgccgctaagtcaagtattaatatccgacacaaatttttgcatttaattgcatctgacctacaaccaaattcatctagtgcaacagatccctacacaaatcaatcataaaacaaagaaaggaaaaaataatctaaaaacaagggggaacaaacaagggaaaaaggaaaaaaaagaaagcaaagattgcacccagattgtaaagtcgatctgcttactcaaccacgggcggaagaaatccttgcctgacgacacgatgcctccgcacgacggcggcactgctttgcgtagacaccaggatcaacaaggaaatcatcaagaagagaaaaaagagagaagaacaggagcaaagagatccccagatccatgtcgcatccatcagaatagaattgcaaaatccatgcatccatcatagaagagcatctgcatgtgaagcatgacgcagcactccggaggggtcttcgtgtggctgcgatggcttcgtgcgacggcaacggcggcggcctcggcagcttcgtgtgaagttatcacggcggggatgaggggattatggtgctaatgtgtagcgcgctgctgcgtctgaagcctaggcgaccgattttggtcgtctggctcaggctaattccgcgcctgagttacatcaggccaggcgaggtggaaggagccttagggtagcaaccaaacactcacaaattagtcttaggcatgtctccagccaggcaacttgttgtcagggcagcaaccaaacaagctctaaactactcaagcaaagcaaaagtggcaacatgatgcaatacaaggattacatgtgcaaattatatatatatatatatatatatatatatatatatatagatacaatccctagggtgttagatcacattgtcatcaaagagctcctcgacgtatcatggagaaggaagtatgcatacgtttgtttgcttactaaaaacaaagggcctaaggatcgccaaccagcgccaatgatggttgtgtgtgtttacgtggatagatcaaaaaccacttttgtgctaggggaagaactcgattatccgtgcacttacggataaaaacaaaaagcgtaaggatcttttacatcaaccgataggttgcatggataaaaacataaagcgtaaggatcctttacaccagccgataaggtgctagcttagagatgtgtgtgtgttggaggaccacaacctcctctaggataagggaaggaacaaataggagatgaatgatttaagactaccaccccgttcatactcataaaatagaaaaaaattgccccaaaaagaaaagaaaaggcccttgttcattatgaaattatttatgacagaaaaaatggtgtgaggcaggcggacccaaaagtgaggcatggcgctgcatttgatagcagaggcatgagttccggaggtgggggttctctttcggttaccctatttgggttgtcgagttttggagtttggaggggtgaagaggaaactttccgttttaggcgccgtcttcctccgctctttgcaatgccccggcagcgtcccaagaagggggagcgccggatcgacgccgccatcgaccacttcacccccatgggctacgccaccgccgacgtccgtgccgtcgtcaaggaactcctccaggtcgtcagctcaatccctcctccctcctgatctctccgtcaccacaggcccggggtttctttcctcttttctttttttgttcgattgttcttgggaccaagaaccgcggaaatggtgatcaaaattccacatttgctgtgttcttggaggtgtccagatgcaacaaattaaagctcgcgcctttccttgcttctaggccctgttgatcgatcgacaagctagcttagcattcttggtgatttctgttcgtgtgtcgtggtgtgagcaggtgtacggggggaacgacgggtggccgttcctggaggaagactcgtaccgcgtcgtgcaggaggcgctcttcgagaagcaggagcaggaggatcaccaacagcagcctcaccctcatccacaggtgctgctgctgctttacttccttctactattcatctctctcttgatgatcatcctattcattcatgtcctctatttccacttctggctgtcaactatttttatatttgctactacttacgactaccaaagaatttcttcttttttaatacattacaatgtccgcgtactcatcaatacatatatgcaacaatccacattcatcaaaaaactttatttttctgctctaccaatagtaacattatatccagcaagttcatcttcaattcttaacattatccaactattcctgttctaaaaaaccggtatatcctgttgcaatttctgaaaaaaaaaaggcaaggggaatccaacctaattagtgctttgcacccaaatttccaataatatataggtggttttacaccttgttctaaatcggttttgtttagtagttttgatggtaacagtaatactatgacatgggcacaatgtatctgtttgattcaagggttgattggatccatgccattataaatatgtcgattcagaaaaatgccacgaccactatgatcctacagccactacaatttatctatttgtagttgtgctaccgaaattctacaaaattggaactgtacaatcgctgtcacgttttccatccatctcttcctttttttttccgttttctttccttctttctcccatcgtcttcccgcaccgatgagtggcgggaccggtaagcgacagggtgtgaggcgggaccgcagcagggcatgaggcggcaagggcggatatagtcataggtgatgcagcagtcccactccttgcacgctcgagcatggtggcgacgaactcggtatgcagcttcacgtcgaagagggagccgaagtagatgagcgcaagtagatcctcaacagaggaattagcgccggaggaggaaggaaggcgcgacggtggatggggaaggggcggggtgggaggagagctcctcggcgagtgcggcggcgagcggggtgcgcatccactcgtcaatgagcatgacgacaacgggcttggatcagagcacctcctcatgctccttgttcagcttcctcccgttggtgagcgattcctccatttggaggatctttttgtgcttcttccacagtgcgtggagccgttttgagacaacactaaggattggcccgtcgatggcctcagccgccgcagccaccacggcaggggccgaggaggagctggtggaagaggtagccatgggtagggttttgggatttgagcttggagatggaacgacgagggtagggaagaagggcaatcggctgaggccatggggtccacgcggagctccatcgccggtggtgtcgcctcgcctcaactccatccagatctggtgagagggatagattctctcctaccctttccccttccctttttgccaccgccaccaccgaaccgccgaggtcccgccgtcgctcgtaggtcccaccgccactcgcggctcgtcagtgcaggaagaagacgggagaacgaaggaagaaaatggaaaataagaagagatggatgtaaaacgtgaaggcagtggcaccgttccaaatttgtaaaatttcagtggcacggctacgactagacgaattgtagtggtatttttctgaatcaacatatttgtagtggcatggatccaattaacccttgattcaatcattattacagtgaccaagttttagtagatgatttgaggtctcctagttattgaacatcatgaatttcacttcgaattctgggcctcgatgagcttgatctgtatttttttaaaaaaaaaattgcttcatagctgcacctgctgctgccatttttttgttctcagaacatgcccctttctctgttgcaacttgcaaacatagatcgttcaggctcttcattttccagacccacccttagtttttcagtcacccactgctgccaaagacatctagttctcagtgtgaagtgccttatttgataatttgagaactaatcattacgatttgatatgacgttcttccagttcgaattaggtgctgatacaactcgatttgtagctctagactgaaaattgcttgttccacggtttctgaaaattacaatcaatgcgtagtgtgcaattattaaaaggtattggcgtgtaatgcagcaattggaggaggcaccattggaagacaagagcatgtcaatcatagaggtgcacaatgtgatgcctgctgagactgaacaacaagtcgaggacgcggaccccatgcttgttgacctgcctgcagttgaagcaactctgccccttcctgaagccaaagtaacatatggcacaaggaggccctgttatgggtggatcgaagagtacgaaagtgaatccgataacgaggaacagcctgccagattgatttgtaagaggaagcgtccgagtagatgggatgttaaacccatcaactggtgagttctcgacatctgatatcagctgagcatacagtattgtaattcaagaggttatgaactaatttggacaagctccttagttgcctaatataacctcttattgcagttacaacttacaatttacaagcatgtcagtaaggtttataagcatctttagccacgtctgcagctagcatctgatcttaagtcctaactaggctgttaagatcctggattgtgattagatagttgtgacgagtgatgcatgataatttcggacaggcaaaatcacgtagcaatgtgctgctgaaataagtttgtggtgatcaatctgtgacactttagaagcactgcacacttttaatgctggctagtactattcagtaagacctgaactgtaggtgttccatttttttttcctatgggttggtattgtaaggtactgcctccgtttcaggttataagactttctagcattgcccacatttatatagatgttaatgaatctaggcacacatatgtgactagattcattaacatatatacgaatgtgggcaatgctagaaagttttataatatgaaacggaggaagtagttgtttcaaaatttcatagatagatgtgatgtgcagtttgtgtggaagaaatactactgatctttcactgtgcgtgttccattgttttgtcttcccacttgtgtggggtttaattttataaattagagctgagaactaacctttgccaatccctttgtaagcttgtatggattgtgaacgaaccaaatgaaacttcagtcgcattcctattgtaaccactaatcgcctcttgttgtttctaacagattatctgaaaaggaggtgacaaggcaatgtggctgcacaggtggtatgcttaacccttgtttttgaggcattctggatgtgctgatttttcataagttttgtattgtacacagcagtaacagtggaagtattgatgcaatgtagagactttaggttatgcatggttgcatgccaattaatttgcatgatggtgtatgcagacagagacatgatggttgatgtatgcagaatctattcaagtactaatgtggatttttcattgatgccttcataaatcatactacctccgtttcaaaatataaggaattttggacggatgagacatttcctaaaactataaatctggacataaatcataatgttatttggttttcctggctggatgttgtttgcataacctagccgtggcacatgctttgagctgtgccttagacagaatgatctgttgaccgtaaagcataataccaatacagcaggagaagaatgattgttttcttaagcttgagatagttatgccatagaacaattttctgttttcttaaagctttataatttttctgtgcatttggtttgatggagtgtgaatgtgtgatagcacgaaagccctatttcacccaaacgcccgagcaaagatagcacgcgggttcggaacttgaatgacaaacatggatgctgaaattgccctctgaactctgaaccagaaaaacaaaaacttggacaattctttgaaatcagacaaggatttgagtcttgtgaaggcaacagtgattctttatgttgggccaaaacgcataaattccgttgccgggactcgaacccgggtctctcgggtgagagccgagtatcctaaccagctagactacaacggattatgacacaataattttgtgttagaataattcctcagaaattggcatcttttcacgttattaccgacaaatgactgtatcagtcgactgcaacaagaaaatagctaagattggcagaaacagactagcttagttttacatcgttagctcaatcgaccccgtgtctgtgttttattatactattgtcaaaaacatatgaacattgttagctcactattcgcagcgaaaatgcggatcaaacataaagtagcggtttctagtatgttttaataaatagttatgcacacttgaacaggttggcacatgttaccaatgaaaaacacaaaacgttgctgtagatgctgaaattctaagcaacagtcgctgttggctgtttgccatcgaagttcagagtctttagatagacgtcgacacaaactgctctctatttagtcaaagcatcaacagcacagaatacacaattggccaaaatataggggcacaagttgctgtagtacatcaatagactcctaacacaaaccaaaccaatgtaatcttagtgttgtatcaacaaaaaagaaaaaaggacaagaaaataagcactgcccaagcacccaaaatctcaactttcatcatcattcttgcaactatacccatgcaagatcacaaaagcacaccagaaaggactttacaagacgccatccttcgacagatttttccttatatgcagaaggacaacaagtatgacatctcaccagttgatgagtgctgaaacatgaagcattgtgctcagtcagtgctttcgcgaagaacggccactccctccctcgctcactcgctaaattttcatctctaacattcacactcactatataggcacaagaaatttacatccaaagacagtcaccctatgaacatatactttttttttttcgatcccgtggctaagtaaaatcgaagcacgaaggagatctcctggagcttttagctgcattgttacccttgtggaggtagttagctgtgtaaaccgtgtcagtccatgtggagacgaagaaaaaaaagaaaagaaaagcctttttcacatcactctttgaggtctatgaggaagaagctggggtctgggtcgagtccttgtcatcgtttcgtcactgtgtcgaatcatctcggacaatttccagggcttttgccacttccacttgaactgcagtagccactggtggtggcttcttttccatctccaaagttttcctgattgccctgctattgaaaccttcttgccaacaggcaactgtgccataggaaccatctgcattgtacgtcaccaattttaaatacgagagagggagatagaacaaagagtatttcaggggggtagagataccttaagatgttgtttgttgaatgcaggaacccctttgctggggctatttacaattccagcagagtacttcagctgcttctgtgcaggcaccgcaactggtgacaatggtgtgttggagtcatcagcagagtgcttcactgaaccatttccgtttccctgtaagatgcataaaatttccattaagaactatcacgatatttgttgaatatcttgtactcttgtgactatcagttagggattcaagtgactcaatgtttttttgtcagttccatctactataccctatgatatgttttcttcttttcgccctttcaagcagggcgtacgagagaatttgaacatgggtaatggagatgttaaataccctcctcaccaccagatatttgttttagatgtttaggtaatcctttcatcattcaacatttttttctactgaggggtaattgctgtgagctcatagaaaccatactggagatgtagtggcagttacagctgcctgctctctttgcttaagctgcttttccgtttcccttctacgtgattcgctgtgtcgaaggatggtcacaagctctgtcatttgctccttcatttccttgatctccatctctttctcccttacttggcatctgatatttcaacagtgaaggttagttccatacttttgtacaaatgatcatttttacagagtatcataaaaacggctttgcattgttcttccattcacattgttgtcatgctttcaggaagaaataaagttgccctttgagttcagaattttttttttgttattcctattttcaaatcagtaccacactcttttattcgaatcagtgccatattcttagcaaaataacacttacagattttcaactatttagaaagaaaaagtgagatttttagctctttagtaaaaataatttgtttccaggttctgcaaattgagaagtcctacaaggatggatgctaccatactattaaataatgaagccaaaagaataaataccaaccttgcatctgcagcaacgttaaatatatactgcagtaaactctttgcctctgccattgaacgcaactgattccaccgaccacgcccagagaatgcacgctctctttcttcagcttctgagagttgagaagccatagcaacgagagtatttgaagatattgtcaccatgctttcaagtgatgctatcctagcttgtcttgcatttggtgacaaagtatttgccctgagaaacaaaatgcagcaatacaagcataaatatttggatgtgctgattgcacattttgagaaaatatgagaaatataaaatacggacccaaatataacaaccagattacagacaaggacatattaaacggtgctcttatatttcttaaacagtttgtgataatatatggattaaagatactgtccagcttaaaggtacctgaactacaaaatagaactatggggataacagttacctagagtttccattcttccctctgggcggactagctgcaccagacatgacatcttcttgttttaaaatggcaagctcctcaccaagtgcagcacgcctttaaaaccatttaaattagtcatcataatcatgcattacatgaggaatgatctctataatttacatttgggaaggaaataaaatgaatcacatacaattgactttgcttttcatattcgtttcgaacttcatgaacatgcaccatgacttccaaatcttgctctagccatttttgcaatgatttctcagtcatctgcattacaaaaaaaagtattctcaaggatatttccaaataagcaactgatctttttctttaagtatggaaaataacttacatgagagccaggagaagtaccattcatgcctgatgtgtttggaagaaagcaaaaaaaaaaaaaaagaaaaagaaggaagagctgttagattgggagtattaattataatgcgaaaaatggtcgcaatgcggagagagatacctgagttgtcacgtcctgatgatttccgagcctctagtaactctttcagccttttggtagccatcgcagcttcttcagtcttcctctgcaaaacctgcataaagatgcaaaactttgatatttaatattttataaatagacatgataatatgagggaaaaacttacacgtaattatatagctaagtaagatatgaactttgacgaaaactatgtcagggcagctagttacacataaagtg

SEQ ID NO: 10426 - DNA, 37336 bp, Oryza sativa
tggggagagaaaaggcggcggcgctgctagggtttcgccccccgtgtcgccagcgcgtgggcaacgcggggggggggggggggtttcttttttagtagtaacacatcaaactctagaagggtgggcagtggattcaaatcatgctgtttagtttttcttttctgatttccattaaacattcatatttgaagtcagttcattacagaaattcagaacggcaagcatttcacagacaatttgaaaagaaacactacttttgattagcaaccactaccttttcttgatcttgactaccggcaaaagaagcatatgttgtgctttatgtgattacccagtgaataagcaaaaatttcaaagagagctagcttaacaaatactccctccgtattttaatgtatgacgtcgttgacttttcaaccaacatttgaccatttgttttattcaaaaattttgtacgaatatgaaaatatttatgtcctgcttaaagaacatttgatgacgaatcaagtcacaataaaataaatcataattacataattttttttgaataagacgaatggtcaaacgttggacaaaaagtcaacggtgtcatacattaaaatatggaggtagtacaatattgtgttaactacagatggacagatggtttacatattgtctgtttctgctctgtacaatatattttcttaaaccataatacaataattcatattcaatcctatctcatcaggaaatctgtaaggcaacttgatacaatgttaataccggtatatatagatcttggatgtgcacactgacaacacaaactagtcctaatgaaaaattcagacatctcaataactgactactgagaaagctaaaacaaatgcctgtgccaaagaatttaacattttttagcaagcaatgtttcttaaaatagtgaactaaaagtggctgctatatcactgttcacacctatgaatcaggaagattcagtggtatgtagatctgtatcacatagctatcgctgttaatatgattaaacatagataagaattaaagcagagaaagccatacttacactcattctccagcagataactccactggtatgctattccttcgctagcctcctttgaagaatcagaagtaaacactagcaacctgtggttctttgcaaccatatctgtgacacttggccagtcctttccattagttggcatttctgagatagggtaccaatatttcgtcaagtcagcagcagtaaacaatttgctcaatcccatcgttgaatggacgtaatcctcaatgaatattgttattatctctgtcggattctcagatagaaatgcttccacctctttcaatgtgtcaattgctggttgctaacataatatttcatttaaacattagttttagagtgtaaacagactgttagcaaagataacgatgaatagattccaaaaagcaaaacaataaccaactcatgtttactaaacttatccaatacaattgattacctcaaaggaaatcttattgaaaatgttgtccccaaatacaggagacgattggaataacaaagcaaccagtgcaggacttcttatctaaattgcacgcgcctttctttaatctttagcacaaatctattttaagaaacattcgatcttaaagcaactttggttagtaatgataaaggatagttttgtactgagacgaatttatccttgtccaacatttttagttgttagtccagcatagttccactgcctttagattttacatggcaagggcctttcaacttttagataagaagtgtgcaattacagatttacccacgctttggtagggtttgaagaagtaccaatgatgatcaggcagtaggccttgtaggggctaattaatgcgtgatgtcttctttctgacagagtatcggcattcaagactagattaagatagtgtttaggtatcagagctatctgacaagaaaacaggtagaagatgcacctcaattctacaacaagcatatactcaccagttttcaattgtgcagtttatagggctgggcaaaatttgagctgggcattcagaaaaatcttagcaaatccaactaactattgtttctccatatttccctctaaactaactacttttgctttaggatgcacaaagattttaaaataggtgtactgaactactgaagcaaggcccgcccgaattatatttgaatttggcttttcctaaatagatatgaaatggcacatatctagttctagtatgggcaatgaatagaacttacaaaagcagtgaagttgtagcattggccttgcaaggagtggcagagccagatatcatcattgaagtcatacatatccagcatcaatcccctcactccattctgcaaacacccaacatccaaagcaagaaatatactcatcctataacagttcacatatacaggagtaagtgaagaatctggtcagagatccagaagctaccctcaattggttagtgacagtgtcctcctggttgtagaacgtgaccctctcgactccggtgtgcgacggctcgcctatgatggagaaggagttgtgggtgaccagccatgagtagcggttgaagggcagtcccttcacctaaacaagcatggatgtaacaacagaacatgtgagatgagaaaaacttgttgcacaacaggagagaagctgcagaggaggagaagcgatgagaattagtacaatggaggtaggctggatcgccaggtctctgatgcaggacggccgggtcttgccggtggcggcgcaattgccgcagtagaggccggcgccgcagtcgcgcgccgacgagcacgaatccccaacctgcatacataaccaacgcatcaagaagtgctggaacagcagcagcggggcaggcagatcgaattgggcaaagaagtagtagctcgagcaacaaattgcgacaagaatcggatgaaagaagcggttaatcgggaggagtacctggcaggagcagggaagaagcagcagcagtgcgatgtggagcgcgaggagaaaggggaggcccgccattagagctcaccaaccactccctccctctccccggccgcccaagccacggcgctcggtgggtgggtgggtccggctcagccctcgtcggcgtctgcagcctcgcccgcctccgccgccgcggcgctcaattactgatgccggcgtcgcgtccagaggggtgaaggagggggtatttgttgcgggaggttctagggactcctactaaccatgttcatatgattatggaatattaagcatgtttgtgatgattgctaacttaatggccatttaataagttaagactctgtaaaggcttaaaaaagaaaaggaaaagggaaagggtaaagactgtgggaaggaaatgggatagctttcggggtaaaaaaacagtcagcgcactagtgtatttgggtcgtgtttttattcatgtcagtgaaggttttttttaaagtcacttgtaatcgtgtacgtgcaatgcacgtcatgaccaatatgaattaagtccagtgtaatacaattgtaagaatatattctatcaaaaaccaaatttacggtggtatattgtccaaagataggatggacattttaataagtcaatgtaagtgaacatgtggaatccacataggtaataaaacatacatctatagtgtaatatttaataaattataaatggaatcagttaagaaacaaataaataacaaatgtactctctgcattttaaatatatgatattgttggcttttggatatgacatttgaatatttgtctaattcaaaattttagcatgaatacgtaaagatataaatataagtcatgcttagaaggacttttaagcatgacttaactttacattgtttttttaataaaacaaatggtcaaatgtcatgtccaaaaatcaacaacattatatatttaaaaaggtggtggtaatttcatgcgtcaaggtgtgacatcattttttgatttttttttatctgccccattgagtactacaccattcagaaaaacttggtgtaaatacaaattgttgatgttgtgtacataatttctaactgtttcctatgtgaaaagcgcgcgcgggggggagggggggataaaactgaaggaaatgcaatttcttagaatttataaccgtctcctatgtggaaagggcgtaataaaactgaagggaataccttgctctggttttaaactgcttggattttttttatagctaatttatttgacatttgtaaacaggatcccattctctcactttatcccaaattttgcacagaacaaaatttagagctctgctagattgctacaaggtgcagaccacttcaacattggtaacacttgattaattacaacagctggagtattgcaatgatacaaaacaccaaatgagaaaagagcattaattttacataagccaatttgttgtacaaatcatcttcatcatgtattgcctttccaccaactgaatcatgcattcttcacttcgtggattactgcattggtatcctacatcatttgtgtcattgatctgagcaatggtcaatgaaatcaccatggaaagttgtttccatttcatttctttataatgagtttcctatgaaaacatggtcacagacttattgtgctgaaaacaacttttctcccttcctcacgttattgccttttgctcttgcaatctgtatttcttttagtctcaaacaatggaactcacaaatggatcatcttttatttcaaaaaattcatagaactatagcttgttatgacaggccgtcctagtaaactaatagtagttcaacttgtaactgcgcatatatctcacactgaagttaggatccaaattatagctagcagagcagaagaatgttgggctagctgtttatgggcaatcagctagcagagcagaagaatgttgggctagctgtttatgggcaatcaacacaatatgccgtatacatgttaactctcatatgttcccttctgacacgaaatgcatgaagttgaactgatcagttgaatgccattgattctgacaaccgtatcattagaagaaatatctacctagtagctacacaagaatgtatgcgcatatatataatgtaacaggaattctagtgataggaagtatatagcaaaacatgaatgtcagttcatcaaattgcataggtgagattcagtaatgcctcccaagccagatgacaggtacttttgctaagttacggttgatgggctgaggtatatagaaagacaaatatattctgcttacccagatcgccatagcccatggccttgcttagagcttgataatgtcatggcacttggaattagcaagatcatcaagtggagctcgttcctgtagagacattggtagttgagacttgagaataacctataaagagtatggatggacacataaatgtataaatatatattctgtaaatgataatagtatggttcagcattttcgtaaaaaaaatagtatggttctgcaacttgaaacaatgcatataatggtattcgagcaatgacaaacccctgaattcgtcagtccgcttacaattccagcaacatgacaatctgcaaggctagaaaaaaggggatccattattatttaaaacaacccatgacaacaaagtgctttacctttgccatacaaagtgcataattttgtggcttaatcaagttgaggcactaaataaaacagaagcccgccccagtcctcaacgcacaaaaacaatgtgaatgttagatcggagcaaacaaaactcaaagtaaagcaagcatgaagcaatggctgaaccaacatggaaggaagaatatatatgtggtctgagagtaccaaataacataatcaatgggtcacttgcagtttggccgacctggcttcaacaaaaaaaggaaaatcatggtacaggccaatgctcaaggaagaagattagggattagggacttgatgagggaccaaggcggagctccggcagagatccggcagagatccggcgaggatgcggcggagcggcggcagcggggaggaggaggcgcgagcgaagaggccggccgcgtcgatggggaggaagaaggacccggcggcggcggctccggagtggccgcggaggagcggtggcggcggcggctccggcgtggccgcggaggagcggggaggatctcctgccaggacgcggggaggaggaggagcgagcgaggaggagtcgaggagcgacgtcttcgcggcagcgggtggatgaggacggaggagcgatgtcttcggcgaatcggcgtgcaagccaaatcgtgcggtggaataagctgcgcctggatggacggtccagattagtccggatgatttggcctgtagcattggagcgggacaactcctcttttttatattatagtatatagatgatatatgtcgcctgtattgagcatcagggagagattagaacgagacattgggtaaatcatttccaatattagaatttatgattttaaacacaaattttgctccaactgtatctctaaacatctcctaaaaattaggcgttctcatcactgcgtctctcgctctcaaatcgatctgcgctttttccatttatctcagtgcttcttcccattgcgatcatgaaatgctacagccaggaacttccttgcgaagtcatccattgatgccgttgtactcatctccactgcaatcaatcataatagagttgcatatttcttaaaccccacaaccggttggcagctcccttcttctgaagagagccacgagtagcacactggggccgtaggactcgttgtcgctcaccagaccgttgttgtttccaccattgctatcgcatttgtcgaccatttcggacccaccggtgaggtaatcgacagacaacttgccaccaacgccgaggccgttgtcgatgtgcctaaaatccagttatatcgacttgcagtcgccatctaccaagttcatacaaaggcaaattatcctcaattttaaccaatctcttgaaggtatcaacatttttatatcttaaatcttgtttagggttctcatagaaaataatttgggtacaaaatatagagataatgttgatgatgctcttataaccacttctatttttttcgagactagcaaaatgcccatgcgttgcattgggtttttagataatggaatgaaacatcccggcctttactccgaagagctacaaccaattattataaaaagtaacacacttataaagtcttaattcaagataaaactatcaaaccaaccaaaattaaaagaaagacctaacatgacaaggaaaacattattccagcctattagaaaatctccatccatggttggcaaaaagttgtataaccgttgactcaagagtacgacatgcaacatttaggaaaactccatcttcctcacacttttatagttgagcccacagccgaagccaatatgttgccctgaaaattacctgcatataggaaacagatggtgatttgtcaaaaaccctatcatttctacataaccacagggcccaacataaagcagaggcaccaacaagtatcaactttctcttgtccttgtccacaccctgaagccaaccattaaacatatgaggcatgcttctaggaagatgtaatccaaaagaaaattgaacagctctccaaataaactttgcataatgacaatccataaacaagtgttggatcgtctcatttttcatgcaaaaacaacatgttaaacccccattccaattccgtcgtgcaagattatcctttcttaagacgactcccttgagcaaataccacataaagatcttgatcttaagcggcatcttaagcttccaaatgaacttatttctatcaatgtaaccattgctaattgaggctaagtacattgactttaccgaaaaatggccattttgatgataattccatctaaaacaatcagtagaatcatccaactggatatgagcaatggaagcacacaaattataccaaagtgttagattctgcccaactaaagctctcctaaaagaaacatttagcggaacagaacccataacactagcaatagaggcactcttccttctgacaatagcatataaagatggatacttatctttgaaggctatattacctagccatttatcatcccagaatcttatctgttaaccatcattcacaatccaagagcccatacttaagaagatgttttttaccttcataagccctgaccaaaaataagaatcaccttgtttcctatccacttgggttatagatttattatgaagatacttcctcttcaataaatcttgccaaacaccatcctcattaattaacttatataaccacttactcaatagacatttattttggatctctaaattatgaacacccaatccaccctggtctttgggttgacaaattatatcccatctagttagtctatattttttcttatggtcatccccttgccaaaagaaacatgatctataataatcaatcttatgaagaacccctttcggaatctcaaagaaagaaatcatgaacatagctaaacttgaaaggacagaattaatcaaaaccaatctacctccaacagacatatgtttacctttccaactactaagtttcctctctattctttgttcaataaccttccaatcattattactcaacttcctaaaatgcattggaattccaagatatttaacaggaaaagagtctagcttacaaccaaatatagaagaatattgatcaaggcactcttttgcctgcccaaaatagaatagctcacttttgtgaaaatttattttcaggccagatattttttcaaacacagataaaatcaatttcaagttctttgctggttgtaggtcatgttccaaaaaaattgatagaatcaagaagaaaataataattagtgtgtggaagcataaaaccaccaggttaattgaggtctttatagtcgaatcgaatctttccagtgcaaataagacgctaacatgatataattatttgctgctctaaatccactgacatggatactgaagtttgaaaccacaaaaaatatttactttttttgtcatgtattattatgagtcaattgcagtactttgttattttttggcactcgatattgataaacaatttttttcatactgtaaagagtagccataatccaagaaatatttttttgctagctatcagatcaacctcactgcactccaattgcataatcgctcactcaaataatcagaaggaaagaaaaaaatgtggtatatcgcagaataactttcactctaaataataaaagaaattataccatgaaggaaaaaaaagtgatgtgattaggtgtcctatgacgaatgagcaattgatgagggaaaaaatccagatgttaacacgattcattttgttggtgattatttgttttctttttaaaaaagaaagacacatgtgattattttttatattttaaaaaataatttattttatcggtaaataattcattttgttggtgactacatgtttacatttataaaattgcttttttttatccgattcctggttggcgtgagtccaaactttattcctgttccgttgctacagtgttgcgcagtactgtgctgggctgctgctgctcctccgctctgtgggctgcggctgctctctgggccggcctgctgttgctttggatgggctgactcgtcactaatccaatacggactgctttagatgggctgctcaacaaacaaggctttctcttttttttttctcctttatttgcgggcgtaagagatcgtggccacgctttcggattgtggattagcgacaaaatattgtgtggcccactctttaatgacggacgaaaagattaacaggaagcttttcttatttttttaatcttatactagcaaaaatgcccgtgcgttgcaacgggtaaaaaaaaaatccaattacaatatacacttttcatgcataaccatatcaatatatttgtatggatcgttgtaactaacataattagaaaattagaacatcttcatataatgacttaacctcgatgatggcaatcttaccaatacttgctttatctaaaataattggattattcatgtaacaacatgcatataatctagaatactctttcaatcttattcttgcaaccaataataggttaatcaaatcctacactctgggtcaagtctacacaaaatagtcaccgtgcacttttctctaaataacaattaaaaatatgtttattttttaatattatttccatataatatgttattaagaatagtatctatacttaacaaaaatagtccgataatcataattgcataccagagattagatgagatgaggaatcaaatgatgtgtaggagatagaaaaaaaatcgatggatcttatccgacccaagcatatatcaattttatctcgcattgagtcggacggtttttcggtttttcagagcggttctttatataaacagtggttttttttcttgtgttgagtcggatggttttctctgacttttttttagaaaagcggttttttttctcgcgttgagtcgaacggttttctcgaatcgtttttagaaacaacagttttggttttttctcacgttgagtctgattgttttttggatctgtttttttataaacggtgtttttttctggtagtttttttcagagcggcttgtttttttataaacggtgattttttcttgtgcggttttctcaaaccatttttagaaatggcgtatttctttctaaccgtttttaatatcttcttttttttttttgctttttcagacaaaggaaaccgtattttttcgagcgttatttggaaactgtttttttcttgcgcattttttatttttagcggacgatggaaacttctctcgttaagaagttagattagattctggttttgcggtcttcttttattctcgtgagtgatccggttttttccccctactcttttttttatcacgaacgaccagagcgatctgggagatttttttttctccgcgtcaattaatgagggtccgacattccttttttcttttctttttgcatttttctctccgcgttggacagatttggtttttctttgcacattttttttcgcccgatttttttatcggacaattttgattttttttcgcccggttttttctggatcagacggatttggtttttcttttctttgtttcgcactttttttcgtccggtttttttatcggataaatttgatttttttgtctagatttttttttgatcggacaattttggtttttttcgcccagttttttttagatcgggcatatttggtttttctcttctttttttcgcacgttttttcgtccggtttttttattggataaatttgggttttttcgaccggttttttttcggacgatggaagccattcttattttttaaagtagtagagattataataactaattaaaagattcatattttttctttcgtcaccaaattttcgttcgtttgcccgattttccactcgtccgtgcgatccctccctcctcgagtccgagtctgtcttaaaaaaaatcccgagctagatccccaaatcaatcagtcaaataaccaaaaagaacaagaaaataccaatatcgacctcataaatttgatccccacaataaacctaacacccatgtattatctccctcccaatccaatccatctgagcgacaataaaaaacaatagaaaatgaatcacaaatccacaaaatcacgaaatcacaaatccaacaacactaagttacgtcgggttgcaggcgacgtgtggcggcggaagtgcttggcgcggtcgtcgggcttctgaacgagcttgacgcaggccagcggcaggaactacatcagttgaaggccaacggtttttgagggcagcattggcggtgactcaccataggtcccgaggggaggcggtgcggctctggagcccttccgctggatctggaggagggagggagcctccgggcggccaccgctcctcccgccgcgcgtcgccgaagcaaccgcacggtgctgccgcggaggggagggcgctgtcatcgccgccgatgccacctcccgccgctgggctgcaccgtcttcacccgccgccgccacccgtcgcccgccgcctcccctcttgcgccgccgcctgccgccttggctccgccgctccgagagagaagaccgagagcaaaacgagagagatgatctatgtgttggaattaatgaatgggccttagcccactcgaattgttggaattaatgaatgggccttagcccactcgaagattaattctttggaaaatcacaaaagcccacctcatgggatggcatgcatgtggagtttagtaccaccttgcttattctaggagagggggaccttattaaaagggaggatgccctcctagtcacttgaagcatgtgtggtggagagaagaggggaaacacacgcgcgcgctcgcctggcctggcagggcagggcaggcggcgcgcgtgcacgacgtacgcgtcgaatggtccgaaaaattggctcctcacccttgcgcagatgcagcctccttttgcagttttgttttgctgcaaattcggattcgtttttgctttggaaacgttccgaaaaatccggtgcgtgcaaacggcgtggagtccggataagttacgcgcgacttatctggttcggttacgcgcagtagagatcgtgcgggcgccctgatcaagcgacccttctctatataaaccgacctgccgtcttcacgcagcacacgcaaaatcaatctagggtttgcctcctactatgtactgcgccgtcgctcgtagactactccatcccgctcgccggcgtgcaccagcgatcgggagagcaggtctccggaacctctgtctttgacgtcctgcaccgggagaaggcggcaataaggtttttgggaagcgcttcgcgcgactgctccctattcgttcgcgacggctcgccttcctcttcgctcgcgtgtttcgtgccttcgtagacacctgcgaaaagtttcgaccaagcagccggtcttttcgtcaccttggtacgtgttcaatatgttgcgcatatttgatctgttcatgttatactgtgtagtttacatgtgtagatctaatgatgcgttcatgctagttttcatctgtaatgtcatgatttatttatggaatagattaaatcattatatgtctataatctcaacaatccaaaaaccttattataggcactgtgattttactatggctggttttgccgatgcactgaggccggataaattcaccggtgtgcattttaagagatggcagatcagggtcactctgtggctgacagctatgaaatgcttctgggtgagtactggcaaacctgaaggagttcttactgctgaacagcagaagcaattcgaggaagccactactctctttgtgggatgcattcttagcgttcttggcgatcgtctggtcgaggtgtatatgcatatgaccgacgctaaggagttgtgggatgcactgaatagtaaattcggtgctactgatgctagcaatgatctgtatatcatggagcagtttcatgactacaaaatggctgacaaccgttctgtagtcgaacaggctcatgagatacaagccatggctaaggaactcgaactccttaagtgtgtcttacccgacaaatttgtggccgggtgcattattgcaaaactacctccatcttggaggagtttcggtactgcactcaaacacaagagacaggaatactccgttgaggggttgattgcgtctcttgatgttgaggagaaagctcgggaaaaagatgccgcgtctaagggcgatggtgggcagtccagtgccaatgttgtgcacaaggcccagaacaagagcaaggggaaatacaaagctcagcagaccaccaacttcaagaagcagaagaagaacaacaacaatcctaatcaggatgagaggacttgctttgtgtgtggccaagttggtcatctggctaggaagtgtccacagcgcaaggggatgaaggcacctgcagggcagacttctaagtctgctaatgtgaccattggcaacactggagatggaagcgggtatggtaatttacctactgttttttcagttaatcaatctactaattggtgggttgatactggggccaatgtacatgtttgtgctgacatctcattgttttcttcttatcaggtcgcacggggttccaccgtcctaatggggaatgggtcacatgcttctgttcatggtgttggcacggtagatctgaagtttacttcggaaaagatcgtgcagctgaagaatgtgcagcatgtcccttctatcgacaggaatcttgttagtggctcccgtctgactagagacggatttaagttggtttttgagtctaataaagtagtcgtgtctaaacatggatattttattggtaaaggttatgagtgcgtaggtctgttccgcttttccctttctgatttctgcaataagtctgtgaaccatatttgtggcagtgtggatgatgaggctaatgtttggcattcacgtttatgtcatattaattttggcttgatgtctcggctttccagcatgtgtttaattcctaagttttccattgtcaaaggttctaagtgccatagttgtgtgcaatcaaagcaacctcgcaagcctcacaaggctgccgaggagagaaacttggcaccactagaactcctacattcagatctttgtgaaatgaatggggtgttgacgaagggtggaaaacgatatttcatgacattcattgatgatgctactagattttgctatgtgtacttgttgaaaacgaaagacgaggctctagactattttaaaatttataaggcagaagttgaaaatcaacttgacagaaagataaaaaggcttaggtctgatcgtggtggagagtttttctcgaacgagtttgacttattctgtgaggaacatggcatcatacatgagatgacgcctccctattctcccgagtctaatgggattgctgaaaggaagaatcgcacactgactgacttggtgaatgccatgttggacaccgcgggactgcctaaggcatggtggggggaggcattgttgacctcaaatcatgtgttaaacagagttcctaacagaaataaggacaaaacaccatatgagatatggattggtagaaaaccatcactttcttatttgcgcacatgggggtgcttggcgaaagtcaatgtaccaataacgaagaagcgcaaacttggacctaagactgtggactgtgtttttctgggatatgctcatcatagcattgcctatagatttttaatagttaaatccgaggtaccggacatgcatgttggtacaattatagagtctcgtgatgctatcttctttgagagctttttcccaatgaaggatacacatagtggttcgaaccaaccatctgaaataattcctagttcaatcacaccaccagaacaaactgaacatacacatgaacttgtctctgaggaggatgtcagtgaagctcctcgaaggagtaagagacaaaggacggctaagtcttttggtgatgatttcactgtgtacctcgtggatgacactcctaagtcaatttcagaagcatatgcatctcctgatgcagattactggaaggaggctgtccgtagtgaaatggattccattatcgctaacgggacttgggaggtgacagagcgaccctatgggtgtaaacctgtggggtgcaagtgggtgttcaagaagaagcttaggcctgacggtactattgaaaagtacaaggctcgacttgttgctaagggctatactcagaaagaaggcgaagatttctttgacacttactcacctgttgctagattgaccacaattcgtgtgctactttccctagcagcctcacatggtcttctcgttcatcaaatggacgttaagacagcttttcttaatggagagctggatgaggagatctatatggatcaacctgatgggtttgtagttgaaggtcaagaaggcaaagtgtgcaaattgttgaagtctttgtatggtctaaaacaagctcctaagcaatggcatgagaaatttgacaaaacattgacatctgcaggctttgcagtcaatgaggcagataaatgtgtgtactatcgccatggtgggggtgagggagttattttgtgcttgtatgttgacgacatactgatatttgggacaaaccttgaggtgataaatgaggttaaatcattcttgtctcaaaattttgatatgaaggatttgggagtagctgatgttatcttaaacattaagctaattagaggtgagaatgggattacactcttgcagtcccattatgtggagaagatcttgaatcgctttggctacattgatagtaagccttctccaacaccttatgatcctagcttgttgcttcgcaagaacaagagaattgctaggaatcaactggaatactcccaaatcattggctcgttgatgtacctggctagtgcaactaggcctgatatctcctttgctgtgagcaagttgagccgatttacctctaatccgggagatgatcactggcgtgcgcttgagcgagtaatgcgctatctgaaaggtactgtggaattggggcttcactatactgggtatcctgcggtactggagggttatagtgattctaactggatctctgatgtggatgagatcaaagccactagtggatatgttttcacactgggtggtggtgctgtttcatggaggtcttgcaaacagaccattttgacgaggtcaaccatggaagcagagctaacggcactggatactgctactgttgaggcagaatggctgcgtgatctattaatggatctgcctgttgttgaaaaaccggtgccggctatccttatgaactgtgacaatcaaacggtaattgtcaaagtgaatagttctaaggataatatgaaatcgtctagacatgtgaaaagacgattgaagtctgtcagaaaattaagaaactctggagttataacgttggattacatccaaacagcgagaaacctggcagatcccttcacgaagggactatcacgaaatgtgatagacaatgcattgaaggagatgggtttgagacccatatgagttatactatggtggtaacccagtctatgtgatcggagatcccgtgaattagatcctgagaagaacaaaccattagtaaactagaggagagtatcaatatatataccctctccaagtgaagatgcatgtactctcgtgagctgcaaggcagattggctatgccttaatgagttctgttgactttaattagcaaagatgttgtcctgcagagcattcttgaaagaactcacctttgtgagcttgactgttggtcgcagtctatgaagattttgggtgaatcttctaggaagcttactaaagacctaggagtatgacttatacgctccacccgaggggtagtctacagacggtctagtaccagataagactttgagtgaaacttgcttgcacaagacttgcaattcaaggcgtagtccattgttcaagttgtgagtaagtgtagcttggaattctaggtggatgttcaaccttaattggtctccatcgaaccgctggtatataaacagtacattggaaaaggcaaatctcagtgggattttgagatttggtgggggattgttggaattaatgaatgggccttagcccactcgaattgttggaattaatgaatgggccttagcccactcgaagattaattctttggaaaatcacaaaagcccacctcatgggatggcatgcatgtggagtttagtaccaccttgcttattctaggagagggggaccttattaaaagggaggatgccctcctagtcacttgaagcatgtgtggtggagagaagaggggaaacacgcgcgcgctcgctcgcctcgcctcgcctcgcctggcagggcaggcggcgcgcgtgcacgacgtacgcgtcgaatggtccgaaaaattggctcctcacccttgcgcagatgcagcctccttttgcagttttgttttgctgcaaattcggattcgtttttgctttggaaacgttccgaaaaatccggtgcgtgcaaacggcatggagtccggataagttacgcgcgacttatccggttcggttacgcgcagtagagatcgtgcgggcgccctgatcaagcgacccttctctatataaaccgacctgccgtcttcacgcagcacacgcaaaatcaatctagggtttgcctcctactctgtactgtgccgtcgctcgtagactactccatcccgctcgccggcgtgcaccagcgatcgggagagcaggtctccggaacctctgtctttgacgtcctgcaccgggagaaggcggcaataaggtttttggaaagcgcttcgcgcgactgctccctgttcgttcgcgacggctcgccttcctcttcgctcgcgtgtttcgtgccttcgtagacacctgcgaaaagtttcgaccaagcagccggtcttttcgtcaccttggtacgtgttcaatatgttgtgcatatttgatctgttcatgttatatgttatactgtgtagtttacatgtgtagatctaatgatgcgttcatgctagttctcatatgtaatgtcatgatttatttatggaatagattaaatcattatatgtctataatctcaacactatgggctaccgccgcctcgccaccaggagcaacaaggcacctccatccaccatgtcgatggttggatcttcaggccgctgccgccgtccccaaagtcctcatcgccgatgactgctacctctccatgccatctcccatcagctcggctacatcgtcggccacggaatctccacggcctccacatcgacttggaccaggatcctcttcccgtcgcactctgtcggcaccaccgcctgccatccgctgaacgcccccttgaccggtatagcctcccctccgtttccattctgtctgtctctccctctttctctctgataaacggataggaacgatgagtggatagataagaacgatgcaagagctcatgagtccatagacatggtctatggaccattgacgcatgggaggagacgtgctcgtgctgcactgccataaccattgttttttttttttgagaattccataaccattgtttgctaccagtaattgctactactccaactgcttagtaggcaccgcttttatttttttctattagggatctaggccttatctcctcagtggcctaaaattatagggggctataatttttttttgatttcaatgcttgtgttatgagcgcgtttatactatgggtgtgtttagattctaacaaaaattatcaaaaaagtcatatcaaatgcttggacacatgtatgtatggaacattaaatgtggataaaaaaaccaattgcatagtttgcatgtaaattgcgagacaaatcttttgagcctaattacgtcataatttgacaatgtgatgctacattaaacatttgctaatgacggattaattagggtttataaattcgtctcgtagtttaaaggcggaacctgtaatttattttgttattagtctacgtttaatacttcaaatgtgtatccgtatacgtcaaagtttttacacccaacaaactaaacacggccaatgtatttctaatatatatatatatatatatatatatatatatatatattggcaatttaaagtacattgagtataaaaattccacttgtattttattagacttacctacatacaaataaatatttttcttcatgatacaaattttcatccgtcgcctttttttagcagattagttgtctaaactaaataacaatttttatcactgtacacacttcgtaatcacctggtgcaatgtacggacacttttgctagttagtatatagatacagatatagatatagattaagaaggtagacaaataaataaatgaggacttgttatagttggttgagatgaaaaattattgaaaaaacaaagttagttatagttaactaatatgataaaatagttggagaaatgataccaaatttgaaaaataagtagttatatatttggatggagggagtttataagacaaatataattaaaaataatttgtaacttggagccgcatttaaccatgacattaagaaattttaactaggattttcaaaccgacccatacatgtagggatgactaggcgctggtaaccaattatctagggccatgagaggatttttagacaacctaattaattatctagggtgccaatggagaaaaaaaaacaagatacatatggaggaagttttatcagaaaaatgaaaagcaatcaagttgggccgggccttctcataagcccaaatcgttggaccattaaagcttgcccacctccctctctatctctctctctctcctccctccccagcagtgcagcagtaccacgcgcggcgcgcaatgccgttccttagccctctcgctggcgatgacgccgacgactactactacgcctacgactccagattccgccgaggcagcggcggcgggaagatcgccaagaaggaaaaggacaaggacaaggacaagggcttcctctccttcctcccctgcttcctcccctgctgtaatcgctccttcccgattcttgatttgcggattcttgattccggtggattcttggctcatcgctgcttggttcttggcaatcagcgcccggatcggtggaaccgacggtgcaccgccgcctcctctcctccgactccagcgacagcgacaacatcgccaccgcggacatcaccgccgacctcgcccgcctccgcgcccgctactcccgcctcgccaccggcccgcccgtccgcccccgcgacgtcccctgcctcctcgcgcgcaccgacgacccgccgctcgccgtggccgcgctctcctggctcggcggcgacctccgcccctcctgcatcctcctcaccctcctaccggcgctcttccccaccctccccgcgcacgcccgccacgcgctctccgccgccgcgcgccgcctccacgcccgcgaggccgcgctggacggcgaggtcgccgagtaccagtccacctacgcgatgaagctggcgtgcgagaagaccaaggacggggtggcggagacggcgggggaggagatgtgcaagatggcgcgcgcggcgcggcgggccgacaagctgcggtggcgcgccgtggaggccgcggtgaaggaggtgctgacgccggcgcaggccaaggagttcctcaaggccgtcgaggacgtggcggccagggcggcgcgccacggcgcgaggtggcacgcgcgcaccggcgccgtctccgtccccgtcgaggtgttcgaccgcatgcgcgccaacgccagagcagccacggatgatgcttggtgatcatcaacggttttcattcgattctccactagttttgttttgtttggacaagagattcatcgctagttttacttcagttcgaatccttctgaaagcttgggctgaaatcggccaaaattgttcatgtttttacttcacttctttgcacctatatactgtattcctgtctctacttacagagagggaactatacctgaaccattgttttcgaatgaagtttggatggattacacctttacagattacagtgatctctgctgacaatagtttgttctcgcatcacttgaagtttgtcagggcagacatacaaattgtgtgaaactcctctgtgcatatcaatttggtttttgaattgaaagtttggatgatcaaagttcattttggggtgtgatggtatcaaaatattttggtacaagtttgttagactatgtgagctgtaaatgtcacattctattagttaatggtttgctgtctagagttacttatttgttccgtgaatgtcacattgctgtgtgctggattgcgttgcctgtgttatacacagaacaatcggcttcaaataatatgatctgcttcatcttgtcgaaacaagatttcggcgatataaagtgggaagcgcacgagacctaaaggtggatggatgcgaggataaaagatttagacatgttcaggccctctcaatgagaggtaataccccactcctgtttggggatttgaatccaccgggtgtgtattaatctgacgatctggttttgaatcatgccccctagagggcctcttgcctaccttatatagcaggggggattacaagatagaaatcttagcctacgatatcggttttttaaatctactttataatattatcaaatcaggactttaggccgtttcataatatacaagaaaacgcaatacccaagtcatgatccgttacatattttataaatataagttatctcctataaccagttggataaccatgccatgtgggtatggggtacctataatctctacagtaacccctaagaccttcacagtcgaaaagataatctttctctcgaaccagattactccaaagctgagtgctttaatcatctttgccatagtctgccgagtactttcaccaaatcagaagactgtggagggctaaaaaataattaaatgtaaacataggtgcatcgactagatgcacctaataggtgtagcccccgattatgtggttagttgaacaaaccaagcatatagtcaaggaataaataatccaaccaactgagtggtttttgataattatagtcatttgatatcaatatatagcatatgcggtgtgaaccccccgaataacatgatccgagtgatataccgaccgctttgtaaaatatgatgtgtgcaatctaaagttgactacatcattaaaaattcacatagcaaaacagttataaagaagcctatatgctgtgaataaagaattttccaaagtattggcacacgccatacgcacactgttttaacagatgttcttaagtcactaaaagacacatggtttcaccacacctagaaatatatggcatgttcttctcaacaagaggctggagcgatcgttgccaaaatttccgactagatcccaccaagagactagccaccaattaaattgttctgcaatcgggcatcagttgccgagttgtttccctgctcagctagatttgaagcaatcagcaagttgtcattatttgtcgtttcgcctgtttcgttgagtaatcatctaagccgggcccacacatatatctacacatgcaagcaggaaccaatttcgtcggcgtcgtacatctttgcttgaacagcgacacggtcttctcaaaaatcttctccgactcgggaccatggccaacacaaagcatctcggccgactaccaatgggatgtgcatgtttaactgctgctgcatgctgtcatacagacagacacaagcagccgattgctgctcgagctcatgcgtctacaggcacatgcaagcaggagaactccggccgccaagcacaagtctgcaactctgcataggcctctcaacttacacgggaagattgccacgcctacatgttgatattttctgttgtgtatatcatcgccggccgagtccgatctcgccatgacaaccctcgatcaaaccgtatgctagcccaacttatacttggacacaatacaccaaaagcgtcagcttgcaacgggttttatcattctgatctaatctattacctattatattaattatttttattttccgttcactaatcacaagttaacgtgtgctctattttttcatatattaatggccgagttcgacattcgacgactgacaaaagccaaggcctaggcccaatttcaactcggctaacgggctcagcgtggcgtcagggttgactgaccacaaaagctcaacggtgaggagattgtctttatacgcctgtctaagatacgagctggcgccgactcccatgcagtttaaacatctagcggagctgctcttcaaagcatctcaccaccggcttgcttccgtcgcagccgactggtgttcttgcctacacggttggttggtcataccaccgttgatgggcatcttcatcatcaccgaccagttgtctcatctgctgccgactggtgtcttcatctatatggttgattggtcacaccaccgttgataggcatcttcatcatcatcgccggctcgcctccgtcgccgctgactggtgtcctcgcctatacggttggttggtcacaccaccgttgatgggcgtcttcgttttcactatcggcttgcctctgtcgccgccgattggtgttttcacctatacggttggcggactccgccatcgttgatgggcctcgttatctacaccaccggcttgcttccgccgtcgccgactggtgtcttcattgttattgatggacgactgttcccacattggtcacccctacatggtgcgccaactgtcgaaataagatttcggcaatataaaagtggtagcgcacgagacgtaaaagtggacggatgtagagacaaaagatttagacaggttcaggccctctcaatgagaggtaataccctatttctgtttgggatttgaatccgccggatgtgtattgatctgacgatctggttgtgaatcatgccccctagagggcctcctgcccaccttatataggatggaggacatgattacaagatagaaaccttaaccaatatggtatcagtttcttaaatctactttacaatattatcaaaccaggactttaggccgttccataatatacaaggaaatgtaatacccaagtcatgatccgttgcatatttcatagatataaattatcccctataaccagtcggataaccatgccatgtgggtatgggataccaataatctccacacatctaatatgccattctaccaatttatgcaaatgttgggttagattcgcatggaagcacgggatttcaacttcgactgatgtgtaggtcccacctctacacaatacattttggatttttgattgtctatttaatgtaccaatcaagaccatttgtacccgtggaccagttcggtgaaccatgtcaatggtgaactagatgaatgatcttgtcacaatttctattcgggtactatggtgatatttaagtcaaggaatatgtagagattgtggtttgtggggaagatctctacaaaatgtttaaactattcgaaatgttgtgccctttgcccctttcatatataggcatgcgtagtaatgtttgtcatgcttatatttgttttccaaatcagggaatagtagatcctgatggtttaactaatacctcatgctcagttgggtaagcatgggtgtgcggcctgcgatgttacctagtgcttttatataggttagaatcatggttattattttatgttttaatctcctaattgtttaaaatgtggctttgtgcaaacgaacttcaaatgccttccttgtacctttataaattgcaatgtgtactcaattaattgatttgaagatggcttgaatagagatacgtgcatccattgttcatctgtagtaagtactatttaccatttctgttgaacatgcctatgataaccaactttgtctttgtgtacctcatatttcatggaatagtattatactaagacccttatttggtacacactaagccactctaaactcaatctatcaccaaactagtgaagaaaatgatcacaattaactcaatggtgctcttggactctctcttcagttacacacctcaacagggttccaaacgatattagggagttgaaggcaatagatatttatagccccaaactagctgactagccgtttgtgactgttggacaaaagcagccagatatcaagcatggtaaacagcccgccaccggtccgaactgtacggtcccttgcacttttccaatagtcactaggcaagtagccgctgggctatcaagcaacggaaaatccaatatcattcggattatctgggaggtcattgttcgcacaatgtcagacagtccactacagttcaaacaaaattgactcgcaacggtcgagtgggttggcagactgtccgtcgccctagcaaattttctactgattgccagagaattgggtagtggacaacccatgatctgccggttagtccggccagtcccttgtcaacacatgaccgtagttggatgatgcattggtaggaaaatttggcaccgtagccgattatccgcctaagtagttttagcggtcaagacaagtctagcatggattattcggcatcactcagacaatccggctagtacagcttctgggtgtagtaaaacttgcacacgatcaaccacgaggttttactaacttgtttttagcacttgatttgaaagactagcaacctagtgtgcaccacacctagattctagcaccacaccttgattctagcacttttgaaacttcaagctactaacttccaacccctctttatagtacggtctttaacctaattgtactgtatttgccccaactcctcgaatgcattactgatgatcgggttgcgatagatgatcttcttcgttaacatcctttttgcgggtttaggaaacacatccaacacaataggcactatatatgatttattttcagggttaccatccgccgttaccatccaacacatagccaacacaatcctttttgagggtgtagatgctttcatttttcatatatgaattttaaagacaaaggcactataggccacacattgtgtaagtttggtgtttggtaaatattaaaatatcattatttgtcaaccataatagtacatccatgatagtaggaagcaaaatcgatggaccacatgcatgtaaacaatagaggcaaacatatggtgagctctgtcttttttgttgctacagattgatgatcttcaaaaatatctctaactctatctggcccaatatccgaggggatcgcctccctatttggtatagatgagctcacaatattcaactattagttatgtagaagttatatagagaagatgcgacatcgattggtgactcccactttccttagccatgctctggtttgaagagcaaaccaaaattagtcctaatagggactatgtcttaaccctaataatttagtccctttctacgatatttttatggcagcgagatcaaatgtcatgcaaatcaattgatagcagtaaggagcaacccaatgattgctatatcatgtatggacaatctcgttttagcaagacaacacatatattgcaaatcattttcatgactaaacttaatgtgtaaccttccacatggagatctgcatctatcaatatagaggttcttcataaatgttggacaaggagctgataaataattgccatacatctcatttagatgaatcgagaggaggccgagtggtagcagtggggtttgtaaggattaggtcatggcaacaagaagagatgcctcatcctcttgaatccttgcacattgggaacgaggagattaacgagatagtatgtgggtggatggcatatattcaataagagattagatgtcgggctttggttaatttaagcaattttggactgcaatagctcccttctctaacttgaaacagccctgctattgagaacaatggaggagaagatatggcgagttattcccttttcattgacatagattgatgatcttttaaaatatctctaactctatctggtcttatatctgaggggatcgcctccttatttggtatagacgagccaacgatacttaattatttgctagttatgtacagcgaggcgcctgtggtgacctcgtcaatctcaaggatttgccggcccagtcttcaaagatgctcataggggtagggtttgcgtgcgtgcgttcatagggggtgagtgcgtgttcgttgtgagtgtctgcgttgtactgtgtaattctcaaaaaaaagttatatagataagatctgatgtcaattggtgtgtcccaccttcttaggcatgtgtgggtttgaagactgaaccaaaaccgatcctaatggggcctacttcttaaccctagccattttgtccctttggttggtcccacttttaattttgagtcacgtgctgacttgatgactgaaccaaaacggatcctaatagggcctatttgttaaccctagtcattttaattttgtgctagcaagatcaaatgccatgcaacatgattgatactagtaaggaacatggcaatgattcctatatgatattattgctatatgatagtattgacaatctttattgcagcaagacaggatatgcattacaaatcactttcatggctgaaccaaaatgtgtggccttctatgtagagatctgcatcgatcaatgtagtggtccgttgaaaacgttggacaagagttgataaacaatctccatacatcacgtgtatatgcatcacgaggagagtggcattacatcatgtcagggctgtgagctactatatcctcaaaaacgcgttatgtatactatggttagcagtaacataaaatataactgatcctatttcccatgttaggagtgtatggtctagtagcacataacaagttttccaacatatataaaataggtattacagccattgcgctgtaacacatattagatgttaccacatacatgctagtaacatcatgttataaccaaaacaccttggcatacgaccgacaacacatatctttaccaatagcaacacaagtaaatagcacaattttaggtattagtagttttttttaactgtagtaacacataaggatttgattaccaataatgatttaattaccatagtgattttgaaatcaatccttttcatccagaaatgtacagtaatatttcaaaacatctcttataagcatcacatgtgtctcaaataatacaagtcaacatgataaaccaaattgcataggaaacaaagttaatgttatttgcatcaatacatagaccagtcttgaatgtgtacaatttgtaaacaagattagggagtatacgtatttctatactctttataaaattacttaccttcatccactggtgagataaactactgaataatcattttttctccagatcaactgatcctctacttgcatatgcatacaattgcattatgtacagtactacagtacaaatcttgaatttgtaaaatttacagtacctgcagttgatgaagacaaagatatctcaatgttagcccatagaaatttacatgaattgtatacatcaaagaaggacttctctacacattgaattaaaccaaagaagtatctaagacatacactgcaattgttttggctaaaaaccaaaatctctaaaaggctccattattttatttcttattagcattgctgtgctaagggagaaaagctgaaaagagaattcaaaaattttcagaaaaaaataatacttttctaggaataagacctagcagactttcgcacaattgaggaagagtataaaggcagatttttaggagatattttaatcaaatcgcattgagttagtaaaaaatgctggatgaataaaaactttccaatgaataatgtacaattcaacactgcacctttggcatccattgcctatgtggatcatatctgcatttgcatcaatttttatttacctgaaaccatgaaggcatgaacttgacttatgaagaagacatgcatataggttacaaacaaagaacgctagtttgtattgtttctggtgcccgcccctttgcagttagaagaaaattacaagagttttagaaatactagtactacgcccacacattgcaatgggatctagagtaatacggggtgggaggggtgggccattcggttatttggcggcgcacaacgtggtaggaggataactgtgtctttgaactttgaagtagtagatctagataattggaactgaagcaagtattagtactacaatattaccatgctagatctcagttcagtaaactaaacaacatggttgtcgctccaaaataatgcatgtaagcagcagcattcacctagcttactgaactgtgctattattattaccaaattagagatcagttcagtaaagaaaacaacatgtcagttactccattataaggtaagcaacctgtagtcaaggcaggcaagcaacattcatcgattcacccccagctttgctggatcaatctatctaaaacactattttgcaggcttgtattaggatagtaactctagacatggctgcttaacatattgcaggtttctcctacggtcaacgaagatcagcaacatcacagttaacgatcgagataatgattattcagtaatagaagtagacatgctcataactatgacttgaataggtacatgattgtagtgccaagccgcagcatgtggccggcggccggcagcaggagggctgcacggccctgaggcggcccacggatggcgggcgtggtggcactggctgcggcaggcatgtaggcaggtcacatgcagcaagaggtagctggcaattcagcgagtagcagctatcaagaagagaaaatgttatgttctctcacaattgaaatctgaaagaaatggcatgatttcctgaggatctttttttgcagcgagcagcaggcaatgtccagactctagagcagtgtttcttgatttcctttggtctggggagtaatggttttgcgctgttgcaggcatgggagattgggagggaggaaccacgcgcggtataagctagcaagctattgtgtagtggaccggagcgtatacttggtgactgaataaaattaacgaatcaccaataattctccaatccatatgctaagttaccaaaagccagaataatatttgatccccttaatttctcttgtgaaaattaggattgctcctggagtcctgtacggccggttccttcacccaaacccaaatgcactcgtggcagttggtcctgttgggatacgcgtaggctacgatagcataaattaaaattttctatcgcgtaaaccaggaaccatgtaagtattagatcataaatcgttaccactcgacgcgctgcgcaacggaagaagacgctgagaagtcgaaggaactctcgcgaagtagcgcgcgtcgatgtagaggaagtagtcgatcgcactggctcgaccttctcctcctcgtgcgttctcctcgccgtactcccatgccgatgtgctagcacccgcgcgcggctagggttttgctcggggagggaagtgatggctagggtttctcacgtgatgcaatgcctccgccggtcacacccctcacaaatatataggatccatcactcgggtctccaaggcccgtaggactcttattcggatccctatccgaattaagctcatattggatctccatccaatccccttattccggcccattaagcgtgcgaccctgtaggttcatatatactcggctgtaacccgaaaacgccttttcggttcacgcgtcaacagcggcccctagcagaacgtattgacccaccgggcatacataaatatcatatcgactgaacctctagtgtctacttgtataaacccctttgcctcacgatatcgattaagctcaaggctagatatgtgccatcctctaatagctcaatcattcactagaacctgttgatagattatatatcttgtgattgactcctcaatcacctttggcatggccatgcacttccataatctacaacatcgaggggcccagagatatctctccataggaggggcaaatcccatcttgattattcgtatcccactacatgtttcatagcatacccgaaaactacttttataactacccaattacggagtagcgtttagcagtccctaagtaagctaactacacatgttgggaaccatgataatctcaggtctaaggattcaacaccaacactaaatgagataactgatgacacaacacatatggctcttacagtgtctcatgttgggtctatccaacaacatgttcactaacatgtgtccacattattaatttggtatctctataccatgatccatgagacatgatcatcaattaatacatgtgctgatcatctaaatatatttattccacatgtgtgatacaatcatctctatgattacctctagggcatatcactaacaggtccaagcacagcaggtgatagtaagcactcatttttttttggttccttctctgtcgatctgttgcacaaaggtcaaatttcatcccttttttggttttctgaacttatagtgaatcactgctgatgttatgaaaatttgtttcttctttgtttggaacatgctgtatattaagattttatctcacttatatgaagtgcttgaatttgtttgaagtttataaatctcaattgtgatgatggacatatcgacttgcaattttctgacatatctgaactctgaagtatgtattactgaaaatactgaatgtgtccaaagtatataaatctgaatggttacatgggcatataggctggcaatattttctgacatgtgatggacatatatatcccaagtatatcaaattgtgatttgtgagtaacaaatgtacactatatataaattttgcggtttggatgagcatatttgtgtgaagtccatgattcgccttggtaattagggtcaaagtatgccaatgtgcggtcatatataattaattttacttgtatacatgtattcacactggtggagaaatgatctttactgggtcgacccaataccacaatagtcccagttccaaaaagaaccgggactacaaatgatctttagtcccggttgaaaaccccagagccattctatgttaccaaccgggactaaagatccaaccgggactaaagatcatttgtagtcccggttcatccccctgtcagatgaatgtcagggggccgaggatctttagtcccggttggtgtcaccaaccaggactaaagattcctctctttagtctcggttggtaacatcaaccgtgactaaagatggatctttagtcccggttatttcaacagggactaaagatgcctatctttagtcccggattcctactcctggttgaaaacccgggactaaaggggttaccaaccgggagtaaaaatgacttctccacagtgtcagtactgatgattgacacttgtgacttcatcagcaggagagtatatatagttgctagttttctgagcaatgactcgggtttaatttgttttctgtatcaattgtcagcattctgtaccaatgaatcgttcctgagtatatatgctactacgtacagtagtctacagaactattaggtggtgatttgccctcttttgtgcatactgtacatgtaaaattttatggtcatgccttgttgtattaaaaggctaatatttgtcatgcaagcaattttttcattttatttatcacagtagtgtgttggctttgtttgaagaatttactcatgggaaactactgttaaaatttaattatagacactaatcttgagatcactcttagcttttaaaatactgattttgtttgcaggaatcagaagtacataagcaaagtaacccacagtagttatgtgagagaatccatgttatgaagttgacaggaaattgtgatgtgtgttttggagatatgtgcaatttttcctggacctcgatataaacaaaaaaaaaacattttctttctcaaggatgatgtatttgtgctaaatattttgatttggggcaatgtagtttggtgacatgtcattgagaagaatgatcatgtggatcagtttagtttatcacttggaaaaagtgagcataaatttatggttctgtttggaggcatgttcttgataagagcgaacatatctcatctcatctcatcaaatgaatggggaatgtttattctttctcacattaagccatgtatgctagactagatgaactgttggatttaaaaagaacggttggatatatacagagaataggaagaccggaagaatcaggagatttcttgggagcaggcctaggattgtgagtaaaaaaaaatgggtaactttgatcagattaaaaagaaatgacccagaaggtgaccattaaacagtcccgctgttcatgaaagagagaaaaaggaaaaaatgtagacttccttaggagaaggcctaggactgtgagtaaaacaatatcatgggtaactttttgatcagattaaaaagaaatgatccaaaaggtgaccattaaataatcccgctgttcatgaaagagaaaatgaaaaaggagtagatgtagacttccttgggagaaggcctggggccgtgagtaaaaaaaatatcatgggtaactttgatcagattaaaaagaaatgacctagaaggtgaccattaaacagttccgttgttcatgaaagaaagaaaaataaaaagggagttgatgtaaaaagtgtaacattctctcctccgatgattattccaaaaaaaaagtgtaacattggcataaatactcctggtaaattagaataatacaaacaattctaataaataccaacgttctcaaatggttcaaaacttattgttttaaaaataggatgttcaaaacttaacccatatcaaaatcaagcatgtttataaaatttgatatgaaatgagttagatttaaaactaaataatcctactaccacaataaattttatattttttctttaacatgctaatagaagatttacaataaatttcacatgctagacataattatggttaattatttgttatcatgataatatttccattatagctaaaaagattgtaactaaacttgctatcaaatttgttcgtcaaaaactcttttagaatatctatacactttacatatcataacatttaatagggagcgagatcattatcgcgcgaacgcttgaatctactggctggtatatattgaatgttttttgtgtttcttttgtactatcttttctatccattattagatgattccatatttgctagcactgcacagttagctagatcagtccaaaagttttgtaatgtttcttgaaaattatattttatggccatatctacttgtatatatgtccactggaaatagttaccagattttatttcaggcaaaaatatatactagtttatggtttgattgaatatttttttagctggatacaatatttgcagttactctccctccgtcccaaaatataagcatttttagctatgaatctggacgattcatagctaaaaatgcttatattttattcatagctaaaaatgcttatattttgggacggatggagtaaattaatatttgttaagacgattgttttttttttcgctcatattgggcatatgtttgaggcaaggtaccttgcataagcaccattgcttggtcatgtaaatttgtgtcgttttagctttgtaaaaaaaaatagtggtcccttttttaggtgaactgaaaaagaacgtaattctattaaaataactctattttagaatgtagatcgatttagatttaatattattaaacgcgttgcatttcattctaaagcacatatttaaatgcattgttggttcattttaattttctagtacaaatttaagtatataggagattcaattcaacataatgaagggttgaaatatccagagtgaacaaagataaatactcattgaattgaatcgttcaatgcaacatgtccaagtggagatgattgggtagagaccagtgttttaaaagacggaaaataggtgtcaaactgataggatatcactgaacggttaatcggaatacggacgattagtcggaataattcgaaatttgtccttcacagaaaaatatgtatatttgcttcatatttcagttttgcttccatttaaacatacattatattgttactactaaaccaattatacttttagcactcaaccaattactagtatgttaatgttgctggtaatactcagccaattgcaacaaaatagtttctactgtggatcatgccatgattgtaggtttgtaactatcactagcaaacgaagtggaaaccagcaccatatgtgtggggcttggcccattaatcaaattaagcagcaattagtcgctaatggatccattaattggactaatcggcttttttaacgttcaaacaacaaatcctgttcctagttcatctagccgacttggtctagtcagccgacttctttcacactggtatagacatggcaatgagaagagaggccttatcctcttgaacccaagaagaatgaagaggtagtacataggtggattgtcaggctctggctaatttaatttgcacttttatattgtaatggtttccatttctagctttgaaacaatcttggtatatataaagatagcacgtagggtgtaagatgtctctaactttattattaaaatagagcttgtaaagtaataagtcgttttcactttcgcgctcatctcgtgagaacaacttgaactgtttattccatgaagaggaaaacaaccagaagagctttttcttatttcttgcgggtgctactaattactatgtggctagcggggtgtcactctgttatggtacgagagaaatttaacaacaatatataactttgattttgtgcttttatcctgtctcagtcccctgctgttttgtattttattgtaaataacttttattcctcttaatagaaaaaatgtgctcattgcgtattccaaaaaaaaaacaacaatatataacaagaagaagaacacaagcatgtagctaatgcataattctttatcaaaataaagatgattacatccggtggctgcagccaatacatggaggtgaagaaacgctgagcagatgacgatacagcaacaggacataataagatgcagggatacaaaatactaaatctccatggatggatggaagcgaaagcaaacttcaaactgcggatacaacgatcaatgcatggacgacgatggaacgacgacgactaatacaaaataaaagggaagctaggtcgatctcgatctgtgacgactgtgagatcagtttattcttcatggagatgcatttcatggagaggtggtagatctcgaattcagaagcccgcgggcggcggggtggtgggggtggtcggggtcggggcagcgacagcgagcagcgcctcgcgcagcatctcgtgggcgcgctccgccacgccgtcccgcagcaccgccagcttagtcaccagggccagcacatcctccggcgccatgcgacccacctccgcctccagatccatcatccacgccgccgcgccgctctcgcg

SEQ ID NO: 10427 - DNA, 55008 bp, Oryza sativa
  unsure (1)..(55008): unsure at all n locations
gccccccccccccccgggtagccaagtgtggtgaaacggggggcaaacctaatcagagtaggggctttcctctcccccctcccccacccttttagagtttgatgtgttactactaaaagaacccccccccccccccgcgacgtcggcgtgacgaggcgtcggcgacggcgcggcgtcggcagcagaggcggcggcgacggcgacgactcgcacggcatccggcggcggccaccacgacggcgagatgcgcgcgggcggcggtgctcgcgccgccgggggcgagcgacggctgcagcaccgccggccctggtggtagcggtccgagcgacggcggcgacggcggagcgaggcttgcggaaggcggcgaccggcagcgcggctggtgatgggcaacggcggcggtgccaatggcaaccgcggctgcggcctgaggcaccagcggcaacgccgtcggtgtggaggcagaggcctcggagctcgtcacagcggcggcgtcagtggctgctgtggcacggtgggaggaggcgcggtggtgcgtttggcagcagtggctgcggttgttagaatttcaatggttactctcattgagaagaggatggcactcgagatggggcaattttctggttttcttcattcactaaacacaaaagccatatcctcccaaagaggattggatacatatttatagctgcttgtagcagccatgcagccatgctagtctaagagggtgctgtcagcatcccaacaaactgtcctagagcatctcaacaaactgctgtcctaactgtcctagagcatccaaactgaaagtagagatgctgtcctagaaagctgaaaaacaggaaaaaggcaccacaagaccaagaccaaccagccaagacttattcctacattctccccctaagtcttgtgcgccgtcttgtgggagagttgagccatcccgatccgggagcaaagctcaaggaacttgatcctcccaaggggtttggtgagcaaatccgcaagctggtccttggtgttgatgtagctcgccttgatgctcccttcctccaagtagcttctgatgaaatggtacctcactcggatgtgcttgctccgttcgtgaaaaacggggttttttgccagggccagagcggacttgctatccaccctgagctccaccgctccagtatctctgccgaggagatcactaagcagtcgagcaagccagagcgcctgggtcgaagcggcggatgccgccatgtactcggcctcgcagctggacagggccaccacctgctgcttgattgactgccagctaacgaggcactcgccgaggaagaagagaatcccgctcgtgctcttgctggtgtcgatgtcgccggcgtggtcgctgtcgctgtacccgacgaagtgtgccttgccaggacacctcgggtagtagagaccgtggtcgagagtccccgcaacgtagcggatgatcctcttcacagcctgctggtgctccgtcgtcggtcgctgcatgaaccgactgacgtagccgacggagaaggccaagtccggccgtgtgtgggtgaggtagcgaaggctccccacaagacgtcggtactgtgtagcatccacctcctccgctgtgctgtcgcggctcagcttcagtctctcctccatcggagtgagagctgggttgcaatcggtgagcccagccagctcaacgacgcgcttggcgtaggcggtctgtcgaagcgtgatcccggagttgtcctggtgcacttcgatccccaggtagaaggagagaggccccagatcactcatctggaaggtggccttcatctcctccttgaacgccgcgacctctgcatccttggtgccggtgatcactaagtcgtcgacgtagacacccaccagcaaggcatttcctccattgccccgccggtagatggccgcctcgtgcgggctttgctcgaagcccatccccttgagcgtggaatccaacttggcattccacgtcctcggtgcctgccgcaagccgtagagggccttgtgcaggcgtagcaccttgccctccttgccggggatcacaaatcccggcggctggtgcacgtagacctcctccttcaagtcgccgtttagaaacgccgacttgacgtccatgtgatggacgccccagccttcctgagcagccagcgcaagaaggagtcgcacggactccatccgtgccacgggagcgaaggcatcgtcgtagtcgatcccctcctgctgcacgaaaccgcgtgccaccaagcgagccttgtgcttgacgatggctccggcttcatccctcttcagcttgaacacccacttaagggtgatcgcgcggtgaccacgagggaggtcagcaagctcccaggtgcggttctcctgaaccgcgtccatctccgactgcatcgcggcacgccatgccgcgtgtttctcggcctctgcaaaagaccgaggctcaccgtcgtcgcacgcaaggtgcaactgcgcctccaggttgcgaggcaccagtcccggcaccggctggtcgccgagaagatcctccatcgtacggtaccgtagctgctcgccgtcatggtacgcgtcgatgcgctccccgtcgtgggagagcggagtaacgaactccaccgggctgcgctcaacacgagctggcgtcggagtagacgtgcccggaggagtggctgttggtgctggagcgtgtggggacaccggctggggtggtgtcgacgaagagctcgtcgtagtcgaagtcgtggcccgagggtgtgttggtgttggagtcggtggaggctcggggactggggtagacacgctcggtgaagaagagctgcctactcccccagctccctcgaagtggacgtactcgatggtgaagtcgtcgtacgtcggagtcgaaccatcatccaccgccttgtcccatacccaccctcgcccttcgtcgaacacaacatcgcgcgtaatgcgcacacgctgtgtctccgggtcgaggatgcggtaggccttcgagccctccgcgtagccgatgaacacccctggggtgctcctgtcgtcgagcttgccgatgtggccaagctccttggtgaacgcgaggcagccgaagacccgcaggtgggagaccgccggcttgcgcccatgccaagcctcgtacggtgtcctgccatcgagggccttggtaggcgagcggttgaggatgtaggcggccgtcaccaccgcctccccccagaagatggccggcatccccctctgcttgaggagggcccgagccatctccacaaccgtctggttgcgccgctcgacgacgccgttctgctgtgggctgtacggcgcggtgtagtggcgctgaatgccctcatcagcgcagtacgacgcgaattcagccgccgtgaattcgccgccgttgtcggtgcgcagcacgcgcagcttgcggccgcactccgcctctgctgcagcctgcgcatgcctgatggcgtccgcagcctctcccttgctgccgaggaccatcacccacatgtagcgggagaggtcgtcgacgagcagcaggaaataacgtcgtcctcctggtgtggccggtgtcactgggccacacaagtccccgtgcacgagcccgagccgctccttggctcggaagctcgtctgctggggaaaggggagccgccgctgctttgtcaccacgcagacgtcgcagagctgctccacgtggtcaaggcacggcatgcctcgcaccatctccttggcactgagctgcttcagggcctcgaagtggaggtgcccgaagcgctcgtgccactgccacgcctcgtcgtcccgacgagcggcgaggcaaactggatgtgcgacttgcgcgctgaggatgtagagtcgattagtgcctctggttaccttggcaagaaggcgacaacggcgatcccaaatcctcatgagtccgtcctcgaccaacacgcgtgagccgttctcatccagctgtcccacgctgatgatagaattcctcaacgcggggatgtagtagactccggtgagcagcctgtgctcaccggacttggcggtgaaggtgacggagccaacacccttgatctccacgccggaggcgtccccgaacttgacggtgcctcggacgctggagtcgaactcggtgaagaactcccgtcggccggtcatgtgatgggtggcgccggtgtcgaggtaccacccatcagccttgtcgttgctggagccgtcgcagagggagacgagtaccttcggctcatcaaggtggaggaaagccgctgcggccggtgccgctggaggtagctcgatgcttgcgtgagctaggagcagagccggctcttcctcctccacccgtgcgacgtgggcctggccgcgtcgtggctgtcgacagtctttggcccaatggccaagcttgccacagttgcggcaggtgtcgtctcgtgccggcttgtggttgccggtggcaacgccctgggcgcctctgcgggcgccaccctcggcacgtcttcgcgcccaccgtagctggacacctccccgcgccttgcgcggcttacggccgcctgtcggggaagatgactcccccttcctcccgtcaccctgagaggcctcccactgctcccgagtgagatggagcttcccgccgatggtgatgggccccgagagaggccgtggctcatcaccatcgacgaccttgaggcgacctaacgcctcctcgatcgacatcgtggagaggtccagcagagattcaatcgagcgagcgatctgcctgtacttctcagggacgcagcggaagagcttctcgacagctctctcctcgtcgtaggtgtcgtcgccgtactgcaccattttttgcaagagagtgttgagacggagagcaaagtcatcaacatcctcacctggcttgaaggccaggttctcccactccttgcggagtgcctgcagtgtggacttgcgggcgcggtcgctgccgatgcgtgccgcagcgatggcgtcccaggcctccttggcagtccgcttctgggaaagcgagaactgcatctcgggcggaactgcagcgatgagggcatccagtgcccgccgatcctcgtcgtagtcgacgtcaccgtaccggactgcctcccacatgtgccgcacctggagcctcaccctcatcaccgcggcccactcgatgtagttggttttggtgagggtaggccacccaccgccgggaccaaaatccctgaccaccgtctggacgccgtggtgaccatggcgccggtcaggggagagggagccgtgccgcctgcgagggccgcgtgcgggctccgggctgccgccggcacgcccgcgcccgtctgggttcccgtcggcgggcgcgcggtcccttgggccgccgccgccgccgtggaggtgggctgctgcccaccgctctgctcgctcccgtgcccttcctcttgccagctcctcaagctccctgtcagcggtgatgtcgccggcgatggagccgttgatgctgctgcgcaaggtctcaacctctacctccgccgcacgtgccgcatcttccgccgcctccgcctccgcctccgccctggctgctgccaactccgctgccgccagtctggccgccctcgctgctgctgcagcggtctgagccgttgctcgcctgcgctcttctgctgcggcgagctcggcgtcctgctgacgccgagtgctcgaggcgaccgaacgctgagaccgagcgtcggacatggcgcacctccggggggctgctgtgtggagagggggaagggaaaggggaaggaggagcaaccggtgctgctgctgctgctggctgagagctcaaccgagcttgggaaggggtggaacaagagatgtttagcctacaggaaagtgtggctctgataccagatgttagaatttcaatggttactctcattgagaagaggatggcactcgagatggggcaattttctggttttcttcattcactaaacacaaaagccatatcctcccaaagaggattggatacatatttatagctgcttgtagcagccatgcagccatgctagtctaagagggtgctgtcagcatcccaacaaactgtcctagagcatctcaacaaactgctgtcctaactgtcctagagcatccaaactgaaagtagagatgctgtcctagaaagctgaaaaacaggaaaaaggcaccacaagaccaagaccaaccagccaagacttattcctacagcggtggcggtgaccatggtcgccggaggcatggtggcctcggacggctagctgagggcgtggcagatggctacatcgggccggctcggcgcgagaggcgcgagcggcggagaggaggagctgtcggtgggtgtggcgcggtcttcggcgcacgaagactggccggcggaggacgccgatgcaggggtcccgcatgtcggcagagctagagaggtggtggagcatcggtgcgtcagccaaggattcgcaggtggtgagcggcgggtgaaaacctagtccggccttggccaggccgacaatgatggttcattccccctcctgagggcgttgtcgtgctgcctcacccctcaagggtggttgccgggcgaaagcctagtctcggctcctttgagccccgacggacggtggcggcggtttttttccgtcgcttctcttcttgaagacgtcgttttggcatcccttagagggcgatcttttctgtgttcctttgtcggtatagcggcagtcggtcacgcttagcggcggccggtctggtgctagccttctcccgggttgtgtgttggcgctgtcggtatgtgggtggtggtatatttttttccttttcctggttacgaccctccagggttgtaatcttgtaattttttcctgctctatcaatagaacttcgcaccgtcttgtgcgagttgttcaaaaaaaaaaaatgtgttactactagagcacatgggcctttctgatatagctatggctgtggttgttgttgttatcaatagcattaaatttgagtacatgtcacaaaaatccaggtttgggggcatttataacacaaagtcttaggttttacagtttgtttcaaggaaccaaagttttgaatcaaaatgttttagaaaacactctttttttcccgagtatgtaggagggctgcatatcatttgattacagaagaaagaattctgcacaaaatccacagaccccaaaacatttttatatgatactaattactaagatataatgaaaatattgcaccttttagtacataattacattggtagacccgcaatcaacattctcatcacatattttctccttcctcgttttcatactccctcctttccaaaatgtaagatgttttatttttgtcctaagtcaaaacttctttgattataagttcataagtttattttagaacttgtgagcatattatctatagcaacttccttttgtgttctaattctgtaagactgctctgaatacctggtctacatcaggatatagactgtgcatgtttaacattatttcttctcattatttatagttcaaaacatagtccgggagtaaatttatatagcagtgtggtgattgctgcacatgcgctgtctgaaccaagtgctacttgcattcacagctgttaactatcccgtgtctagagtttatctgtatttgccaatttcaccaagaacaatggcaagagagcttaccttacatctgaggtcatttttgttttctcattatcatggcagctggagatccagggatcactggttcttgtccaaatagaaaggaatcacaaccactaaactcaagatctgcatctctgtttatgcaaaattacttccccacaattcctgtagagaatgaagcgtgtaaagagaattctgttggactaccacagatggtccaaacttgctatactgcagctggaaatagaatccctaacttcatagctgtgaattactacatggtattactttatcagcactgctcatacaagaaaatgcatatctgttattgccattgtatccaatggaaattttcttactatggcagcgaagcgatggtgggggtgtttttgatgttcaagacaggatcaatggcgtgacactatgtggctgcaacaccattgctgcttgccaggtaattgtgaagccaaaagtgttatttgaaacaaaaatagtaatgcatgaatcttagaacaaactattcttacttttgagcataaaaattctagcacctctttcattcaatattggtgtgtttcaagttgcaattctcatgaagaactatttttacaggctggggcaccagcgggcgcatgcaaggacaccggagcccctaaccggacttcctcttctgtaaatggaaacgtatattcaggaactatagaattcaagtcacctgcttcagcagccagcatttcgaatgctaacatccctagtaaatttgttggtttgctactgctaggtcttgtgttgatcattaagccgttttgatctttcaggcattctttttttcttttgatgagtttgccacgtttctttttcgtttttaatgtctcctatgtgatgggattacaattacagtaagtaatcttgttagccatctaggctagaatagattcagagagttacggtctggtctgtttggctgtctgacctgagaaatttcctctcatgcctgctcgatatgttctaggctagcaccttacgttgtacccatcacgaagtaatacaaagaaattgaatggattaatggtcctatgggttggcaccaatgttctacacggtgtgaacttacacgaaatatgttagaatgtttgaaaaaacagccagtgatcagtgtgctgcaaacttgcaatggaacttaaatagcagaactacttgtttttttcagaatttaaaagacttaagttaaattaaacgctctcaccgtaccggctaagagcaaggctaataaaacagccgacttattagctataaggttctttgtagccttctctctattcacccatataatagttagctatttacaattaatatatgatccacttgtccctcttacagagagtttcttcgttcttgtatccaagccggctataagtttacaacctttttctcctctctctcctctcttctctcctctacctcagcatttagtcggtttatagcctactattatagttgctctaagtaatcggtgatcgtgaagtgcaactcatgaagcggttttataagtgcttttgcacacgtggaccataagagagtagagggcagtgatgatattactaatggaatcagttaaatgatttttctaaaaaaattatagtagtttctcgtctcaaaataaatctaaccctcaccttcaaagctatggtagcattagtgtcgagaaaaaaaaatatcacttggtggattgaaggctaaaacattttccaagaaccaataacaacatgagttgtggtacttttacgttgtaccaaattatttgtttgatttataaagacacggtcagcgattaattgattttgggggagggtagaaaagatggtttgatttgagtttatatacgaaattcaacccttcattcaggaaaataaatatcataattagtgaatatatattttgccgctcttccttgtccacgcagtactccaataggaagagaagatttttgtttctccagtcaggaaaagtgaaatagatagttccaaaatagaaatcttggattttgacggtagcatcgggggtccttttcgtaggaatacgtctcgcggttgaaaaatatgtaggtcaattatatatattcgtcagaatataatacgaaaaatagaggcgagtagaaaagcaaagcaagcagttagaaatccacacgcaagaagagaggaaaacgtgatctcacctgaataactcgagtgaaacagggacgtcggaagcagcagcgccaattggttgtgcgtcgtcttgtgtgtctctttcacagcgacacccgcccttgttgcgttgcgtcggcgtatatgtacgcacgcacgcgcacacgcacacgcaaattaagcagagcgttccgttgattttgctcgtggtgtgtgtttgtgtttggtatggtttgtttctcgatcggtacatcgccaacttccgctcgagtttattttatttttctgaaaaaactgctcccgtataatttatttcgtgcgtgcgtgtttaattgtcaacccatacacaacttgatctatgtatgtattgtacggtcaagtaaaaggaaattgtggtatactagtatacaatttaaaagttattattgctagcattttttatttttgggtagagcgttgtagtaataatcaatttcattgagtagatagaaaaggaagcatatggatgcagtggagatttttctcgtctctggaatccaggacggagccgagcgagcggtccaggacaaagagcgcccatgtccatgcccatcacacatctccagccgatgggcccatgtgatgcgcgtcccgcagcccagccggacccagtggcaccatccagccagcgtacatcgacgacatgtcaaatgcgtatatagccgagcccttcccctaggccctcctagctatagctatttcaccgcttcgctccatccatccgttccgtttagtttgctccaagcgcaagcgcaagcggcggagaggaagccatagccacctcccaccacgccttggcctttccattacctacgccttcccttcccttcccttcccttcgcgcgctacttggaattggattagccatagccatggacgccacgctgctccgctccgccgatgccgccgtcgccgtccgctccaccaccactgcgccttcggctcggcctcgccttcaccgncccagtacccttccccttccgtccttctgcgcctgggggccccttcgcgcctacgccgtttccgcttgccccgcgcccggccgggtataatccacttcattcattcgaccccccttttccctttccccccttccctcaccaaatcaacagcttccttaacaacatctacttactgctggtgctttttttttttttttggggggggggggctatatattcatcttttttcctctttttttgctggactacacaacaccgctcccatcccaaatagtactctatttaattagtgctttgttgctgctgttgttattgttgtgtgctcatctcaaattagtgcttcttctcaaatctcaaccatatgtgtacctttcttccttttctcttggaatttcatgaagctgtctgtattcctctaactgaaatatctattccttttcttttgtgtgagtgggaggaatatctattcattgtttcccaaaaattcgtcataaatgattttcccattaattctccaaactgatttattttacttcgaatatattcatacatactgtataggagtatgctaggagtatacatggatgaactataaagtttcaaattaatcattattaatttctgatgagatgcaccatcttcctccttcagcacaacaacggagtctacacagttggtgacttcatgaccaaaaggcctaatctccatgtcgttacacctgcaacctcggttgatgaaggtactaccttcttctctacttctataatatgaagtatgtcctaactatgcttgctgctaaaccaaatcgccaacttattattctgttcgtttttacagctctcgagacgctggtgcaacacaagatctctggtttccctgttgttgatgacaccggaaagttggttagtgcccatcaaaacttcactctattcaatctttttctacttactctctgcaatttttattctcaaaacagttatgcttacaagtcaacaacgttgggcttttctcaaggggaaatgatttattgctaaatagttatctcagtaacatgattctaggatattttctttctcaaacacggtttcaaactttatacctttttacatgctaaattcgaactagtatggtgattctacctaaaggatttagagatcttggaatgctcacatctagaatgtagtgctgattcataaaacggtgtccttgtccccatgacatgcgggccttttgatctcctctattatgttgtgtcttaagaaacattacattgacattatggttgaattgtatctgatttctcattctgccactcaatcttacttccacctgcaggtgggtgttgtctcagattatgatctgttagcacttgactcaatatcaggtattccttcttggaccttcaaatcacttgcttacaacaaattcatattactagtacaatattgcatcctctaaactgcataagcctagtatttgtcattaacacaccattgcactaccatctaaccatctgcttgcagtcatacatggtggtcatttgtcaatatcttgatagcctgataggcaggatcacaactagaaagaaccataagtagtggcggcttggaccatataatcttttgcatacctacaaccaaaccttgtttaaaccatagcaaccataactttgatctgaaattctgaatgcaacaaaagctttgcccacactgcaacttttctggaactctaagctgcaaagattaacttgagctatttaacttattttttgaaagtatactgttgggtagtaaatgccataatccttgtattcttacattggtggtattttaaatccattctttcaggaagtggactgactggcacaaacacaagcatgtttcctgaggtggatagtacttggaaggtatgttctaataaagatagaatgttacatgtttttttatatatattttctagctatgcaccattttcttagattgggttatctttaccacctactgccaggtgttaggatggaatggtctggtttggaataaaagcaatttttaatcatggaaaatccccagtttctatattcagaagcaatgatcctccttaaataaaatgttcccaccacaaagaaccttcacatgttatgacaaaatgctgtttgactaaataataaagtagaagtgtaccttgcatagtggctgatgtaatggactgtgttaggtccagcaaattgtcacttgttttccctatcaagaatgttgttacctctcaacttaggatgcttagtcagtattgggttaaatactaaatcccgtataccttacatatattttgtaacagtatttaccacccattttgtagcacaccccagtaatgatctttaaaatcttggtattcttcactcttcatgcattagtctgaaccacaatttagtacttcaatttggtaaatatattgtttctagcatttaaataaataattagtcatgctccacatattgtttgtagtagcagatcttttttttttatctttatcaattattttttatttcacacgttaatatattagactcattacgatcgctgtacagacatttcgcgagatacagagactcttgagcaaaaccaatggcaaagtcatcgctgatgtgatgacttattcgcctcttgcggttcgtgaaagtaccaaccttgatgctgctacaaggtacctacaaacagtccattagttctcaggaccacgtctaccaatttattatcagacatcacgattggtgttcatttgtttcaggttgctacttgaaaccaaatatcgcagattgcctgttgttgatagcactggtaaattggtgagttgatctgcctttccttccttccgctttcgtttcagtagtatctagtcttaagtaaagtttcttttctcaaggttgggatgatcacaagggggactgttgtcagagctgccctcaaaataaagaagacagctgaagaaactgcttaaattagacagtgtagatgattctttataagtcatttctgggactgcagtcacttggaaatttagtccactgaaacattatttggtgaaatgaactacatcagccttacagatactgcgaattcgacagtcaattcttcttggaacatagatggatataggtattgtattgttgcagatatttggaatatagccgcaatctgtttggggccaccagatttggtcgcctctccttattaggtagcataacatggagaatgttattatttttatttttacttttatcattgacttgtattcaagaacatcagtgtattgaaatgtaacacttctgatatgatgataccttccgcatctgggttgaagtgaaaatattttccaatgtttagattatacaacgaacaaggttgtaaaaggtaaatttataagttagagcctacgtttaatttcatcatggtagttgtgtagtttttgagaatgaagttgaaaaagattatatgtttgtcagcatacgaagtaaaggccaccccttttgcgtcactgacgttctttaaaaaagaaaagaaaggttgtaagatcttctaagtatatttttggggtttatgttagtttgatagtttctaaaactgataagtcatcctcttgacttttgtaacaattcaatttactcctaaactataatactagacatttgacacccatccatgttcatgctacgtcgagatccttgatcatctactcgactgtttgacgccaccgtcatctttccgaacatgtgccatcgtggcttagggctcatggtgcttctagactcgtagtcggtaagattagattcttagtgagcaatgaactcatttacgaagggaccctacctccaatggtaagataccgaaaataaatttgataaaaagatgggtgcagtagttgatgcctatcgcaaaagtagggaaggggagggttagtcatttaaaatcagacgttaccctttttatgataatttgtttatagtggtgaaaaaataattcttgaaccagggtgaaaatcattgactaagttattaggtttgtcacatagtgatggtgtgatatgacacctcatactaataaaatatgttttaatagtactggttgtaaatgacttgtatgtttaatatgtgtttcatacttttaatagtaacaaccatggtaattgtgtagttttttactcttttgatttattttgctgaagttccactaggaaacaatgaagttggacgagattataagtttgtcagcatgtgaagcaaagaccacccttttataaaataaaaggttgtaaaatcttccaagtatttttttgagggtttacattagtttctaaaactgacatgcaatcccagtcactcttaaccactataacacagtttaactccacatacacggtacatccaaatacattcataacagtacatttataattgtctggtaatcatgtgcaatttaccccaatcccttgacttttgtgataatccattttatcccctaaacaataataccatacatttggcatccaaccatgtccatgctacggcaagatcctttgtcatccactcgacagcttgatgccaccatcctcttccgaaaccgtgccatcatagcatagtgcttatgctggttctagatttgtagtcaataagactataatcgtaatcatagttaccaaggagctaatttacggaggaaccctatttccaagagtaagatgttgaagatgaagtcgatcgaataggcaggtgcaatagttgatgtctattgcaattctcaaaagtggatggagggagagttgtttaaaattggatgttacccttttcataataatttgtttatagtggtggaaaaataattatataaccaaggtgaaaaacattacggctaagctagctaatggatttgtcatgtagcgatgatgtgatatggcacttcatactaataaaacatgttttaatagtatctagctatgcttataatttagtatgtttgtcatacttttgttgttttcatatttattttaatttcaactgggccatacaagtgatattgttcaatccaaatcaataatcttttatgacgatatcaacgaagtaacataagacaatgcatttaagagctccttgtaaggctcgaacaacaaatggtaacaaatcaaattgaaaattttcaatataacaatattggtaaagacaatccattaagattgcgaataaccaacaacatattataagtttatgtggcatttttagtcggactaactctaacatatttttatctagtttcacgctaatagtgttgcctaaacatgatagctcgatagaaagaaaatataataaatttgctcgtacattggtccgttttagtctacccactctatttgtggttaagtgacatgattaaaatgttacacaaatttatataagtaggtataattcaactagttaggttccttgtggtagaaccgatccacttaggttcaagttctagatagacttgacacgagtgtttatatttttggctaattattctttcattaagtggtagacgacttactatgtgaggctgtattcgggagcgccacagaaaactatatatatgcattaacacatgattaattaaatattagctaattccttttttaaaaaatagattaatatgattttttgaaacaactttcgtatagaaaattaataaaaatgtatcgtttagttgtttgaaaaacgtgcacacggataacgagtgtaagcgcgcggtgaatccatacgcttgcgctgtgtttcttacaaagaaaaataactagaaaaaatgcccgtgcgttgtaacaggtgaagtctattttaatcttattattgttatatggtttagttaagataaaattcaccgtgggagttcgcttggatatatatatttttagaaaatcatgagctacagttaggagtccgattgtctcaagttagcatgcgagttttttaaaaaaagattcttatatgtttccttccgtattaccaaaagtaaacgatcttaaaaatcgactcaaataccacggatatgtatttccaaaagcaaacgaacttaaaaaccgacccatacacggatgacatatcaaaataccggcaaaaacatctttaatttttataatagtagagatagagatatgacacaaaatttaatttggaaaccttttttaagtagtactattagtggttgtttttgctctaccgttttgggttggaatttggaataaggaatacctctaggtgataggtccgagtccggacggaaccagctggaatccatccaccgaagtggaagcgccgaccacgtcacggatccttcgactacgcggacacgtgcacggcccatgtgtcccgataggagtcgtcggatggagggcggaggcggacggagggtgaggatccgataagggttttgggggcgggggtacaaataccggggctccccgggcctcgctgcctccctccctcgttgccgcgccgcagttgcagttgcagttgggaggcaaatctctctcccaacccttatcaaaccctaaaccgaaaaaatttaccccccaaaaaaatccgcaaaaacaaaaaaaacccaaatcggagatggcggcggcggcggcgcaggcgcaagcgcagcaggcggcgagctccgcgtccgagggcgggtccccggcctaaaacatcgaggccgctgcggcggcggccgcctccttcccggcgacctcgctctacgtcggggatctcgacgtcagcgtgcaggacgcgcagctcttcgacgtcttcgcgcaggtcggcggcgtcgtctccgtgcgcgtctgcagggacgtcaacacgcggaggtcgctcggctacgcctacgtcaactacagcagccccgccgatggtacctccccgatccgcctcgccctgctcgattgctgttcttttcccacgaatctagcatctaggtttaggtggattgcttttttttccttttcccaagacgattagggtttggtactctttttttttcttttcacacgtttagggtttggtctcgtcggattttagggtttggtctcgtcggattaggtttgctaccgtcggattagaatgccattagaattgatgtcgctgcggcagtgttaaagcatgcatatttcttttaaaaaagataggaaggctgcccttcttttttctgacgtggttagggtcctgatcctcagcgagctattccattgcagaaataactatggtttagcacaaatcattgccttcccccaatataaatacatttcagtggttcttattttcatatttgtaattctacatcatgttcggtaatgtccattaatctgttatgttggaagataatgcaaatcatttaagatggtacataaacacccctattgagcatcacatttctgtctagatggcaggcacgataaattttgatatgaatcctccttaaattgagtaaagttattatttttataacgtttgtattggagattttgggcttttgcttattttggtgtaatatctcctgttctagtaaatgctctcatctgcagagatgcacgtgaatctgttatgtcacctaaaattttaaaacatttgagatgccatgactaatatgcaataatttctaagttgtgctgcctttgggaaacttgcacattttaaaattctttgcctaacaacatatatttatttactactggctatgatagttgtctatttccttttcttacagaatatccacatgcatctacaatggttttatttgttgcttgacttttgtattagtcctttcatactaaatacgttatatctatcttgcagctgcacgagcgttggaaatgctcaacttcactcctatcaatggaaaacctatcaggatcatgtattctaaccgtgaccccagcttgcgcaagagtggcacagcaaatatttttatcaaggtatctgtgcccactcttgaaagctattttttcatcttttttttttgtagtttgacatcctgacttctcttttttcagaaccttgataagtcgatagacaacaaagctttgtatgatactttctgtgtgtttggaaacattctttcatgtaaagttgcaacagatgcttctggagaatcgaagggctatggctttgttcagtatgagcgggatgaggcagctcaagctgctattgataaactcaatggcatgcttatgaatgacaaaaaggtgtatgttgggcctttcattcgtaagcaggagagggataattctccaggccaggtcaagttcaataatgtctatgtaaagaacctgtctgagaatactactgaagatgacttgaaggaaatctttggaaaatttggaaccatcactagcgctgttgtaatgcgtgagggagatggaagatccaagtgttttggatttgttaactttgaaagtccagatgatgctgctcaggctgtccaagagctgaatggcaagaagtttgatgataaggaatggtatgttggaagggcacaaaagaaatcggaaagagagatggaattgaaagagaaatttgagaagaaccttcaagaagcagcagataagtatcaaaacactaacctgtacctgaagaacttggatgatagtgttgatgatgataagttgagggagctttttgctgagtatggcactattacttcctgcaaggtttgtttacttgtctgcctatgcatgtgtttcaatgcttatcaatttctggtgctaataatagaaactgtgccataggtgatgcgggattcaaatggtgtcagcagaggttctggatttgttgcgtttaaatctgctgaagatgcttcccgagctgtaagctggatgtgtatgcatgatatttaggttgctatgtttcacagataataatgtcttgctttaatgtctccctacagcttgccgaaatgaacagcaagatggttggcagcaaaccgctctacgttgcgcttgcacagcgcaaggaagacaggaaagcaaggctgcaggtaagaaatgatcgatgaccttgttctttgtttttatgaggaccatgaggttcctcaattggccagttttgagagtagcattgtgtgtactttttgcacgtcacaatgtgagtgcgggtgttatttatgcatagaagagtgcggtagctaatattctgtgatgtctcgcattttgaatagaattctggcataccaataaacaagctgtcattagattgaattttcttggctcacataacttgcatgtttttcattataatgcttattattactttctgtagtatgatgttggtggctattccttacttttgcaggcacaattttcacaactgaggcctgtcccacttgctccttcagttggtcctcgcatgcccatgtttccacctggtgttcctggagttggacagcaactgttctatggtcagccccctccagcgtttatcaacacacaggtaaataaggcttaattttcttattgatgtgttcttttgacatcttctctttccataataatcccccttttttttggtgttgtgtgttagtgtgcacaatttctttctttcataagttttagtggtatcttcttactgctttcgcttgtgaccatttgctttgactatttggcggttgcatagtaataagttcttgctgacaaatgcaagatcatgatgtaacgtttaatgccactgtttaatttccagtcctatttataaagattattcctgtaagaatatagcaaacaatcatgtcctaaaggcttttatgataattatgaggtgatcgaatgctagtgttgtttcctttgtgcatttagattaagtggttaaatgatattgattgaacttagacatatgtcttactgttttctgattatgtctcatatattggtcttaagaaaatactacatccaacctgaaagtataaagcttgcttatatgtagtaagtggcaaataattttatctagcaaattgatgtcttcttattctgtgttgcatttatgaatgttatactggcgctgtatttttaactttgcaacattgatcattttcctcatttggttttgcaacacaagatggtcattaacactacacttcttttggttgataagacatgcaacactaagttgtgagcattcagttgtttaatcatgcatctagagctctatgttgcttgctattcctgtttgccgaggagacacaaaactgtagtaatatataacccgtccaaaatttgacactgttagatggtcaagtgcaatttacatttgtttcataggaatagtccaatagtttttttttgtcttgttatgatggactgggtggatacttaagattgtttatatgatttgctggcttgacaattttacctttttttattatagcctggtttcggcttccagcagcctcttatgcctgggatgaggccaggtgcaggtccaatgccgaactttatcatgcctatggttcagcaaggacaacagccgcagcgtccggctggtaggcgtgctggtgctggtggaatgcagcaacccatgccaatgggtcagcaacaggtatgacatatttgtgcgtgtatgctgaacatataataattttccgtaagcattcctgtagtgttaatttgacaattcccttgtgtatcgagtgcctgctgaaatatagttaatgctgcagatgatggctaggggcggccgtggctatcggtatcctacaggacgtggcatgcctgatcctgcaatgcatggtgttgggggtggtgtgatgccatctccatatgagatgggaggcatgcccatgagagatgctgctgcgtcacagcctgtacctattggagcattggctactgcactggccaacgcagcccctgatcagcaaagaatggtttgggacctcatgcctttctctgtttcttatgcatagcgtgaacgtgttcgtcttgaagcgtgacccatttgttcattgattgttgcagatgcttggtgagaacttgtatcctcttgttgatcagctggagcatgagcaggctgcgaaggtgactggcatgctgctggagatggaccagactgaggtgctgcacctgctcgagtctccagaggctctcaaggccaaggttgctgaagccatggaggtccttcgcacggcccagcagatccagacgaacgcgacgcctgaacagcagcttgcttctctgtcgctgaatgacggcgtcgtttcctcctaagcataacgacgacagcaatttttgatccatatctcagttatcttatctatctagaattgaaaacgacttggttacttggtttattggagttttagttttattggtagttgaactaggcatttaggcaatgcgcgtggattgggtattttgtttgctcggatcttttattttgctttataagttatcatatggattgctactttatgtcttctggtagcatcttttattttgtgggtgatgcatgatttagcagtcttgatctgcaccaaatgaagcaaactttggctactttgttggcttcaccggtgtgagcatactgcgtcttcagtcttcacttgctttagaaatttccattcggtccttgcggtgaatatatacgatcatcacaattacacattttcttggctggtactccctccgtcctaaaatataataacaaccctcctaaaatataataacttttagccctagaatttgtcccaaaatataataacttatctaccaatattttctccttaactaattacaattctctatcattcatcttttttcatctatcttaactgctcatccaactataacccttcaccatttatcggagggagtagataattataaacagtttatgcgtccgtccccgtagagaattactaagagcaaaatgaccttcaccacttatcggagggagtagataattataaacagtttatgcgtctgttcccgtagagaattactaagagcaaaatgaggaattcctttagaacacaacataagatggcggatggccgcaggtctcttattctacagcggcagtctcaaacttggcctagcccaacgacgagcagagttatagctgctctctcggcctaggagtgtttgggtctaagactctaaggcaggtagagagatggccctagtgaggtactctctccgtcccaaaaaagccaacctagtacaacgaatctggacaaagggctatccatattcgttgtactatgtgggagtaatgggctagctgtccagattcgttgtactaggttggcttttttttagcacggagagagtaataggcttggttagtattctatttatttataatccacatatgtcggctttcttttccaaagaaaaaaccatattcatatctgaatcagccactcaactacttatccaaatcctccaaaattttaatatccaatctgttttcatctctacttataagcagtataggccggttaatcataatggtcacacatgactactatgatgatatgttcttagatagatgatgcaatcttagatggtagggaaaatttgtaaaattcaccataaacgtcaccttgagcttgagatttcctctataatatgatttgttttaaacaccttctaattcaccttggtttgatattcctccccaattagcaattaccattattcacatgttatttcttcacgatcgtgaaatggagtttgctgtcatgagaatgggtaatgagaatgagtgagtaacgataactaagaggaatcctaaaccaaaataaattaggagggggtatttgcgggggatattaaactcagggtgacatttaggtttacttttgcatttgagggcccacaaatatattaagaagaagaaaatggtatagggctaatctaatttgctctttggtttgaaatcctaggcttgccctaagcatattggcccatatttgtgtcttgacaaaaatagacacgatcatgaccgttggtctgaatcgtgcggcatatctgatgggtattgaggtcttacaagtaacaaatacttgtttgtgcaaccctagacccaccattatcttgtcccccttccccccgccgccgccgccgccgccatttgacctccatctctggattgtcatcacaatttttttcttttgtctagcttctctgcgctctacttgcgaggttgatcacgatcaataggtccttgatttcttcaccatatcgttgttgctgccatcgtcaccgttgccaccaccaccacatcaaggagatttggtgtatagttttttttttaacaaataagtcgccagctagacatagctagataagtcgctgtcatcttgctctctttgtttgtggaaggtgggtgaaggagaaggaagcagatcagatggtgcggccggggagaggacaacggcggatcgatgctgccattgaccacctatcagagtatggctttccgaggcccataatccgtcagaccatcaatgaactcctcgcggacacggtaatctgtcttgatgtttttctaggttatcttcgtgtccttagaaggttgctaattgaacttaatttcagctgtatgggaggaatgggtgggtcttcctagaggaaggctcctaccgcattgtggtcgacagactactcgaaaaacaggcaaatcagcaagagcagcaggaggaagatgcaaaggttttcttttctttcttcctgcgctcatagtttctcagttccatttttatctgcttcggtgtttgttgtgcggagcaagtgtttaagttgcagtagtgagtgacgcaactagtaatgtagcaagaaatttttcattaggtagtctcacttcaaaagttcatatagtaacatcacataccaaaattttcggacaccgtaaatcccatatatagatatgagtacaaatttatatatataaaaaagatacaaatgtagcaaagtgcaaaacaaatagaagtcacaaatcaaactttgttatgctctccgtttagggttattttgtcaatattgttgagcatgttttgcaatacaagtgaacatctcaagaagatagactctttatatctgttcatcaatgaaaatgaatcatgaacgtaatataaattgcacgaagatagtatagtaacattttactaccattaattcgggtttgcacatatggacttatattttcagcagtattaaaatgttaaaatgccagatgcatacgctaatttggagtgattagagtgatcaaataattggccaggaaaaaaaaaccagaaagctattaaaccccagtaccccacctagttttccatggacagacaagtcaattgtacttcctccatttcatattataagactttatatcattgcccatattcatatatatgttaatgactttagacatatatatgtatctagattcattaacatctatatgaatacgaacaatggtagaaagtcttataatataaaacggagggagtagctcacaatcgtgaagcgagagagacgcgaccggcttccaccgacaaatcagctagatgagccctataggaagccaggaaaaggggcgaacggtggccgaggggttggcggccaacgacaaacgccgtgatggcctgatggttgacgggcgggaagggagacatagccgggttctcaaatggcctcccgggacctccacggctcgaggagaggtggactagtggagagagatgttgacgcaccgaagtgagtgtaggatcgagatgtcgactagagggggggggggggggtgaataggcgatttaaagaataaataacacctaatcaaatctaacctaagttgctaggcttggtgagggtgaactctaactaagcaactaagttatgttttgcaaacctagggtgatagtggctcaattatatctctaggaaagtaaattgcacaaatgtaaatgcgacaatcaaatgagacaatgagacaagagatttttcaccgaggttcggaaactcgccggtttcttactccccgttgaggcaagcccaactccaccgctcaaccacgaagccaccgcacgcccccttcgtcaaggggtgggcaaggcgggagccggcccacggagaggactacccaagcctcgatcactcggggtagttcttccttcactccgaaggtggtgaactccaaaccactcacaaaccggcactgggcctcctccacaatcttctcggagaggtcaccgggcaactcctccacaagccgtctaggaggcggcaacctccaagagtaacaagcaatgacccggtgtggagatgatcaagtgccacactagctctacaatggaagcaaatgcacttgactcttggctaaacaaccctctaacacactagatggatgaacataaagctcaagtgagtgtgagagaggtgcaaggagtgtatgcaattgaattgggtgccaagagagcccccttgctgctggtgggggagtatttatactcccacccaccaaaactagccgttgggggcgaaatcccccaactctgtgctctgccggtctgaccggaggtatgtggccggtcagaccgtgctactcaactagccgttgtagccctgtcagagggccccattggcctggccagtcagaccggcatggggtggccggtcagaccggcctcggctcggtcagaccgccatcggctcggtctgaccgaatacggctccgtcggctctgtatcggccatcctgagcagcaccatctcggcctccagggggccggtctgaccgcgcaaatgccaccggtcagaccggccttatgctccggtcagaccgccttcttgcggccggtcagaccggccagggcacgccggtcagaccgccactatgtggccggtctgaccgcccctggtcaggccgaacccagtgaatttgcaagtgaatgtgtgcgtgatgaaaaaaagagcacaaatgaaaatgcaatgacctaatgtggcaattataatcatctctttgctaggtcattacccttcttaatagtacggcgaaactaaaaataaactagcaaatttgatcgccctacacctcgatcaattctaaattaaagcgctagttttaccgtcttctttccctttgctttgcgtcgtcaattttaatccatcgataatcatccatgcacacatatgacgtggacctaacttaaaatgtatagctcaaagacaacggttagtccacaattagcacttatcattaattaccaaaattaacaccgggggcctagatgcttcagtgaggcaacacgatgaatgtgtacaccacggtgccacagcaaagggaaccacgaggctcaggcgctcagccctagttaggaatgacaacagctctgcacctgtcggtttcatcaccccattcccaccctgaggtaaagggaatcatccgttcccatctccatccccacgttgttgtaggttttcccgtccgtccctgcagcgggtatgggtcacccatgggtctttacacccgacaacactatcaaaatataaagtgcaagccaggaacaatccccaacccaggtgacaattagcctattattaatgtattgagtatgcaattagcagtgaaatcatcattaaatcggctgattgaacacaaaattgacccaaaagaataggcacaagcaaacagagtgtaacttcagtgcttgaaaacaagtcaaccttccgtgctgttagcctgctacagagcagcaagatgtttccttcaaagagaaagccaagaagttaacgtagataactaactctggtagcatacaaatcaactactagctgactgctggttggtgatgagtccgcagtagtggagctagaccttgggcgtgcggcctggttgccttgtctcctagagacatgcggcgtggcttggatcccttcacacgaaggcgtcggccatcggtatcgactgtcgatctggtgtcggcctggaggtcctgtaggctggaggcgacgaggcagcgcatggatctggatggagggaagcggcggaggagaggactctatcaacaatgtgagtgtgggatctagggttttgggggcgtatatggtggtgttctttttttctaaagatgaagatgacgtttttttacgcaaaacgatgtgatattaatgtatgattgattgagttttaatcattacaaacttgaaaagtagattaatatgatattttggagcaacttttatatagaaaatttttacacgaaacacaccatttagcagtttgaaaagcgtgccatgaaaatcttaatcttcatctagctcttgttggagaaagaacgggacctatatctgaagtagatcataacagttgggtttttaatatctatatgggtgtgagttaggccaatctagattgtaggccttgacgcgtccaagtaaagtgtcactattttggcaaactagaccattgggcctaggactgctgcatggccatattgtactaggtaacctactacagacaagtcaactacaagccaacatcgaggcatgcatatgcatgctcctaatgatatagtcatgtatcctcgcactagaaggatagaatgagatatggtggcacatgcctggttcatttgaatgatcaacgtgcaagtatccctcagcagggaaggggatccttttttttttgcggggaaggggggatccatttgatcatgcttggttcctcaacaatggaacaacaagccacacgatgggtgtcgtgatgccttctccaagcttggtagcttttgtaggactgccaagtttggggacgtctctagggtctgcattgatggtcttggcatgatgctcttcttctataagttcggcgatcactagcaatgtcaagagtctaatatatttcttgactattcaacaactgggagaactcactgaggcttgttcggtgctctgggttcccaactcctgtcccacgttctccgcgtgcacgtttttcaaactattaaacggtgtttttttttgcaaaaagtttctatacaaaagtttcttaaaaatcaaattaattcatttttgaaaaaaatagctaatacataattaatcacacgctaatggattgctccgtcttccgtgagaggatacaggttactaaccccaagttacgaacacaccctgagtctagatgaaaagctatggttgagaacgatgtcacgtaggttcaggatcctaagtggcacagcgtggctgtatgttctcaacatcacgcttgtatagctggtgtgccatggaaagaccttgatttcacctatcctgaatttattcgcaatagatcaatataggtctagaacttctagtctcggtccgaaagttctcgtcaaattactgaaagttctagttagcaagaatatagcccacgaaggggaaatcacaataagcatgatttgcacaaggtagatacaacaatatgctatgtaaattgataggtaaacattgcacaagctatcacaatgcaacctcacgaagagaatagtaacccaaacacaataacggtagagagagagaaccaattctttttaccaaagttcggatccaacgatcctgtctccatcgagaggctcctacaagctgagttgcattcaaccctaaaacccaccaattaaattggttcttactcagtttaccccttttacttatggaggtggagtagaacctccaaaaacttcccaggctgtccacaatcaccagatgcttgcgagtgacatctagttgactaggaggataacctcgaagagtaagaaatgcgctaaggaacaagctcggtgctgatcatgcccccatgataaatccctacttttaacttgcactcaatcccaaaaatctgtctaatccctgcccacttgatacactagaagctttagatccaagaataagagagatgggaaatgtctaggaggctatgataatccgagcaatatacagactgcttactaaaaagtataatgcgcatagctataagctaactacatctttaaaaattgcatagtaaatgactttaataaaaagcctttatgcaacgaataaaggaattttgtaaggtattgggttcacacagtgcgtatatcgccaagacaaatatgctaagttcctataagacacacaacaccaccacacttgaaaatatattgcatatgtggtgtaaaatctgagtaaaataacactcataaatggattcaccaaccgcctaaaaatgaccaatatatattcaacctaaaccatgatattggttgtatcaaaaaatgcacgcatgtgacgaaaagcaatgatataatataaaatcaattgcttcatgaaacccaaacaatgtctctaacttataaaaagttaacagagtagctatatatataaagatttagtgcttgccactgtttaaattgtactctgtaccaacccctaacaagttgtataacaactgctgtatcaacccctaacaagttgtgtaacagctgaataaaaggattttaaggtaataagtcacttgaactcgcacatattgccaaaaacaaatatgcttaagtccatagggacatgcgatagaccacacctagaatatgggttgcatacatattgggattagccccgaaatatgcccatcaatgcccttgctatatgacatgtatagcatacctattaataagctcttgagtgatagattttctgggtaatgtagatgaagtgcatctcaccagagcgcccaaagtagatgcgataatcaaatccggactggagcaagtactcaaccgatggccctcgtagggaataatgattggtccaatctttgagcgtaggaagtaggcacatggccatgaattcatgtcacatatatccaaaacaagtccaaattgaaggtatgatccttgtgcttgagctggtaaacccctaaaatccttgtgcttgtgattgaaggtatgaagtaggcttgtccttctgttgtagttgaaatagtccattggcggcagctgatgtagttgtcatggaggcgagatcaccaacgtgaagatgatatcgcccatcagaagtgacggagatgttggtggtggagacgaagttgcccatcaatgatgatgatgaaatccaccaaccgtggagacggagaaaccagtcagcgatggtatacgcaaccaacagtaatgacgactggtggcaacagagatggttagctgtgaagacgaagttgcccatcaacagcagcagaataggctaggtcaaagtggcatagcaggatgttgatgaagatgacaatgttagtgatctagtcagattttaacgttgatgaagtccagcttcctgaagtaaagaacctgatggatagtagttgaccgaagatgaagataatgccgatgacgaaggtgtcgatggtgacgtcaatgataataatccatcaaaatgtcgagaatatatccatgctcgagcagttttcttgacgttgatgtgtgcgtgacgaagattgatgcaacacctcttgattatgaagatgacattagaacttggtattgtagctattggagatgcttcacttggaggaaagtagatgttgatgctgctgtccaacttgccgaatctaagtagattggttgataactccaaactccataggcccaaacttgttaagctcaaagtcatatacgagttgtactccagagggcagagttgaatctaaccaggacatgtaaattaaatcttgaacttgatatttgtgaaactcggagtaaaccgtggaagtagctgagatccaatgttgccgatgagaatgtcagagttgttgaagtagaacgcttgctctagaatgaagatgaagataatgactcccaaagttgactcgttggctggttaattgattacttcatcttgacataacgtttgtcgagatttagacgtgtttgtgcagcccccgactctatacttagttgggaacaactgaacatagagtcaagaaactatagcttcttattgtcgagtaaccatcacttgagtaaagatatgcgttgaggatgttcgagtagaaatcttgaggattggagcaccacttgtagtagattagcacgacgtcatatttggtggcgcatgctgagtgaagtagcaaagctggtgaagtagaggcgatcggaattgctggtgatgaagatgatcggctgcaacagaagcaacaatatgtgaagatgaagttgtctaataatgatggcgaaggcgctcacccgtggaagtgagagcaccagtcggtggcggcgtaaacaagctggtggtgaaaacatggtcacccatcaatgacagcataataggccagcggtaaaggcaaaggcactagccggctgcggtgaagacaaagatgcccatcagcagtggcataatctcacaaccgtgggggcgaaggcaccagtcgacggtgatgaaggcaagctggcggtgaagacgaagacgaccatcagcggtggcataatcgcacagccgtggaggtgaaggcaaaggcaagccggtggtgaaggcgaatacacccattagcggcggcataataggccagccgtgaaggtgaggacatcagtcggcggcggcgaaggcgactgacggtggtgttctgactgatgcattcctgaagcataagagataagcttatagacatgaatccctactatgcatatctggatttggatcctatagtataaacatgtaggatgagtagtctttgatgttaatataatactcgaggaaaattcaagcattttgcaatatttataaatatgtatttctcctcgtatcaattttagtttccttgagtagttgacttcctatgtttaaacactatgcccaactagtcatagcccccaagcaccgggagtcggctcaaggcaattcccaaacatgcataggagtaacatgaattcgtcattcatggaacagagctttatagatcaaaatatgtgctaattgggtacttcaacaattatcaatagcagaaaataaatgattttatctctatgcttttgatttattcgagtaatactactaacgaaagatctgcgctcgtcgatggtgctggaactgtgttggcgcgaactaagtcgacaaacacaacgacctgggagatctgcttaactccagtgcatgaccaaaacttgatgagatgtgggtgtgctagtcagtttgatcctacaactgacaagatatataaattgaagatcaccaaagagctgatcagctgacaagccggtggactagttccagccgatgcccataccagctgatgtcgatagggttttgagctatcggctatatgtttgatgtagaatctgacacttgatgtaaataatgatataaagataatcggctgatgataatgtaatgtaacaataatataatccaatcggctactaatggtaaagtgttgattcgaaggttaaaacatgcatcagctggaggtccgatgtcattaaatccaaacgactagataaatagtaaaacctttgttgtgatcggctaaatcctacttgtatgtaatccttgtaagccgatgcaacgtccagattactcatcggctgaaaccccaatgaaacccttattggcaatcaaaaagcaggcaagagattatggttctaaacacgactagggcagttgcagcgcaaagtatgaaaagaaacaaaaatatctaggcaatcaagcctttgactgattttctgggtggtggcaggggcggatacaggcatggggcagctagggcttgagccccatgcctggcttcatgatccccattataattttgaaaaataccatgtaatttctaaaaatatttgaactctcattagttcagccctacgcgtgtagattttctggctccgccactgggtggtggataccttagttaatctaatctagcaagataatttagtcgatacctgcataaaccctaaaacgaatctcagccgatatgagcaaattaagatgctaaactagatttaactaagatatatgataactagcggttgtagaagatagattagaacgtctaaaacgacgccctaatctgccaatgcaaaccgctgagacaagtcatacctcttgtcagaagatctaagctgataccctaaatcgaagtaagaattcgtcgaaaaagtagaaatgtaaaaggtggcgatgcaccgaagttgtattgatcgagagatagtttacaataaccctgggtgtacatatttatacctataggtagatactagtccttcttggacaagaaagaatcttttctaaagataaaaggaaaacataaagtccttatcggacactaaacacactttcctaaagataaaaggacactaacaaactattcctaattaatagttaaactgccataccgcatcctccttgaactcggtcacttctggataagctttcttcagtagattaatttccttaaccgaatctactaagaatccgactattggcgacttgataattcctataagccgattcaaatactctgaagccgatactgactctaggccgatgatgactttggggcttaccaaatttcactgttaacacatgccccccaattttggagtatgagaactcatgcttcaaaattatcttctttctgattttgatgactccaaaattgatcgtcttctgtatatcacaatcaactttcatgagctgatactgtttgcatcaaatgagctaggctgttgaactcgtggcaaaagaatttgtccttggtaggtgttgatagcccttggaatgcaagatctgctagctaccccgatcacactcgttgacggaaaactctcgacgcgacccctacctggcgcgccaactatcgaatctgaaaatcggcaataataaaaggggtagtgcatgagacctaaaagtggatggatgcggagacaaggatttagaaagtttcatgctctctcgatgataagtaataccctactcctgtttggggattgtatccgtcgagtgtgtattattctgacgatctaatagtggttatgcccttgaggggctccctgcccaccttatataggtttggggagggtggggggaggttacatagccaaatatggcatcggtttacttaatctactgtacaatattactgaaccaggactttagaccgttcctttatatacaaggaaacataatacccaagtcatgatgtgttacatattccataaacataatctctcccatatatccagtcggttaacccagccgtgtgggtatatggcacccataatctccacataagagatcaagaatcagaaaatgctgaaacatttcacacaacgctaaaacatctgtgcccattattgtctcaattttgtgggtgattgtttgtgagagttgacggcaaagctgacaccattcccccctttttttttttttacctttttgaccgtcagcttcattgccaataatatcaagtgctacttctatagaattccagttcatattgttgtgcttttcttcctataacctggtgtaccttacatttttagttatcaaaattattggtgtatctaacatttttagttaaccggattgtttgtttatctaacatttttggttaataggattgttagtgtatccaacatttttagttaataggacatagatcagtgcacgttagccttcaaacctccttgatgtattctttccttttagacctctcatgttgtttctactctctaatctcatgatattgtaagttatttcctatcataacatgtttagttcagttggttgccaaacaagtcataattttccattgggcttcccttgtttaagcagcatgaaggaggaactactgcaatggagccgcttccagagaatggcgtgcaaacctcacaagctgaagtgccagctgctgcatctgagccagccaaagttgtagcagcagtggccgatgagatgcccgattctacaacttcagtgccactccctatcactgcagctagacatactgcctcaacaaggcgcccatgctatggatggcttattgagagtgaatccgaggatgatgaattggacaatggagtgtcagctgttgagcaatctaatcctccatctgctacgaatcataagatgagtaatggatggtcatatgttgagcaagcaaggccttcagttgctatgagacatgaaatggaaccatatactcatcatagagggatgctctcaaagaggaggcggccgagcggatgggatgtgcgcccatcctattaagatggtgttgtttcattctaatcataaaaacaataattttctttcaatatctttgtctgatctatctagattgcaaacaacttggttgcttcgtttatctgagttttagtattatttggtggttgaaagaggcatttaggtaatgtgtggattgggtattttgtttgcatggatttgttgttttgcttgttatgtggattgatgctttaaggtctcctggcactatcgttcactgtgatgtgagcatcatgtttatttggttcaggatttcttgaacatttaggcaacaacattatgatagataatgtgttaacacatcactcttctgaccggttgggaactatgcaatttttatctgtaggaaactagatatggaatttcttgtcggtaaggattagagaaannnnnnnnnnnnnnnnnnnnnnnnaaaaaggaaaatgagatcctattcaaattggtagttgttgttgcagtatgcctaattcatgtagtcttgtagacgagaaacctaatgtctataagaagttagaaggtaagttagattgaaactttataaaaatgttcgaatagtagacatgctaccatagccattcatccaagtgcaccatgcacttgacagtcaaacacatggtgcacatggacaactaggtgacacctaccagctaatacacaagatctaggtgagcagtagaaatacacagaattattggttggttgacatatacaagtaacgactcagcaactcagcaatttgcttcccactttgttaggactagcctattttgctccttgagttatggtcgcaaggttagccctaagcgtactggcccaatgggattaggcccatttaatgtggcattcgtacttgacaagaatataatattgtatctcaccatcatggtcattgttttaaattggtagctcatgtttctattgatgagcattatgattttgctattgtataaccctagatattttttcatccgccatcatctcctatatggctgatgccctccaccaccatcgccgccacattggcctcttaatcacgttacatttatctaccacattgtttactctggtatcaacacccgttttgccaaacttctccattctcccgttgataactaaacttgccaatcagcaccacttcctcttgcctcaccttctacatagatgtaagattgaggtaaaagcggttcatacactttcttgttatttttgacatatcatcactgtcattgtagccgcctccgccgcaagcctgtgacgtgctcttccttataaggtacaaagggagtagtaacacaagcacaataatgatagatagaaaaccaattttcttattgaagtttggatccaacgatcctatgtctccattgagaggctcctacaagataggttgcattcaaccctaaacagcaccaagcaatcacaaagactgggcttggttctcactcaatttacccctttttcttatggaggcggagttgaacctcaaaatacttcctgggctgtccaccagatgcttgcgagtgatatctacccaactaggaggataacatccaagagtaggaaatgtggtgatgaacaagctcggaaccaattgtgcctcaatgctaaaacgtttcacacaatactaaaacacatatgcccattcttttttcacaattttatgggtgattgtttgtgagtgggtggtgaagttgacaccattccctcccatttttccccctttttgaccgtcagcatcattgccaacaatgtcaagtgctacttctatagaattccagttcatattgttgaacttttcttcctaccacctggtgcacctatcatttttagttatcagaactattgtgtatttaacatttttagttaactggattgtttgtgtatctaacatttttttgctaacaggattgttggtgtatccaacacttttagttaataggattattttctttttttatatttttggatagcttgtagatgactaattgttgacaatgaacgattctttcgggccagcattcctcaacttagactgaagacaaattataagtaacaaaactcaagtatgatgcaaaaaatttcaaaactaatattgctatgcacataccaagaaatgacatacttcaaaaggattcaaatgaatttactgttccttctgaaaccagattgttctaaagtacctcaatgatgatccaagtatacttgataggtcatttcagaatctttgactccattagagttaggtccatttccatgaaatacttgattaggggataactcttctataattaatcaacctcaggtggtttagtaacaatttcctaaaaacttcatagaagctactaagcaaaaagcgcttatgtcaatagctgatgaaaacttcccttgggtatcaacatcctttttgcctaacttctccattctccctttgttggccaaacttgctactcaacgccacctcatattgcctcatcctttacatagatgtagggtagaggtaaaagtagttgatacactttctcgatttttgtgacatattgttgccacaatcgctgaccagcccatgtcatgtgctattccttttaagggacttgactaacatatacccaataatcatcaccgatttaaatcgtgcaacacatgttttgatggacgttaagatttttccaacaatataataataaatggttgtttggcaacccaaggtaattcttcttccaccatcgtcttctcacacaccaccaccactattgcagttgccaccacctttgcattccccaccgcccgacatcgatctccacattattagctttgtcatcgctgctgatgagggatgttaggtctcgatcttccgatcggtattgtcgtattgataaacaatcgatttgggcagagtcgcgacacaactcgatccggcttctgaacgaacacgctactgagccccgcaatcgcagcaccacgtctcctctggttatcaaccatgccgaaacccggttgacctcgtcgagaaggctaatccttgcatgcgaatcgaagaacacaagcaagaccaagatagaatgcaacacaattgcatatgaatgattaagcactcgactttggggttctacaaaccgatctagcggcgaaactattcttgacagattacactacaagataattgagctattgccaccaaattattactacaaaaaataattcgtagcaatatattgtactattgcaatgatagtttttccgtggtaaataattatattttattgcaacgatctacaatcgttgttttatttagtagttttgttgcaatagaaaatgagatatcgccacaaaaaatcgtattgttgcaaaaaacatgttctatcgccacaattttaatttttgtggcaatttacatagtacatggtacttttcactattttttgttgccgcgatcaacaaattcgttgcaataaaaaaattgttgtctcataatttaacttaattttttcatatgaacacggattgagacaaattttatatggaaattatagctctcgacgagatctacaattttataggtgataaccttttcatttgaaatcttttagatattcaaatctatgattcaaatctcagttacgtaggctcaaatggaacgatatgcattttcaacagaattgatgcgtaggtgagttggtaaaggagagcttgcgtgaaggataggtcttgggttcgtatcctagccaagacacaatatcaaaaaaaataaatagataaaatagataggatgatagattaatatttgaacttttagtttggtacataaaactaatgccacatatggagtggtggcaataatttttattacaacgacgtgaagtgttgcaatatgactttttgccacatccattccgtggcaacatctaaatttattaccacaaaataaaaatcgttgcaataacctattacgacgctatttattaccacggctagaaacgattttaaaattgtggcaacatgcatctattgccacaattttagtattgatgccacgatttttttcgtagcaacaaatgatttttctagtagtgttaatctaagcaaaacccgaatctaaacgacacaattacaaggcccgaaacccaaaatcaaattcggactaaataagatacgtggcttgttttgcagattcccagcagcttggtaggaattttgacgtgggaccaaaaccatctaaaattaactccataagctttccaaaaagtactcatgggcccctaaattccttctagatcagcggctaggtccgtttgaacttgatgctgtcaggaggcccgaatccgttttcaaaacatgtagaactttatctcgtcttctctggaccaaaagtgacgtggtgaggtagaagtggacttggagaaggtcttggtttggtccccaatcaacttctttaatcatccatgcattccttacgctcggtctcttttctttcgcccaagcaagtacctctgcaaacgaaaacacaccaaacttattgtgtagcaacgtttgttcaaatatataacaagtaaatctaatatagaatatatgcacctttggttgattaatacacataaggtagtcatggttatatccgagctagttgtgtcctcatcatcctccccttcttgattggaaaccgtcctcggtttcaccttgtcatggagcatattgaacttatctttatctatcataacatctggtgaggaacatttcttgatggtcatatggttggctcctgaaatctttgtagtcgcaaaaccacaacactccccttcttgcaaaccaacttgtaactcatttaaacaactagaggaactagatagagaatcacttatacgcatgtggtcctctagacaacacatctcatcatgaaaaggaggtatcatcaaattctcacaaatatatacttgatgtacattatattctcctttactatcataattgccaataacatgaaaaatcacatcagaagagcatggcaattcaaatctagcaaatagtttcttctctaaaaagttgagtggacaaagatcatcaaattaaatataaccccaagtatttaaagaagataacaatttaagctcttcattctcgctagcaatgtgaataacatgtttaaactcaacacatggtggctctactatagaactaacatgttcattcactagttgtggcatggatataagtgaagcatcacacaactcttctttatcacaagaaacatcaagcaaattgttttgtgacaaaggtatttcaacaattgtttccactataggttgctctaatgtagcacaagtagtggatatagttagcacatcataactatgcatagagttagcacatcataactatgcatagctttagtagttgtagcaccattattattacctttcttctcatcttcagaaattataggcgcttagtaattaaacattcctcaagcatgcacggatctatggacaggtctttttgctcttcgtctttcttctcttcctcctcatcatcttcaacgtcggaggtgcttatgtagccatcttccatagcaatgtatgcacgttgactagggaaaaccttctgcacatggccaaatccatggcagcggtgacactgaatcctgggcgtgcgtcccgtcaaagcggcagatgaggcactcttggtggatacctgcgaagaaccttcacctgaatctgtaggtcgtggggaaggtggttttggcgctatagaaactccggacgcaactggtcacttgctcgttggtggggtcgcccagaaagagatgggcttgggtagccccgaagatggctttgtccacggcatgtacgtgcgctgatcacgcccctgcaattccttctctgcaagcatagcaaactgaaacaactggttgacagtgttaaattccttattttctaccatgtcctgaatctcgcgcctcaatcccatgtaaaagctacaaatggaatcctcagttccctccactatgctacatcgcatcaatcccttttgtagctctccatagtaatcctgtacagatttatccccttgttctaaacgattcagtttcttgcttaaatctctataataacatggaggaacaaatctatcacgaatagctaccttaagttctttccatgtagtaggtaaagctctcccaacatctaacctagaccaccaaatataagcaaactctttgaacccactactggcttgtcgaactctatgttgctcaggcacaaggtgggcactaaacttttgctctactgtcatctgccgatcaaagtatttcttagcatcataataacccaaaaagacggtattttaaacttaaccttagaataaggatcatcgggcacacaattattgttgccttattggtatcgctgattttaagcaccactcatacctgtcattgcaaacacaaaaacaataacaaacagtgaaggttatccctaataatctactacgcggtgtagtgatgcctctcaacaactcagccaaatggagcaccttaccaagctcttacaagtgtcttactagcaatgctaaggacggtacaaccggtggttggttcatgacaccttaaaggacgtgatgtggcgattgcatcaatctagccggtgtgagctcaacaaaaggggaagaagcactagcaatccctagtcgcaactcccaactcgaccgataaaaacttctgaaaagtataaaaacggaaactcaacgatgagacaattcaatttttcaaggtcctggtaacaaccgacgagatgcaaaactggacccaaagctgaagtacaactcacacagacttgagtgatgaaccctacacctaagtgatgaacatatacaatactcaaaactaaaaattaaatctaagactaaaccaacactcgacccgatgatgcaatctagaattcaacaaagcaaaatctaatagaacaatgcaacggctcaaattgtctaggtaaagaataaatatttttttgtggcaattttctagttatgcaaatataaattacctaacgggcaaccgcgctatgataccaactgatgaagggatgttaggtcccgatcttacgataggggtcgttctcccacccctatcgtattgataaacaatcgatttggacggagtcacgacacaactcgatccggcttctgaatgaacacgctattgagccccgcaattgcagcaccacggatcctctagttatcaactgtgccgaaacccggttgacctcgccgagaaggctaatccctgcatgcgaatcgaagaacacaagaaagaataagatatattgcaacacaattgcatatgaatgattaagcactcgaatttggggttccacaaaccgatctagcggggaaactgatcttgacagattaatctaagcaaaacctgattctaaacgatgacggctactgaattaatgtgattagggacgtcctagggttgccctagggcgcacactctcttgggctaagcccacggcacaattacatggctcaaaacccaaaatcagattcggaccgaatgagatacgtggcttgttttgcagattcccggcagcttggtaggaattttgacgtgggaccaaaaccacatgaaagtaggctccacaagctttccaaaaagtactcatgggccccgaaattccttctagatcagcagctaggtctgtttgaagttgatgctgtcaggaggcccgaatccgaatccaaaacatgtagaagtttatctcttgtcttatatgcacaaaaagtgacgtgatgaggtacaagtggacttggagaaggtcttggtttggtccccaatcaacttctttgatcatccatgcgtttcttacgctcggtctcttttctttcgcccaagcaagtacctctgcaaacgaaaacacaccaaactcattgtgtagcaacgtttgttcaaatatatagcaagtaaatttaatatagaacatatccacctttggttgattaatacataaggtagtcatggttatatccaagctagttgtgtcctcatcagctgcgtttttttttctagcttctcaattttaatttgagtttttctgaccagatattgctatttttgcattggctttccttactatccttctacatatatctaaggcgagggtgatcacaattcatatacatccttaggtattcaccataccattattgttgctaccatcgctgttgttgctgaagtcacatcggagagatttggtcaatagttttttgtttagttgctagatatccattcatggtttttgtatttggatggcaaagaggtcgtatgttgggaggatgatggcacacaatcgatgcagctactatatatgacctactcatttcaatttgtttgtagaaataagagatgaagaatcaggaaatactgaaatgttttgcacaacaccaaaacatttatgtccattttgtctcatcaggcgtctgtttgtgagagcgggcggcgaagctgacaccatttcatccccttgttttcacctttttgactaccaacttcattgccaacaatatcaagttctacatctatagaattctagttgttgtgcttttctgtctaccacctagagtatctaacatatttagttattagaattattggtgtatgtcacatttttagttaactgcattgtttatgtgtctaacattttttggttaacatgattgatggtgtatgcaacattttgggtcaatagaattatttgcatatctaatatttttggctagattgtagatgactcattgcaaacgatgaatgactctttcgggctagctttcctcaacttatactaaagtaacaaaattcaagtatgatacaacaaatttcaaaactaacattgctatgcatatatttagaaatgaaaaactccgaaaggattagaataaatacaaattcgccattccttcttagaacacattgttctaaagtacctcaatgatggttcaagcatcctcgataggtcttctcagaatctgactccaatagagttgggtccattataatgaaatacttgattacgggataactcttctataagtcaccaaccttaggcggtttaacacaaacgagtatttcacagataaccgagaagaaattatgttaatcggcacaaaaaacaaattggtcccttcaacgcataaatggttcataaaaacttcatagaagcatacttagcaaaggtcacttacctttcccaattctatcaataagaacaacttatgaaaaccactctatgttgtgaaagcataggccgagcggaaacatcgattctttcactggcttgtactacatcaaagagtgcttactgcagggaccatgctcatacgcattggccatgtaactgaatatgctccttgtgcttggacactttcgaagataccgatcaccttttcagaaattatgatttcacaaagaaggtttggcatcaaatttgcaacttgaaagtttttaaccaagtcgggatacgacaatgtttgctcaatatctccttttgttatctatttagattgcaaatgaatgacttggttcctttgtttatcggagttttggtgttatttggtggttataatagacatttaggcaacgcgtggattgggttttttgtttgcatggattggttattttgctaaaatttgttatgcggacaaacattattttgtgtcaccatcatggttgattattgtttgaaattttgtagcacatgtttctattcatgggcattatggttttaaccctgtatttcttcatctgctatgatcacctccaacactgctgccaccaccgtcatcgccagcaccttggcctccaaatctagttacatccatctagcacatgatttgctttggtatcagcgccccttttcacctaatatctccattctccgtttgataaccaaacatgcaactcagcacctcctcatcttggctcaccatctacatatatgttggaaatataaggaatttacgataatatttaatctagaaatctagggagtaaattacgacgacataaatggattactatcaatagttaggatttttccaattagacatgctatggttgtaaactatggaaacaagcatatttaactcatttgcgcatagaaacaagatcaatagaaagaaacaaggaggagaataacatatggtgctggaacaaagtggttgtgacaatagcgagaggagaaccgttgccgttcctgctgttgccattgccattcctgttcctagtctcaccactagacgtgatgaagaggaagctgttgacatagttgtactcaagcaccaacgcagtgcggttccaaaaaacatgattttctcttcctctcgatgcaagatcaaggaaacgggggttccaaaggcctgctctcctagcacatgtgcatgcactcgcctggatgggataatcatagcatcaacataagtgaaataggatgaaagtgtgtattctctcctgcgcgggagatcaaattcattcttcttttataggagaaaggaagatgaagaggaaatgactcatggaagatgaacagaaagatagtaacttatgcatcaaccagtcagcaaccatccttcactacaccaccatgaaacaaccatcaatttgatataattgaaatatcaaattgacgttggttaccattccattaataaattattgcattaattctaaaaaaactcttcatatttacctttgataactcatgagaagatgaatacacagattctagcgtaatgagccttggaatttaattgatttaattgattgcaattgattaattacccaattaattcaaacagatgtaaggtggaggtaaaagtatttcatacactttctcgatttttgttccgtaccatcgtgatgaacccttagttccactcgacactcaaggctgttgttggcccgatcttttggtgagttgatgataactacgatttcaaagaaaggttgacgacctgactacaaccgtacaagacgttgttgtgttgcgcctttgcgatcgatacacctctccgtgggttattgatcttgccagtgcaaatcaaccctattgaagtgaccatggctactaaagatacaaccattgctcacatcatggaagaacaagatgatatcaagatcaagtcaaccaagtgctggaatcaaattcggccacctgctacactactgaattcaaacggccaccgaatctgcgtacaacctccgttttcggcccgtgagtacttgatggaaagctctcggagtcttctttccaacggatctagcctcatcgccaaattccatccaagccatccgcatattaagaaacaaggttctgcgtcacctgtcatgggcctttggccttgtaacttcgtttgggaccctggcccaagtggggcccatgtggggtgcaccacaatctggtggagcacgaccctatgaccctcttggtcattctcccacccctataagtagctaggtaccccttcagggttgcttgggttttgtttagatgaaagtttagccattgctacttccttgtagcgcgcgtgtcggctagatcgtccgtctgcttgtattcgaaaccccaacttatcgtgtgtattcattcctatttgcaattcagattgcttttatcttgttcttgcttgtttcttcgatttgcttgcaggaataggtgattaaccctgagttccactcgacactcaaggctgttgttggcccgatttttcggtgagttgatgataactacgatttgggagaaacgttgacgacccgactacaaccgtacaagacgttgttgtgttgcgcctttgcgatcgatacacctctccgtgggtattgatcttgccggtgctgatcaaccctattcctacaagcaaatcgaagaaacaagcaagaacaagataaaagcaatctgaattgcaaataggaatgaatacacacgataagttggggtttcggatacaagcagacggacggtctagccgacacgcgcgctgcaagaaagtagcaatggctaaactttcatctaaacagaacccaagcaaccctgaaggggtacctagctacttataggggtgggagaacgaccaagagggtcctaaggtcgtgctccaccacattggggcacaccccacatgggccccacttgggccggggttccaaacgaagttacaaacccaaaggcccatgacaggtgacgcaacacctcgtttcttaatctgcgaatggcttggatggaatttggcgatgaggccagatccgttggaaagagtactccgagagctttccatcaagtactcacgggccgaaaacggaggtcgtacgcagattcgggggccgtttgaattcagcagtgtagcaggtggccgaatttgattccagcacttggaggacttgatcttgatatcatcttgttcttccatgatgtgagcaatggttgtatctgtagtagccatggtcactgatggaaatcaggtggcacatgctttattgggggttaacgtcttactaatattttacatataaatagttgcttgtgcaaccctaaataattcttcatccatcatcattttctgtccatccaccgccactaccattgttgccaccacctccgccatccccatcatccaacctcaatctcacacattattagctttatcatcgccagccttttttctaccttctccatttctatttgagtttttctgaccatatcttgccatttttgcatcggcttggcttactatccttctacatgtatctatggcgagggtgatcacaattcacacacatcctcagttttcgccattgccgccgctgcaacatgagagatttggtcaatataattttagcaagtagatcactatccttttgtggttttgtttatttgggaaggtaggtatggtgtcacgccccaattttcgttcgggattgaaattatcgacaaggcctcgatatcacacatgggtaccattcgtcctcgctagaagatgaatatcagaggacgaggatgaagaactagatgaagaacacatggtggcggttgtggtttcttgtttggttgtagagtagatgaatggaaggtctttgtacatggtgttggttgtgcgattctttcaactatgaacataggagatgctagcggcatgatgcttgatgcatagtagtactactgttctatctcgagagtgatacggcaacggtctctgtatagacaacactaaaactaggactaggagtagtatattagtatgcccttcgtccaaaaaaaatcacaggataaatcacataacaagtttagccttggattgcttaccaaaatttttggcaagagtggctaggctagtgtttggttgctaccatagagtattcctccatggactttgccaaaatcaatcaaaccaaaaaactggcaacgccaaaattttgggtacaaacccaataagttacaaaatttttggcagcaccaatattttggtatggttgagtttggcaaagagccaaacacaccgtatgatttaatatgacgtcttccctctttgaattgggttctaacacaatttgatttgtagctctaaactgaaaagtgtgtgtttggtgttttctgttcctatctatccagtcaactaagaacgtgcatattttgtaatgcagcaattggatggagcaatggaggacacaccaatcaaaaatagcatgccaatcgtagagatgcatgaggtacctgctgaggctgaacccacagttgaggacatgcaggaggcgctcttccagaagcagaaggaagaacagctccagctgcagctgtttcaacaggaagaggaactggaagaccaacagcctcaggtggttcgctctctttcatttaatttgatgcattcatttcttgatgatcatccaattctcatgcttcatcttaccatcaactggttgctgggggtctaatcgtgttatctctttttttagtaaaagctctctatatgttgaaatgatcacaactatcataataaacattttggttttttagttctaatatattgtgcatatttgtagttctagtaactatttttggtatcagagagtttcttttataatacattgtgatgtgtagttagtaaatacatatgtaatattgcataatcatcaaaattttatatttccattgcaccaaaattgacccctcttaaggtctgaaagttttcaaaacgaaaatcaaatgatccgaatcgaattgcctcaacttgataatctgcttccacccacccaactgtgtgtgtgtgtgtcacacacacaaacaaacaaacaaatgtgaccacaaaacaccgaacggcaacacatgtcactaacaagcaaacacaaactaaatgccgggggtaagcaacctacagagaagctcatagctccagctaaactccacaaactacattccttttctattgaattagcactatttaaaacacaatcattgcggtgcttcctaacgtcccaagccactagggattatcaacgagttcagtcctttgtgcaactcttcaggataccccttgatggctttgccccaccatgctgagaaagaaccggtagtattgcatttgcctcacttttaaatattgaagatgaactgtacttttacccaatagtattgcatttgtctctttaaagcccatgtttccaataatagattgttttagtagtttcaatggtgtacatggtaatactgcgacatgggcaatgtacattaatccctttttttttttgccaaatttaaaacatatggttgctgaaattatccaaagtagcaattaaaggttgactttcctgtcatgtcatctctacagtggcataacccgatacacaaagctggttaggaggtaatgtgattcattattgcaagtttaggtgcttaagctggttaggagtcacgatcggtgatcagccattaaaacacctgttatttccattataagaaactaaatgaagcagtgccagaaaaacagacacaatgaatttgtttgcttaatcactatacagtgagatctgaaggatactaattattaagattaaatttgaaggctataaatttttgctggtgtgggttagccaatttgcacgctttttcttgaatgtgtcggcaggaggactaccatgttaaatgaaaaggagaggagaaattaaaagaagccgaatttacaaggtggtacggggtactggtggccccactggatggctgatttaaaattacatagtggatacttgtgaataatctgtcctagatagcttgcttatgctagaatagaagaatgtgcctccccttttatcagttcaccatgactagtgacgcaacatctttcctcgtctgtccatgggctagtacagatcagggatattgtcaacctgcatgttttatagtgaataacatagtagagagggattcgcgactaaagaattcacatttaaagggtgtagggctcttccatattaggtgaattgattgtgtctgaaaatgtacagtaattcctgaaaatgatttgtattttttagactacttcgtagctgactttgtttcgtctcagtacatgtctatttctctgttctgaacatggatggctgtcgagtctacattttccagacctatcattggtttttcaggttcacccactgctgccgaagccatcaaaattatcaatgtgacctaccttatttgataatttgaagaactaaacattacgtgcatgtttgatattttggtatggttgagtttggcaaagaaacaaacacaccctacgattcgatatgacgtccttctggtttgaattgtgtgctgaaacaatttgatttgcagctctaaactgaaaatcgcgtgttcagtgttttcggttcctatctgtccagtcaactaggcagatgcatattgtgtaattattaattggaattcgtgtgtaatgcagcaattggatggagcaatgcatgaggtgttggaatcagccaaggatcaaacttcacacgagattacttggtgacgaacaccagcgacgacgcacgccttttcctttctgcattgcaacacacacacgtatatggaatggacacaagaacagaagcctttcagcaacaaatgccttttcctttctctgttgttcactcacttaatcaactaatgattacatggctttataagcctcacaagcgcacatacttcagagcaaccaatttgcctgagtctcacgccacgtacgcgtgatttacttgacccagactctaccgcatgcacttctcctctaatccatgcaacacatgtatgtacttatctactaagtaactaactagcccattcattaaggcatgcaacatatgcatgttctaactagctagccacttgacccatttatgcattggccagcctcaacctgaacacatcaagtttccagccatatgcaaacacgtctaacacatgacgtgatcactctagacaaaactaattaacaataaaagaatcatatgcaacaagattagtactaacatgaggcaccattggaaagtaacctgtcaatcgtagaggtgtacgaggtacctgctgaggctgaacccttagttgaggaggtggatcccatgctggtcgacgatccagctacagtaatctgtggcacaagacgaccatgctacgggtggcttatagagtatgtgagcgaatccgacactgaagaggagatgcatgttccaagtcaagaaagcttgtcctgtaagcggaagctgggataatttttcatggatgtggtctgcaatctgttgatgaaaaggtacatacaaagttccaagtgtgttcattattttgcttctctttttacctggtacctgtgtgtgctgttgtggttttggtattccagctgctaatcatcatctcttattgtttttaacagagtgcctggaaaagaagaatcaatgtggtgtgcaaggcataagatatggcccttgcttttaaggcagtctgaagttgcttctgactttgctcaaaacagtagttgtacaagtattgacacaaagcagccaatttgggttattggacagaatgatctgtactgttgactgtagacattgaaaacatagtatactcctacatattttaataggagtaaagtctatcaccggtccctaaacttatatcgttgtgtgatcccggtccctaaacttgtaaattgaccgttcaggtcctcaaacttgttcgactgtgtcatcccagtccctaaacttgcagatcacttgtttaggtcttccaacttgttcagctgtgtcaccccagtccctaaacttggatttgaatatcatctgggtcaaataggacggtctaaatactttatatttaaaaataattcataactttttcatgtgaactctaatgaagataaactttatatcaaacttatagcccgcgacgcgatctacaactttgtagttgaattttttttattttaagtcattttttgtcccaaaatgtaatttaaaattaaaattacaaaatctataaatatgcaacaatattttgggaccctaaacagttttaattcaaaaacttttcaactacaaagttgtaggtcgcgtcgagggctacaattttgatataaagtttgtcttcattagagttaacatgaaaaagttatgaattattttttgatataaagtttttagaccatcctgtttagagaccggggtgacacaactgaacaagttgtaggacctaaacgagtgatctgcatgtttagagaccgggatgatacagtcgaacaagtttgaggacctgaacggtcgatttgtgagtttagggaccgggatgacacaacggtataagtttagggaccggtgatggactttactcttttaatagataacaacgttaattttttttatacatttaaccattcgtcttattcaaaaattttatacaaatgtataagatataaatcatgcttagaatactctcacaacaaaataaattatagttacgtaaatgtttcgaataagacgaatggtccaacgtgtgataaaaagttaacggcgttatctattaaaaaagggaaaaagggaggtagtattagagtacataagctctatgcaacaggaaatgtcaaatgtgggatttagttgatctgtgctttgcatagatagaacctgaaaacgtacattcggtttgaattaggacccttttccatgtctttcgtttgtatgcttcaaaagtaaagatataacgtcaaagctaatgaaaatttcaaaaaaaaaaaaggaatttccgttgccgggactcaaacccgggtctctcgggtgagagccgagtatctaaccagctagactacaacggattatggcctcgctgggttttctgctctattgtatagtgatgtggaaaagtctttactgccaacgaattaatttttaacaaagtcaccatggatacgaatactacgtctaccacaaatataaaattagtattgtgagtctaaaatttaaaacttaaaccctggtgagttgattccacgtaaaaaatctaaccggttaagctacatttaatttgtgatatataaaacttgttacattggtctgatcgaaatatgtgcctgccggaacataatggacctattgtttgattaatgatgtgaagttaatataatactacctccgttttttaatagatgacgccgttgactttttcgtacatgtttgaccattcgtcttattcaaaaaatttacgtaattataatttattttgttatgagttgttttatcactcatagtactttaagtgtgatttatatcttatacatttgcataaaatttttgaataagacgaatggtcaaatatgtaagaaaaagtcaa

SEQ ID NO: 10428 - DNA, 1676 bp, Oryza sativa
ttagatttgaaggagaaatactggtgggtcacatgaagcgggaaattgcagagtttgtggccctatgtgatgtgtgccagcgtgtcaaggcagaacaccagcgaccggccggacttctccaacctctccaagtgccagaatggaaatgggatgaaattgggatggatttcatcactggacttccaaaaacccaaggtggatatgattctatatgggtaattgtggatcgactaacaaaggtagctcgatttattcctgtgaagaccacctatggagggaacaaactagcggaactctatttcgctaggatcgtgagtctccatggcttcccaagaaaatcgtatctgataggggaagccaattcacctctcacttctggaagaagctccaagaagagctgggcactcgattgaatttcagcaccgcgtatcacccgcagacagatggacagaccgagcgtctaaaccagatcctagaagatatgctccgcgcatgtgtactagatttcgggaagacctgggataagagtctcccctatgccgagttctcctacaataacagctatcaagccagcatacaaatggcaccttatgaagcgttgtacgggcgcaaatgccggacaccgctcttgtgggaccaagttggagaaagccaagtgttcgggactgatatcctgagagaagctgaagctaaagtcagaatcattcgggataatctaaaggtggcacagtcccggcagaaaagttatgcagataaccgtcgccgtgacctggaattcgcagtgggtgattttgtatatcttcgggtcatgccattgcgaggtgtgcacaggtttcagacaaaaggtaagctcgcacctcggtatgtgggtccttaccgtatcatcgctcgacgcggagaagtcgcttaccagctagagttgcccgcctccttgggtaacgtgcatgatgtgttccatgtgtctcaactcaagaaatgtcttcgagtgccatccgagcaggccgactcagagcaaattgaagtccgcgaagatttgacctacgtggagaggccagtgaaaatcctggacaccatggagcgcaggaccaggaaccgggtaatccgtttttgcaaggtccagtggagcaaccacgccgaagaagaagctacctgggagcgtgaagacgagctgaaggcagcccatcccgatctcttcgccagttcttccgaatctcggggtcgagattccgtttaaggggggtaggtttgtcgcgtcccaaaacgactctaaaattcatcctcgaaattgtgcaaagaataattaaaatccatgtgaaagcctccaacaattaaaatgtgcaaagttaaaagtcaaataaggcttggaggatttttgtatatttcctaaaagcctaaaatgtgtaaataaattttagtggaattttcagagcacaaataataattgaagagaaataaacaaagttaaaaggattttataaaaagaaaaaccctaaaaagcctttttcccccccctttccttcttgggccggctcggcccagctctccctctctctctcttccccccccctcggcccatcggcctgccccgcgcgcgcgcgccgctgacaggcgggcccgcccgccactctcgctgacgggtgggacccacctgtatctccctcctcgcgccacgcccg

SEQ ID NO: 10429 - DNA, 842 bp, Oryza sativa
ttaattgttagctctttctgtttgctggttctgtgtggggttttcagatggtgacgaccaggagaaatgctgttaccggtgatggcaaccaacccgaaggcagcaaccacaaccaccagggcaacccacctccacctccccctccgccaccaccaccaccaccagacaccaacgccattctcacccaaatcctcgcccagcaagccaacatgatgactgctttcctccaccacctccaaaatccgccacaacagaatgctccaccaccacctccacaacactctaaactcgccgaattcctccgcatccgcccacctaccttctcgagctccaacaaccccgtggatgcgttggattggttgcatgccgtggggaaaaagctagacacggtgcagtgcagcgatgaggagaaagtcatcttcgccgcccaccagctgcaggggcccgcatctctatggtgggaccacttccaggctacgcagccagaagggcaaccgattacttgggctcgcttcaccgccgctttccggagaacccatgtgcccgccggagtcgtggctcttaagaagagggagttccgagagttgaagcaaggcaaccgctccgtgatggagtatttgcatgagttcaacaatctggcccggtacgctccggaggatgtgcgggaagatgaggagaagcaagagaagttcctggcaggaatggaccctgagctgtccgttcgtctagtctctggggactacccggacttccaacgtctggtggacaagagcatccgcttggaagccaagcacaaggagctggagtcgcacaagcgccgcttggcgaacttccgcaatcag

SEQ ID NO: 10430 - DNA, 14772 bp, Oryza sativa
acgagattctgtttaaggggggtaggtttgtcacatcccaaaaatcctaaatatataaattgatgtttaattggaatttttagaaattattttaaaagcctacaagctaaaccctaattttctaggaaaattttcaccataaaaatgagctagataaaattttattaaatactatgcttgctcctttattttctagaattttctgggaattatttgagcaagggaagtatttttaataattgaaacaacattttataaattgttttattcaaaaaaggttcaaaatctcccccttcttggtctttgggccgattccggcccatctcctctcttctctctcttccccgcgcgcggcccaagccggcccaagccgcccgcgcccgcgccctctctcccggaggctgacaggtggggcccacctgtcagggtcgtccccgacctccagccggccgccgccgccgagccgaaccctagccgccgcttcccgctccaaatccggccaaatccgattcgatctcttccaattgattgaggggttttgttcctctcggtctcctcttccttttcccccaagaatcaaagcaaatggttgaggtttggatgagatttgaattcgttttcgagtttatctccaaaaacgagtccgagttcttcccgattcaattcctcccgtttgtgattcgatctcttcaatccgagctcatataaatgttccctgtgatctcctctttcgtttgccctctctcccgagtcctcccgtgcctcctagcgccgccgcgacgcgtcgcaagtccgccgccgtcgcaggccatcttcggcaacgccgccgtgccgtctccgccgtcgccgccgcctgccgtcgtcgccaaaaggtgcgccgtgaggagaagaagcttggccgcccctccgttttcgccgtcgaccaccggaggttgctcgacgccgtcgacccgagccgccgccgccttcttcttcgtcgccggccgccgtcgtgcatcgtctcgtgtcggggtgggtaccaatgagttcgtctcgtcgcccgctacgcgttggtgccctccaatctcgccgccgatgtctctagcgccgacgagctcgcgtgcccgagccggccgccgtcgctgacgtcatgctgacgtcaaccctagggctgacgtcatcagggcagggctgacgtcatctctctctctttttccttttttcccgattttctaatagattaaaactttgaaaaatcataactaaataaccgtagatccgttttaggtggttcaagtttctaaatttttctaaaatcaagatctacatgttaaaaatatccacatgtactgtttatgcttgtttttgtactgttttgttgattttgtttatttgctttagtttccgacgttccggaggagagcgtttccgttgaggaaggttccgaagcgtttgtggaagcccaaggcaagtcacacagatcccaaacaaccctttgagcatgttgatcctgtttaaagctattattttatttcaactatgcattgttttcgaatgtcatcgggtggtgaacctttcccagttaattagtggccgaagatgactttattttcctatgggttataatttgattagcatgaaccttatatattggattggttcagctaaatgctataaataggtttgcttagccatgcttagaaacattagttaactaaaagggttaatggtaaattatactttatcattttatgttattaattatagttatatttaatggtagctcacgatggacaatcgtgtgatgataattaattgataactaaaacctgaccaaggtgggttgtgagcatatggttttgatggttgtgctcatgacaattaaggaccggttcgcgagctactgttgtgaaacatttatcgtgccaaccacaagccagcgtgggcaacggctttatctgttgtatagcataattcattatagtgcgccagactgagaagtggcgagaagtccatgggggtcgctggggagtccatgccttgttttaaagggggtgattatgatccaggaaaggtgcactgtggtgagttgtgttatgcgaggggtattgtcacaattcctttccgagataccgtggtggtattgaggcacatggtaacatgatgtggggttgtgtcttgtgggtacagtggtacacctctgatcagagtttaatctattcgaatagccgtacccgcggttatgggtgagttgagcaatgttttttcgtgattagtctcacactactcattaatggttttaatgtggtaattactttagttcctggtttggaatggttaattcctggtttggagggttcacttgttcaaccggggttggttgttcagatgtggttgggcctatgcaacacgggtgtgttgtatggtgtttatttaatattgattaattatacaactgttttactattctctgaaatatttattaaatgctgttttctgcaaatgagctatattttgccatcctttgctatcttgtgcacttgcatatttgctgtgtggcttgttgagtatgttatatgctcattcttgcaatattcattcatcagaggaggagtacttcagtgaaggtgacgatctggaggattaggcttgttctggtcaagttgcctgtggagtggagttgccatagttgttccgtcgtttgttttagttttatctttccgctgcgtagaatgtttttttttgagagggactatttacctctgtaataatttataatttgcgagtattcaatagttaattatttgtactctattatcaatgttgtcattgtgtgcctcggttgattcctggacgagggtttaacacacatgtaagcgtttggaattttggatagaaattccgggcgtgacagaatcatcataggccttgggttaaggcaggttcgtgtgggttcacggccttgattaataacattgtatagttctaggatcgcgtttacaaaatagctttgagcaactaaacgtctttaaatgctgtttactgcaacgctaacccttattataaattcccttgtactcccttgcatttattctgcatttgtgggtgtgtcttgttgagtacggtggttgtactcagtcttgctcaatttttcccaagtccagaagaggagctccttggagatgaaggctttggtgttagctcgtgcctgccgtcaagcgcctgtggtcgtcgccctagtcttccgttgtttcccatttgtctttgtgtgctgggccttcgctgcccgtgtaataaatatatttacgcttccgcttgttaaactctgatttgtatcaactgttggtgtaccttgcctcctgggacaaggattaatgcacgcacgtaaggaacgcccgttgggttatttccggtcgtgacaaccgacgccgtgacctggaattcgcagtggatgactttgtgtatcttcgggtcacgcccttgcgaggtgtacacagatttcagacaaaggggaagctcgcacctcggtatgtgggtcctttccgtatcattgctcggcgcggagaagtcgcttaccagttggagttgcccgcctccttgggcaacgtgcatgatgtgttccatgtgtcgcaactcaagaaatgtcttcgagtgccatccgagcaggccgactcagagcaaattgaagttcgcgaagacttgacttacgtggagaggccagtgaaaatcctggacaccatggagcgcaggaccaggaaccgggtaatccgtttttgcaaggtccagtggagcaaccacgccgaagaagaagctacttgggagcgtgaagacgagctgaaggcagcccatcccgatctcttcgccagttcttccgaatctcggggtcgagattccgtttaaggggggtaggtttgtcgcgtcccaaaacgactctaaaatccatcctcgaaattgtgcaaagaataattaaaattcaatgtgaaagcctccaacaattaaaatgtgcaaagataaaagtcaaatgaggcttggaggatttttgtatatttcctaaaagcctaaaatgtgtaaataaattttagtggaattttcagagcacaaataataattgaaaagaaataaacaaagtggaaaaggtttataaaaaaagaaaatcctaaaagaagttctttttcccccccctcttccctcttgggccggctcggcccacttctccctccctctctctctctcctcccccgcggcccatcggcctcctcccagcgtgcgcgccgctgacgggcgggcccgcccgccaccctcgctgacgggtggggcccacccgtcatccccttcctcgcgccgctcccgccgcctcgcccgtgccctagcgccgccgccaccgcgaatcccgccgctcccgtccgccctgcgcgcaataaagagggggaaatcactccccgtgatcccctccctctttccccccttttttccctctctctctccctcggattcgttcggaaaatcctcccctaacctcgccggcgccatcaatggcggccggatcttccgcgccgctttccttccttccccggccgccctctctcgccccgaccctatttaaacgctccccgtgcctccctcctccgtttccgccgctcaccgctcactctctccgtcagaatcgagctcgcgccgtcgctctctctctccgccgtcgccgccgagctccggtccgccgccgtcgtcgccccggacctcctcccgcttcggcgtcgcttccttcggcttcgccgcgtcctcgccgacctcgtccacccctccgtcgacccgagccgcgccccgtcgacccgagccgcgccgccgcattcccccgcttcggtcgccgttcccgtcgtcgccgtcgaccggggtgagccgtggaccgcccacttcgtttcccccttccctcccctctctcggccgccgctccgccgtgcctatggccgccgccggcgaccataggggtgcgggcgcgccgcctcccgtcggctgtgccggcgaggccgccttcgggcgcgccccgcggctgccatgtggcgcccggccgtcagccgcccgcgccctcgggtgcggctgacgcgtgggacccacggcgccggccggcgtaagccgcgtgcacccggtccaccgtggaccgtgaggctgccgcgtgggccccactcccgtggacccggtccgcgcgcccctcccctcggctgacgcaataaatccgattttaaattaaaatttaaatggagaaattcgcaaatatccatctaaagagcatataaacttcaaatggccataacttggccatttgaactcggaattggaccgttcaagtctctaatttttccttaagaagccaagaaccaatttttgtgctttgtttctgcttgttatatggagtttattagagttaaagccttttcttttccgttggtatcttcggggatgaaaagagaaagataattgtcacgaccggaaataacccaacgggcgttccttacgtgcgtgcattaatccttgtcccaggaggcaaggtacaccaacagttgatacaaatcagagtttaacaagcggaagcgtaaatatatttattacacgggcagcgaaggcccagcacacaaagacaaacgggaaacaacggaagactagggcgacgaccacaggcgcttgacggcaggcacgagctagacaccaaagccttcatctccaaggagctcctcttctggacttgggaaaaattgagcaagactgagtacaaccaccgtactcaacaagacacacccacaaatgcagaataaatgcaagggagtacaagggaatttataataagggttagcgttgcagtaaacagcatttaaagacgtttagttgctcaaagctattttgtaaacacgatcctagaactatacaatgttattaatcaaggccgtgaacccacacgaacctgccttaacccaaggcctatgatgattcagaccgaactggcaacccgaccctgggtcccagctcgtcccaagccaacccaggccaaccattccacattttagttgttaagcaagttttaagaattaaaacactaacttgggtacattgctcggcttgcccataaccgagggcgcggctattcgaatagattatactctgatcagaggtgtacatctttacccacaagacacatcttcctcacgtgcaaccacgtgccacataccaccacggtatacagacggaagacgtgacatagtttccaacccatcctagccatagacaagagtaccgacccaatcccgcctacggccggaacccccgggacaggcaggcaggactgagcccctagcagcagggcaccaaccctctgccatttgacatctcgactaccgggccgcagctcgtgtagccttcatttgccctggagaatgtccatcgacccccgacttcatccatctccaatccgtgtacttttgtttatgactagactgagccacaaactaagccttacccactagacatgtggaagtacggtagtgctttgcaacagaggcccgaagaccggtccttatacggccgaggtgctaccatcaaaaccatgcacccctagcccagcccaaaaccattttaggggttttgaaaggaaggagcggtgtgaaaccaattccacaatagtccaccattccaaagtatccaggtgatatgaatatttcccaaagtctatagttgtaaaaccacctaatgttacctaattaaattgcgaagcatctacctaaaattaaactagtggtgtcatgagtggagtgtccactagttggggttttgtttgtctagggtgaacaaggtaataataataacaataacaataatgatacggtcataacaaaggtaaataggcatggctaaataaaacagtgataacgcgggaatttaaataaagcgataatgcaataatttaaatcaacataattttataaactgggattcaatatgatcaagatgatgtgtcttgccttgctcgctttcccaaacgtcggcttcaacttccacgaagagcggatcctccgaagctgcagcgtctacacgaccaacggaaaagaaaaggctattactctaataaactccacataacagcagaaacaaagcacaaaaatgggttcttgacttcttaaggaaaaattagagacttgaacggtccaattccgagttcaaatggccaagatatggccatttgaagtttatatgctctttaaatggatatttgcgaatttcttcatttaaattttaattaaaaaatcggattattgcgtcagccgagggagggagcgcgcggaccgggtccacgggagtggggcccacgcgtcagcctctcggtccttggtggaccgggagcacgcggctggaggcggccggcgccgtgggtcccgcgcgtcagccgcacccgcgggcgcgggcggctgacggccgggcccacctggcagccgcggggcgcgcccgaaggcggcctcgccggcacggccgacgggagcggcgcgcccgcgccccgatggtcaccgccggcgaccaccggcgcggcggagcggcgcccgagagagcggagaggagagggaagcgaaagggcggtcctcggctcaccccgggactacaacgacgacggaaacggtggccgaagcggaggaaggcggcggcgcggttcgggacggcgaggacgacggcgttccggcggtcggcgggcgaagcggaggagcggacggggtcggcgacgacgcggcgaagccgatggaggtgacgctgagacgggaggaggtccggggcgacgacggcggcgaaacggagctcggcggcgacggcggagagaaggtgcgacggcgcgggctcgattccgacggggaggagaggcggcgagcggtggaaacggaggggcggagctcggggagggattaaatagcgccgagagggggagagcgcggccggagagggaggaaacggccgcggagatctcggccgccattgatgacgccggcgaggattgcgggcgcgatttcgaaggaatccgagggagagagagagggaaaagacgggggaaacgggagagggaatcacggggagtgatttccccctctttattgcgcgcggagagggcgggatgcggcggattcggcggcggcggcggcgctagggcacgggcggcggcgggcgtggcgcgaggagggagatgacaggtgggtcccacccgtcagcgagagtggcgggcgggcccgcctgtcagcggcgcgcgcgcgcggggcaggccgatgggccgagggggggggaagagagagagagggagagactgggccgagccggcccaagaaggaaaaggggggggaaagaacttcttttagggtttttttctttttacaaaccatttcaactttgtttatttcttttccattattatttgtgctctgaaaattccactaaaatttatttacacattttaggcttttaggaaatatacaaaaatcctccaagcctcatttgacttttatctttgcacattttaattgttggaggctttcacatgaattttaattattctttgcacaatttcgaggatgaattttagagtcgttttgggacgcgacaggtggtatgtggcacgtggctacacgtgaggaagatgtgtcttgtgggtaaagatgtacacctctgatcagagtacaacctattcgaatggccgcgccctcggttatgggcaagccgagcaatgtacccaagttagtgttttaattcttaaaacctgcttaacaactaaaatgttgaatggttggcctgggttggcttgggacgagctgggacccagggtcgggttgccagttcggtctaaatcatcgtcggccttgggttaaggcaggttcgtgtgggttcacggccttgattaataatattgtgtagctctaggaccatatttgcaaaatagctttgagcaactaagtgtcttttaatgctgtttactgcacaccctaaccctttatattgtgactcccttgtactcccttgcattttattctgcacttgtgggtgtgtcttgttgagtacggtggttgtactcagtcttgcttaatttttcccaaacccagaagaggagcctctggaagatgaaggctttggtgtctagctcgtgcctgccgtcaagcgcctgtggtcgtcgccctagtcttccgctgtttcccgtttgtctttgtgtgtgctgggccttcgctgctgtcacatcctgattttcgtttcaggatttataaattatttaataaattattaatataatttatatgaaatgttcattaatttactagtgaagttaaaatgtgggaaataaaatttcctaaatataaagcatggaaggatttaatttttattaaattcttcatggttaattatactctctggaattttctcagatttttcggagctcaattcctaatttttaatcatacaaagaacatttcagtaataatccacatattaaattaatcattaaatggtctgattataattttgttaagtactttgagtgtccaagtattttcaagatttttcttggaattatttgagcattggaagtatttttaacaattcaaagatcatttccgtgattaatttaattggaaaagtatttaaaaatcccttctccttttcgggccgaaataggaaaagttcagcttcagtcctcggcccattctcccttcctttcggctggccttatccctcctccaaagtctgctttgtgtccctctttcaatcgggccaagaagtgaaagcccagccaaaagtctattttgcctccctgctacagtgtcatcttcaatctccagccggctggagacagagcccgagccagccgcacagtacctgtatagccgcggttttcccctccaaatccggccttttatctcgtgtatttccaaaattagttgaggggaaatactcctcttatcctcctctatctttacccccaagaatcggagcaaaccgttgagtattttatccgaatcgaactcgtttttgagtttatctccaaaaccgagtttttgatttcccggatcgatttcttgcgggaggagtccgatctcttcaatccaaggctataaataggaccacctcgtcgccctctttcgtttgcccccttccccgtggtctcccgtgcatcgtagctcgccgtcgacgccgcttagtccgccgccgccgccggccgggttgcagccgcgccgcccctgccgtcgccgccgcttgccgccgccgccaagaggtgcgccgaggagtgaggaagcccggccgcccgtccttcttcgccgccggtcgccgtagctcgccgccgacggtcaacccgaaccgccgcccgttccccgtcgttgccggccgtcgtcggacgtcgtttgtcgttgtggtgagtaccgttgggttcgtctcgtcgtcctctacgtgtacatgccctccaaatccgcagccggccactctatctccggcgaggtcgtcatcgtggttcggccgccatggatgatgtcagcatgacgtcatcatcttctccttttccagttttttctaatagattaaaacttcagaaaatcataactaaatcatcgtaactcggttttgagtggttcaagttgctaaattcatctaaaatcatgatctacatgtttgtttactttatatgtattgtttatttggtttttattagtctttttcttcgttttgcgtgttagcttgtcgtttccgtcgttgcgaagtttcgtgagtgcgccggaagtattcaagaagattaattgaagaccgattattgcaaggcaagtcacacagatcctaaacacaatcctttgagcatgttgatcctatatttaaattctctatttgtttcaactgtgcatttattttcgaatgtcaccgggtggtgtgaacctattcctttgttatggccaatttgcattgaatgccctattccttgataccttgggtaataaattgattggcttgaaccttatgtattggtttggttcagctaaatgttatatatataattgcttagcaatgcttagaaacattagctcactaatgggatgaatcatatatactacattattatttatggttatatttaatggtcgctcacgatggttaatcgtgtgatgttaattaaatgataattaaaacctggttaaggtgggttgtgagcatatggttttgatggttgtgctcatggcaattaaggaccggtttgcgagctactgttgtgaaacatttaccgtaccaaccacaagccagcatgggcaacggctttattctttgtatagcgtgattcattatagtgcgccagactatgaagtggcgagaagtccatgggggtcgctggggagtccatgccttgtttataagggggtgattatgatccagtaacggtgcactgttttgagttgtgttgtgcaaagggtattgtcacgatttccccctttgcaatgccgtggtggtatttcggggcatggcaacatgtgtggaatcgtgtcttgtgggtacagtggtacacctctggccagagtaaaactattcgaatagccgtgcccgcggttatgggcgggttaagcaatgtttttcgtgattagtctcacacctctcacaataattatggatgttatttggtaataatttgtttagctcctggtttggagttagatctgtacagccgggtatggttgttcaggatggttgggcctgtacagcatgggtgtgctgttcggtgttgattaaaattgatgattaattactctactgttttacttctcttaaatgttttgctaaatgctgcttttgcaaatgagcctatattatgccatcctttggtatccttgtgcacttgcatatttgctgtgtggcttgttgagtatgtcatatgctcattcttgcaataatcaatcaacctcagttgaagataaaggatccagaaggagaagacgtttggcttataccccagttgagctgcctgtgggagtggagctgaagccatcgctagaccgttaattccgctgctgtttctttttcttttcttttgtaagtatgtaacgttattattatgatggatttgtatattaaattgtcagtttgtgtacctcggctgattcctggacgaggattttatgcacaaattagttcggaaattactagtgaatttccgggcgtgacagctgcccatgtaataaattaactatttacgcttccgcttgataaactctgaaatgtatcaactcttggtgtaccttgcctcctgggacaaggaataatacacgcacgtaaggaacgcccgttgggttaattccggtcgtgacaagttggtatcagagccccccttgaccctaggacgagccgtagatcccaagccttagcaatattttcaaaataaaaatcctttgttatttgtgaaaatcctctagtctctctctgtcctgctgcttcatttatcgccaaaatctgacctttaaaatgttgcatttctttttgtttttgtttgtagatggccggcagcatcaaccgtcatggtctggacctgactggcttcgttttggagctgcggggcatgtgcgttgtcctggggtatccgcatggagtggactaccagggcaagcagctcccggagcaggagggtgacgatgcagagccccacgctgcttgggaggttactgcagtgatcctcactggctcacccgagaggacttcgttggcagtcaccgcgggtggagattctttctccgccgcttgccagaacgccgctctcctcgccatcggcactcttcaccagcgctacccggacgagttgcagcactcgccctaccgctaccaccctcgccgtggaggagcccgcgactacgccaccttccgggatgctagctcggaggatgacgctaccatcatgcacctggcgcgcatggtggaggcgtacgacgcggctcgtatcgacttccatcagatggtgcgccgtgggatggtcgagaacaacatgaagatcctggagctgcgtcaggagaatctgcagctgaagaaggacctagacgcagtggaggcgcagttgcatcagctcaagatcgcccagggagaggtctgtcgccccaagcgccgccgtgtctgccgcagccagaagatcaccgcccgcaagagtacatccaggcccgagcttgttcgccagtccttggcatggacctgcttcgtggagacccctcgtgccgagcccgcgcccgtggttcctcaggagggggaagcctccggcgttggtagcacggaggatgcgctgctgctcaccttccgtcctggccagtcgcagcggtagacgagcagttagtaggcttgcgcgtgtgttctttcttgtttgtcttcttgttggagtcgtgtggggcatggttatgccggtgtgtggtataactgtgtcggagcctgtctttattttatttgcctaagcaacttgaactttaatgaaccaatttaatagcagtaataaattcaagaattatggtagtcgtgggtggctagctttaattgtcagctctctctgtttgctggttctgtgtggggttttcagatggtgacgaccaggagaagtgctgctaccggtgaaggcagccaacccgaaggcagcaaccacaacaaccagggcagcccacatccacctcctccgcctccaccaccaccaccagacaccaacgccattctcacccaaatcctcgcccagcaagccaacatgatggctgctttcctccaccacatccaaaatccgccacaacataatgctccaccaccacccccacaacactctaaactcgctgagttcctccgcatccgtccaccaaccttctctagctccaataaccctgtggatgcgttggattggttgcatgccgtggggaaaaagttagacaccgtgcagtgcagcgatgaggagaaagtcgtcttcgccgcccaccagctgcaggggcccgcatctctatggttggaccatttccaggctacgcagctagaggggcagcctattacttgggcccgcttcaccgccgctttccggaggacccatgtgcccgccggagtcatggcccttaagaaaagggaattccgaaagttgaagcaaggcaaccgctccgtgatggagtatttgcatgagttcaacaacctggcccggtacgccccggaggatgtacgggaagatgaggaaaagcaggagaagttcttggctggaatggatcctgagctgtccgtccgtctagtctccggtgactatccggatttccaacatctggtggacaagagcatccgcttggaagccaagcacaaggaactggagtcgcacaagcgtcgcttggcgaatttccgcaatcaacagggagctaaccaaaggatccgctacaccaatccctatccaggaggatcgtcctcgcagcagcaacagcagcagcaacctcgctccgcgccccgacctcaattcgtggtgcgtgtcccacagccgctgtcgcgtcccaaaacgactctaaaattcatcctcgaaattgtgcaaagaataattaaaattcatgtgaaagcctccaacaattaaaatgtgcaaagataaaagtcaaatgaggcttggaggatttttgtatatttcctaaaagcctaaaatgtgtaaataaattttagtggaattttcagagcacaaataataatggaaaagaaataaacaaagttgaaatggttttataaaaagaaaaatcctaaaaagtcttctttccccccctttccttcttgggc

SEQ ID NO: 10431 - DNA, 844 bp, Oryza sativa
ttttatctttgcacattttaattgttggaggctttcacattgaattttaattattctttgcacaatttcgaggatagattttagagtcgttttgggacgcgacaaacctaccccccttaaacggaatctcgaccccgagattcggaagaactggcgaagagatcgggatgggctgccttcagctcgtcttcgcgctcccaagtagcttcttcttcggcgtggttgctccactggaccttgcaaaaacggattacccggttcctggtcctgcgctccatggtgtccaggattttcactggcttctccacatacgtcaggtcttcgcgaacttcaatttgctctgagtcggcctgctcggatggcactcggagacatttcttgagttgcgacacatggaacacatcatgcacgttacccaaggaggcgggcaactccagctggtaggcgacttctccgcgtcgagcagtgatacgaaagggacccacataccgaggtgcgagcttcccttttgtccgaaacctgtgcacccctcgcaatggcgtgacccgaagatacacaaaatcatccactgcgaattccagatcacggcgtcggttatcggcataacttttctgccgggactgtgccacctttaagttatcccgaatgattctgactttagcttcagcttctctcaggatatcagtcccgaacacttggctttctccaacttggtcccacaatagcggtgtccggcatttgcgcccgtacaacgcttcataaggtgccatttgtatgctggcttgatagctgttattgtaggagaactcggcataggggagactcttatcccaagtcttcccga

SEQ ID NO: 10432 - DNA, 9811 bp, Oryza sativa
gcccgccccatcggctgatgcaataaatggaatttttaattaaaatttaaatgaagaaattcgcaaatatccatttaaagagcatataaacttcaaatggccatatcttggccatttgaactcggaattggaccgttcaagtctctattttttccttaagaagtcaagaacccatttttgtgctttgtttctgctgttatgtggagttatttagtgtttaagccttttcttttccgttggtcgtgtagacgctgcagcttcggaagatccgctcttcgtcgaagtcgaagccgacgtttgggaagacgagcaaggcaagacacatcatcttgatcatattggatcccagtttataaaattatgttgatttaaattattgcattatcgctttgtttaaattcccgcgttatcactgttttatttagccatgcctatttacctttgttatgaccatatcattattgttattgttattattattaccttgttcaccctagacaaacaaaacctcaactagtgggcactctactcatagtaccactagtataactttaggtagatgcttcgcaatttaattaggtaacattaggtggttttacaactatagacttgggaaatattcatatcacctggatactctggaatggtttggttattgtggaattggcttcacaccgctccctctattcaaaagtccccaaaatggttttgggctgggctaggggtgcatggttttgatggtagcacctcggccgtataaggaccggtcttcgggcctctgttgcaaagcactaccgtacttccacatgtctagtgggtaaggcttagtttgtggctcagtctagtcataaacaaaagtacacggattggagatggatgaagtcgggggtcgatggacattctccagggcaaatgaaggctacacgagctgcggtctgaatcatcataggccttgggttaaggcaggttcgtgtgggttcacggccttgattaataaaattgtatagttctagaatcgtgtttataaaatggctttgagcaactaaatgtctttaaatgctgtttactgcaaccctaaccctctatattataatccctttgtactcccttgcatttattctgcacttgcgggtgtgtcttgttgagtacggtggttgtactcagtcttgctcaatttttcccaaccccagaagaggagttccttgaagatgaaggctttggtgtctagctcgtgcctgccgtcaagcgcctgtggtcgtcgccctagtcttccgctgtttcctgtttgtctttgtgtgctgggccttcgctgcccgtgtgtcgcgtcccaaatcgactctaaaattcatcctcaaaattgtgcaaaagaataattaaaaatttattgtgaaagcctccaacaattaaaatgtgcaaagataaaagtcaaatgaggcttggaggatttttgtatatttcctaaaagcctaaaatgcttaaataaattttagtggaattttcagagcacaaataataattgaaaagaaataaacaaagttgaaaaggttttataaaaagaaaaatcctaaaagaagttcttttcccccccccctttccttcttgggccggctcggcccaattccctccccctctctctctcctctccccgcggcccatcggcctcccccgcgcgcgcgcgccgctgacaggcgggcccgcccgccactctcgctgacgggtgggacccacctgtcatctccctcctcgcgccgcgcccgccgcccgtgccctagcgccgccgccgccgccgaatccgccgcatcccgccgtccccgcgcgcattaaagagggggaaatcactccccgtgattccctctcccgtttcccccgctttcccctctctctctccctcggattcgtccaaaatcgcgcccgcaatcctcgccggcgtcatcaatggcggccgagatctccgcgcccgtttcctccctctccggccgcgctctccccctcccgacgctatataatcgtcccccgagctccgctcttccgtttccgccgctcgccgctcgctctcgccgtcggattcgtgctcgcgccgtgcacctctctctccgccgtcgccgtcgacctccggttcgccgccgacgtcgctccgggcttcctcccgactcggcgtcacctccatcggcttcgccgcgttgtcgccgaccccgtccgccccttcgcttcgcccgccgaccgccggagctccgtcgtcctcgccgtcccgaaccgcgccgccgccttcctccgcttcggccgccgtttccgtcgtcgttgtagtcccggggtgagccgaggaccgccctttcgcttccctctcctctccgctctctcgggcgccgctccgccgcgccggtggtcgccggcggtgaccatcggggcgcgggcgcgccgctcccgtcggccgtgccggcgaggccgccttcgggcgggccccgcggctgccaggtgggcccggccgtcagccgcccgcgcccgcgggtgcggctgacgcgtgggacccacggcgccgaccgccgccagccgcgtgctcccggtccaccgtggaccgagaggctgacgcgtgggccccactcccgtggacccagtccgcgcgtcctctctcccggctgacgcaataaatgagtttttaattaaaatttaaatgaagaaattcgcaaatatccatttaaagagcatataaacttcaaatggccatatcttggccatttgaactcggaattggaccgttcaagtctctaatttttccttaagatgtaaagaacccattttttgtgctttgtttctgctgttatgtggagttatttagtgttaaagcctttttcttttccgttggtcgtgtagacgctgcagcttcggaagatccgctcttcgtggaagtcgaagccgtcgagtgggaaaacgagcaaggcaagacacatcatcttgatcatattgaatcccagtttataaaattatgttgatttaaattattgcattatcgctttatttaaattcccgcgttatcactgttttatttagccatgcctatttacctttgttatgaccatattattattgttattgttattattattaccttgttcaccctagacaaacaaaatctcaactagtggacactctattcatggttccactagtatgaatttaggtagatgcttcgctgattaattaggcaacattaggtggttttataactttagactttgggaattctcatatcatttggacactatggaatggttggcttatgttggaattggacacacacctctcttcctctttcaaaacccctaaaacctgttttcggtggggtttgggtgcatgccagttgtgggaagtagcaccccggccactataaggactaaagctcgggcctctgttgcaaagcactaccgtacttccacatgtctaatgggtaaggcttagtttgtggctcagtctagtcataaacaaaagtacacggattggagatggatgaagtcgggggtcgatggacatgctccagggcaaatgaaggctacacgagctgcggcccggtagtcgagatgtcataaagcacagggttggtgccctgctgcgaggggctcagttccgtctgcctgtcccgggggttccggccgtaggcggaattgggtcggtactcttgtctaaggctaggatgggttggaaactatgtcacgtcttccgtccgtataccgtggtggtatgtggcacgtggttacacgtgaggaagatgtgtcttgtgggtaaagatgtacacctctgatcagagtaaatctattcgaatagccgagccctcggatatgggcaagcctagcaatgtacccaagtcagtgttataattcttaaaatttgctcaacaactaaaatatggaatggttggcctgggttggcttgggacgagctggaacccagggtcgggttgccagttcggtccgaatcatcgtaggccttgggttaaggcaggttcgtgtgggttcacggccttgattaataatattgtgtagttctaagatcgtgtttacaaaatagctttgggcaactaaaagtctttaaatgctgtttactgcaactctaaccccttatgttataattcccttgtactcccttgcatttattctgcattcgtgggtgtgtcttgttgagtacggtggttgtactcagtcttgcttaattttcccaagcccagatggggagttccttgaagatgaaggctttggtgtctagctcgtgcctgccgtcaagcgcctgtggtcgtcgccctagtcttccgctgtttttcgttgtctctgagtgtgctgggccttcgtcgcccatgtaataattttatttacgcttccgcttgttaaactctgaattgtatcaacttttggtgtaccttgcctcctgggacaaggaataatacacgcacgtcaggaacgcctgttgggtgatttccggtcgtgacaccgtgtaataaatctatttacgcttccgcttgttaaactctgaattgtatcaacttttggtgtaccttgcctcctgggacaaggattaatgcacgcacgtaaggaatgcccgttgggttatttccggtcgtgacacctattaaagagagatcccgcactgccttcgagttcgatggtaagaatgaccccaaccgtgaagatccagagtctcttgagttcaagattatgaaggagaggatgtacaaaatcttctcaaacggtattgtggttagctattcacaactactgccagtggtgccatataacgctttcaaccctcctccaccggtatgtatcaaatatttcggccttccttatgacatcattttgtcttttgtaatgttggtcaaaaacttcaataataatgcataggaattttctttgatgaaatctgatcctccaagcgctcaacgccgctcgccccgccgacaagctggtcaggccagtggcgggccaaaaatccagtctgctgctcagccaagcatctcaaagccaactaaccaatcgggctcttggaaaaggaaattagttctgagtgacgacaaaggtgacaatgttgggaaagctggcagctgtcacatcctgatttttgtttcaggatttataaattatttaataaattaataatagaatttatattaaatgatctttaatttacaagtgaagttaaatgtgggaaataaaatttcctaaatataaagcatggatggatttaatttttattaaattctccatgattaagtcaactctctgaaattttctcggatttttcagagctcaattcctaaatgatacaaagaacagttcagtaattatttgatcaataatgatctaattataattgttaagagcttttccttgtttaaaaaatccttaaattataaattgttgtttaaaaggaataattagaaatgatcttaaaagcttaaaagagaagatctaattttaatttgctaaatctcaatattaaattgggctagataaaattttgttaaatactttgcttaattctataattcctagatttttctgggatttatttgagctaaggaagtatttttaataaatggaattgcatttcatgaataatttaaattgaaaaaggtttttaaaagtctcttttggctttgggccgaaagtcggcccaaaacctctctctttctctctccctccccggcccagtcggcccaacccgccgtcgcttccttctctctctcggtgccgctgacaggtggggcccacctgtcggacccgtcgacaacctcgcgccgtcgcccggccgaaccctagccgagtcgcgcccgagccaccgccgctgcccttccaaattccgtcgcccctctctatttccggtcaaattgattgagggcaaatgatccttgagatctcctcttctttttctcttttggaaacatcggctaattttctttggaaaccggtggatttgagttggattcggattcatctctctcctctaaccctaacctttccttcgcgtcgctggtcgccgtgggccttcgccgccgcctccttgcccctttaaaaggacccccgagctctcctctatctgccgccacctttgccttagcccgccgtcgcgtctagcgccgcctccgcgtagccctagccgtcgccgttgttgccgtcggttcagccgcgccgcgccgccgttgcagcagccgtcgtcggtcgccgtcgccaccatcgggttcgcgaggtcgtcgccgtccccgtccaccgcttcgccgccgccgaagaccgccggagcaccgccgtcgtcgtcgacccgaagaccgtcgccgtttcttcctcgtcgccggcgccgtccgttgcttttccgccgttgttttggtcaccggtgagttcgccgcgtcgccctctacccgttggtgccctccgttcgcgtcgtcgagccgttgttcgccggcgagcatgcgttgccgagccgccgccggtgctgacgtcatcgctgacgtcgtcgctgacgtcatcgtcgctgtccccgtagacccgtcgtgaaccgatcgatctcggccgtccgttttggatggatcgatctcggccgttcatttccgtgagccgtcgccgtgcacccggttcaccgcaaaccctagccgctgacgcaataaacctcttttccttttcaaaaataattcattattgcgtcataattcaattaaaatccatataagtattttaatccgatttaatctttaaaaattcataactaattcattgtaactcagtttaatgtggttcaagttacaaaaattatataaaataaatatctacatattaaaattatccataaattgaattaaatttatttaattctttttaaatgggctttaattagatttaatcttgtaaaattcataataaattcatatgaaatcggaatgaggccgttcaagtctctaaattcatctaaaatcatgatctacatgtttgtttactttatatgtactgtttatttagtttttattagtctttttccttgttttggcgtgttagcttgtcgtttccgtcgttgcgaaggttcgtgagtgcgtcggaagtaatcaagaagattaattgaagaccgattattgcaaggcaagtcacacagatcttaaacacaatcctttgagcatgttgatcctatatttaaattctctatttatttcaactgtgcatttattttcgaatgtcaccgggtggtgtgaacctattcctttgttatggcctgtttgcattgattactctattccttgataccttgggatattataatttgactagttgagctttatatatattagttcaactagatgttagatataattgcttagccatgcttagaaacattagctcactaatgggatgaatcatatgtactacattattatttatggttatatttaatggtagctcacgatggttaatcgtgttatgataattaattggtaattaaaatatgattaatggtgggttgtgagcacatggttttgagagtcgtgctcatggcaattaaggaccggttcgcgagctactgttgtgaaacattaaccgtgccaaccacaagccagcgtgggcaacggctttaccttttgtatagcatggttcattgcagagcaccagactgagaagtggcggagataagcccacgggggtcgctggggagtccatgccttgttttataagggggtgattatgatccaggaatggtgcactgtggtgagttgtgttgtgcggagggtattgtcacagcctctattcgggtactttccagtatcgcgacgcatggtagacatgatgttgaggctgtgtcttgtgggtacagtggtacacctctggccacagtaaaactattcgaatagccgtgcccgcggttatgggcgggttgagcaatatttttcgtgattagtctcacacctctcacaataattattgatgctataactggtaataatttgtttagctcctggtttggagttagatctgtacagccgggtatggttgttcaggatggttgggcctgtgcagcatgggtgtgctgttcagtgttgattaaaatttctgattaattactctactgttttactactcttaactctttgctaaatgctgcttttgcaaatgagcctatattatgccatcatttggtatccttgtgcacttgcatatttgctgtgtggcttgttgagtatgtcatatgctcattcttgcaataatcaatcaacctcagttgaagaaaaaggatccagaaggagaagacgtttggcttataccccagttgagctgcctgtgggagtgaagccggagcttcgctagattttatttttccgctgcagttttcttcttggtgaggactaagtgcctcttaagtaagtatttatcggtttagttaatatgatggatttgtatattaaattgtcagtttgtgtacctcggctgattcctggacgaggattttatgcacaaataagttcgggaattgctagtgaatttccgggcgtgacaagttggtatcagagccatctcgactgtaggataagccaaatggtcaaaccttaaggactaattttccgaaaacatgatttgtgaaaatttctcctttcttccttatctagaattctttgcaaattgtttcattgtctactctcctctctcgttcaacttgagtagttctgaaactagttgttgaaactagaagatgctgatgtggtcaacttatggaggtcagtcaagtggatcgaggaagaaacgaagtgcccagatgtcaagatggaatgaagtttggatcctaccttagaacctatgccgccaaagtgtctttgaagaatagttagtagggtagaacgctgttgattgctttgtgtgtaggtatggttgcattcccgtcattggagtagtccagtgatgagcgtgtacctatactaggttgcttgcttaatcaacttgaacaatataatggtctacacacatcagatcagtgttaaactggttaaggtcttgtctttagtgtaacccctctcctcctatcttttctaatctgcaacagatggtgaacactcgcgccagtggaagtggaaacaataacaatgaagagaacccaacccttgctcaagtgctggctcaacagacccaattgatcaacatgttagtgcaacaaatgcagaaccagcaagggaacaacaatgtcaatcctccgccgccgcagaacaagttagctgattttcttcgtgtgaagccgcctaccttctctagcactaccaacccagtagaagcaggtgattggctgcacactattgagaagaagttggaactgctccagtgcacggatcaggagaaagttgttttcacttcacatcagttgcaaggacctgcatcggaatggtgggatcatttccggatgaacagagcagaaggacaaccaatcacttgggcggagttcactgaagccttcaagaagacacacatacctgcaggtgttgttgctttgaagaagcgtgagttccgggcacttaagcaaaaggatcgtaccgtgacggaatatcttcatgagttcaatcgtctagctcgctatgctccagaagatgtgcgtactgacgaggaaaggcaggagaagtttttggaaggcttaaaggatgagctgacagttatgttgatctctcatgactatgaggattttcaggagctggttgataaagcaattcgactggaagacaagaagaacaggatggacaatcgtaagagaggaaggattgttttcaggaggcacatgatagtagccagaggcagcgtatcaagccact

SEQ ID NO: 10433 - DNA, 6228 bp, Oryza sativa
tcaaacccctttgacacacctacgatgatgttgtcagtcagggtcctgcattgaatatttgcagcagagtccttagaggaataggcatagagaaaggcacatcaagatcataaattcataatttcttatcggcatatcacacctttcatcactcgatcccataaaaaatgtactgagtacgccttaaccaagctgggtattctcccaattcagattatatgttgctaaacattcttatctactggaatttcttttcaaccctcaaggtttattcaattatgtttgatgcataccggttaagtgtatagcttacttttctaagatccagaacaaagcaagatcatcaccaatattgattacacgaacacgaggtcagagaacagcaaacattaaaggaaaaagctgcatattgcaatgtagagttcacatccttgaaggagctactgggagtatagggccgcggttatctatcccgatgtcaaaacatgttgagatgcaaacatgcaacttatttaaggcactggtaatatgacaatcaaaatacacatggcccatgtgaattctatgctcatggtgctctccactgcaagaagcaatggctcatatatgatgctttgtgacaaacgctgacagatcttaagtagctgacttctgaaataccaggaaaaatatatagaacacaaacaaaaagatacaccaggaaaatatatggaacacaaacagtaagatacaccaggaaaatgtatggaacacaaacaataaaatagtacagtacattatgaacagtgaaccagaggaaaatgaaagcaaaattgtcttacctgaaaaggccatgcatctggtttgcccttttggtctccacagtcttggaaactctcagcttaccagattcttctttcaccacttttacttcacctggatagtttagtgataattctcctaatggacccttagccttaataaactgctcctctaacgtgagggtcacatttgatggcacttcgatcggcttctttcctattctagattctttgcactccactgttgttctgacaaaaccaactctgccagcagggataacacgaagacgaatcccttgtgtctttccagcaaagccagtccttgaattgctgatttaattccgacaaataaacactcaatcaaaactttcatattaaattgcaaataaataattgccctttacaacaaaaaccaatgcattattttagtttgacagattagtaaaacattataattcaaatccatgaagtagttactagctagaaagataggattcaaagaccaaatgagaaacctacaatttctcctgcctgaacttgtatcaacatagctctttgtttggtgttcagtttatgagtgatagcataatgccataatgaactaattaatttaaaaagttttttggcaagttaaatctttcagttaatagcacttcggagctgattttctgaaacaaatctagaccctcggtattggcccgttaacatggccatgatgtttttgaagaataatgctagcaagtaaaatttcatggttaatcattaccacaccactgatgttaagttataaggtttcagatattgaaagggtatttgcatacttttccaggttctcaactagtgatcaaagcaagaaaaaaaaaggggtattatatccaaagtgctgccgcattgcactaactgattggaaaattttccgaaccctcaaccaaacacatccaaaactgcaatccttcagctacaaaatgaccaagcccctgacctgtctgtgactcgtgtatcactgcaaattgcaggcgcggggagactcaacttactgcactcaatcgaaactctcctaggaattaaatacggcctattggcatactcctaaagccaattgcatccaaatcattgaattaaggatgatgggcaccatctccaaatcccccatttcttggcggagcaacaagaaagcaactaatgccggttcttggcagcgcaaaaaaaaaaaactgaagcagcatcgacggggtggaggaggcaggatgaggaggaggaggaggaggagggggagttaccaagggaggtggagggaaggggagagggacgccatggacgcgctcgtagacgcagccgcaggaggaggaggaggagacgctgcctccggtcactcgcagtgtatctccctgctgcgcggcgtttgctccccgcattatccacaacgatggaagggaggaaggtggcgaagaagccgtcacggactcatgggcttcaggcccgatacaacacgggcttggtggcccatgggccacacgataaaactacagttaatttgaaaaaaaaaaaagttctaaaaactgggtgaatagctcactgtcaagtgtgactcgagagatactataccatatatatgtagtcatttatttatttatttttaccaattccactgtaggagaggtctccagttaaaaatgttattaagagaagaaataattatagggtttcaagccaagaagttataatagtttgtttttacttttgaatatatgtttttaaaaataataacaatataagccatgcttttaagtacacgtaatgataaaataaatcataacaaaataaacaataatcacgtgatagcagtccaaaattcaatggagtcaataggtattgcatcatacgcatggtgtgtagtgacagtaatgtcaggcatgttcgtgatggtttaatgcgacacacatcccgaatttctatgaatttacatacatgaattttctaaaagagcattttaaacctaattttttcagcttttatcataatagaatacttcattactataatttgcgtcgattggattaatccccgtagaaaaatcttataaagttattatttatatgttctaaagcattgcgttttctttataacaggctattataattacgagaaacttgtatgtacgaccaaacagtcataatttattcaaatttacaacaacagtgttgtgtcaacaggggagtacacgctaccatctcgcacatgttccattcccatccattgcgcttaataatgtttcaactaatcgagccacccatcacctgcaagttgctactacactacagctgttttcttgaccactcttgaataataatcagaggccattattcctaaaccacgattaatatcactgtcaaatactactcctcgccgtcgtcatcgttaactccgattcacaaaaatacatagctcacccaactctccctccccttcctctcgccggagtcgccgcggccctagccatcgaccggcggcggcggcggcggcggtagccgtgggatggacgaattcggcggcggatccgtcgggccgttctccaagaagccgaggcacctgtcccggtcgctgacgtaccaccaccaccaccacccctaccagggccaggggcgctcgccgtcgttcaacgcgcggcgccagcatcatccgcagcagcaggaccacgcggtggtgctgtacacgacgtcgctccgcggggtgcgccgcacgttcgcggactgcgccgcggtgcgcgccgtgctgcgcgggctccgggtggcggtggacgagcgggacgtgtccatggacgcctcgctgcggcgggagctccagtcgctgctcgcggcgcggggccgccccttctccctcccgcagctcctcgtcggggcccgcctcgtggggggagccgacgaggtgcggcagctgcacgaggccggcgagctgcgccgcctcctcgagggcgccgccgggcaggacccggccttcgtctgcggcggctgcgggggcgtccggttcgtgccatgccccgcctgcgacggatcccgcaaggtgtttgtccaggaggaaggatgcgcccgccgctgcggcgactgcaacgagaacggattggtacgctgccccaattgctgctcttgatcgcttagctttgtgcaacaataaatcttccatgttaatataaggattatagcttataggtaatagtagtagatagaggcaagaagggatgaacacttcttgatttcttggcctatggattgtatgtgattatgaccaatttgggtgcttagtgttcggcgtttggggattatagtgtatggatttgagcctatatgggtttgtatgtatcaaatgtaacaaatattctgcagtgcgtagtcctgctggtttgatcaatgtaaatagttgggtttggtatattcagaatacagttcatgtctcctactagtttgtcttttaacttcaaggatgatagatagatagctgcttcaaagcaatataatgcgagctgatttaacacatttttagctcctagttaatattaaaacattttttttggcaagaagtgatatgcgattcaatagcttcattctaactaagccgttgtataatcatatggtagtgttatccccttttccccttcttctaagatggtagcattgttgtttgcaaatgcgcagttcacggaacattgtatcttcagcaataccagttcagttcctccagttgtttgatggaaacttcatgtagtggcattcagccagttttgacaatgctaatcctttgaccatgcaacatctgtctccactcgacaagctttgtgcgaaggcatagatgaggtatcattcaagataactagaacagtagagattgtacatgtgtctatccgatttctagtgtgtacaaaacctaataggatttaaacctaacgaaattagtgtacaatgaaccatacttattgtttctctcatcaaatatgatgtacatgattcacgactgtaattagcaggctattgcaacgctgacatatgaatcacgatgatgcatgtgagcccaaattggcgtcacttgtgtgattttagcgtttgttttggtttgttgctaaaacaaactctaccaaagccaatccaaatattgcccaaaacagcctctattaacaaaatttggttattctagaaacttcctcttgcaaaaatggggcaaagaaaaaaaaatcaaaaacacttattgagttaacaataccaaattttggtagagttgatctgggcatcaaagcaaactactcccttaacccttacttccatgagcaaattttgtgaaatccttcagataaggtgccacgtccacgacacagtagtacgacgggtgcagaggtgcagacaattgaagggaaggcagtaacgtacgggcacaacattattgctcctatagcgtacaaacagtactactccggacatgatgcagatcaaattattgattctagcgcttcaactcttgttttttctttaagaaaaaaaatcagcacttcattttatcttctactaatatttactctgggtgctcaaccccgatttaatcttgcacaccaagttgaaactttattcggaaaaagcttacaaaatcattctggtattcaccctccaattcaaaagcagcatttaagataaaaggaaatggtacatgctacatgacatttcaccatgatttgttacagcatatccgattcttaagaactttcagatcatgccttaacatagctagaaatatgctgaaagaatgaacaaacaagctagagatatgctgaaagaatgaacaaagaagctagaaatatgctggaaacatgaaaaagagttcaacacattcatctcatgaattgccattagatttccctataccacagaatggcaactcaacaagcagttcaaggcaaagagaagtttgccaggaattctacaatagtgccactctggtctacatgactgtcatctagtcatccacaggcaccaatctaacagaagatggtagctaaaacaagctaataacattacaagtcttcattttagagtcactgcctatgaatggctataattctcgcactgtgatgatacataggttcatgcaagggttaagaacgatgaacagatcatttcacattttattttcactgttccttccaaattctcccagtgacccgcaatttgagctccttcctttctccaccagagaagaacaaggccatgttccgttggatgataagcccatcatagctatcccggaccttccgatggctgtctctgatgctccggggaaccccttgcccgatcattttgcggccagtgcctcctacctccaggctgtagctgtagttctttgcttccaagtcatcacccatgaacctcaggaaggcgatgtacacagg

SEQ ID NO: 10434 - DNA, 28280 bp, Oryza sativa
tttcaatttaaacatggtatggattaatctgatctgcttaactgatgtccactccatttaaatatattgaggtagcttaggtaaggcagtgaacgaatataaagtatcctatagacatgtctatgttaagaggaatgatttagtttaataaaagattgatttgagaaaggactcatattctagaggtggggtaatttttctttgttgcatcgattcttctctcactatactagcttgtacacattttcccataatttcttttcaaatgtgcttataaatgaaatgcggcatcttggagtagacatatttagagatccaatcatattacacttgtatatattttgtatatcttcgggttctttagaactggtagacaaccgagtggcttaatttactgttcatgctcattcatatactagcttgtacacatttttccataatttcttttcaaatgtgcctataaatgaaatccggcatcttggagtagacacatttggagatccaatcatattacacttatatgtattttgtatatgttcggattcttgagaacgggcagacaaccgagtggcttaatttatttgttcatgctcattcatatactttttgcatgcatgtacattatgtggttttgcctgtctgctcacgtctcttacaaacgttttaagatttagagttcatttatttgttttgtttcggtatctcttatatgcctctttcttgtaatagtcgggttataatcatcttttcttttgtttaatataatatatgcactgattagatgaaaaaaaaaagttctattgctggtgcctaactgtatatagacttccatgcgtattatgcctaccatgcaagactaggggttgtttggttccctcccaaacattgccaaactttcttgccaaacctagccaaatatgtggcttataaattgatggccacaacttagacatggtttggctaaaaaatggttgtatgacatgtgggcctttgaattaaaaaactgtggcatgtcacaagtttggaagtgaaacaaacatatatcttaaaaaatgtggcaaagtttgctaaagtgagggagtgaaccaaacagaccctagtagccggttgtttttcgtttttctttctcacctgagaatgcataaaccgtgttggctccatgtcaaactaggaaatgtgaatcgcattagctcatgttaaacaatgcagatttatccaggttgacaggctgttcataaagtcaatgtgaggaggctgttttgattggtgtatccagggatttgatattataaatagcaatcatatcgcgctctcgttttttcagagtttgagggtggagagatgttcttctcctaattaagttatgagagtgtttttgatggtcacgctgatattagaggccaactgaaaagtgcagattatgtcgtactgcaatccatccaaaacaagtttgcatagatatttatcacacaatcaaataaacacaacaaaagcttttatagattgccaaaatccatggtgggatgtgtatcacaatatatgctgttaaataatattcccaattgtttaactcacaacaactaaacttggttttggaattccaccaaaactaacaaactcataatttataatttgtgctcatggatggatgaaggaatataattgccaagggtcatcaaaaccgagaaataattaatttataatttgtgcgcatggatggatgaaagagtatacctaccaaaggtcagtatagtgagttcaaacttcatttaaaatattattatttctttacttatatgatgctagctaatttttttcattacctttacagactagaagcaagttgtttgttgtttggcacaaatctacatagcaagagaatgatgtgaaatcaatattcttaacgatgaacgaaagttacttcgttgtatcactaaatgtgttacaactagttaactggttatttgatatatatgtagaatgtgtctagtttggaccgattaatatccacagcaggttaatgaacccatcaacatatagtttgacatcttaatctgaattataattgtatataaacatttttgttgttatttacatcattataaatagttaatacatcagtacatacacatgcatgcgtcacattaaattcattttcccaaaatcacccacggtttgctaaatccgttaatgcatacttttgctaacaatatacctcatgtcttatacttattggaatatatgacactaaaaagtattaagtaaagtgcacagtcggtctctaaacttatgtgattatatcatctaggtcttcatattatttaaataagatttagattctaaaacttgttaaattgcttcatgctatacgcgtttgatgatagggtgctacgagtggattccacctatccattcgtcacggttaaatccacatgcttgtactatgcaagtgtagaccaagctccagtgcaccatggagtatgtatgggacgggacctgagttgaaagcatatgagccaggataaattttcatcgtgatctcgtataacaaaacaaaactaagagcctcctgttatacatgctctaatgcgtgttgcctctcgtgttatattttgaaacgaacagcacaaagacaatatgatgtttgcatgaaccctgaaagatagtagccagaaaaaaaaaacagaaaaacaaatcatcattgtcgacgggggataaccgtagatcggatatagagggtattggggtacgctggtacgaggatctacgtaatacgacatcgagcaggcagaaaacaaagattatactggttcaggccccttgataggtaataaccctaatccagttgatatgggattatatggtgaaaaccacagattacaaagagaatagtggaactcgatgataccgacgagatcatagtcgagttgattcgactagatctcccggcgacttggctcctgtaagctccggcttcgtaggctgtggtggatgtgttggcggtaagattcgatgccttaggtccttccggggggtcccttttataccgcaggtcaactggtctccaagtaggactcggagacattggacccgacacgatacaatgacgacccagttctatccgagtaggactccttacatctgtggactccataatggaattccttaacttatgccgaaaacgtccgtatacgcgcaagcataccatatctatatgtgacgtatatcgaagggtagagggtataccttacccgtaaccctgacagtagcccccgacttctgcttaaatgaactcgtgagaccgatcgcgacttctgatgtcgaagttgtcgtcgttctcgatgtgaggaccgagagacgaggagtgatcgacaacgtcgggtgaagctcaacggtcatgagtgaatttaaattgaagtctgaaaaactgctgcgcgtaacggacccataaatttccggcagccatctctctcctttccttggaattcgcaccgtcggaagtatccaatttgaagtccgcctgttgaaaaaaaactctccagtttccaagcgttcctcgtcctcttcgctcccgcaaaaaccctagctagctcatctcggtcctttttccggcaatctccggtggcaatggatctcgacaagtctacctccaccaacgcatcactgaagaaactgcaggaggatggcgcccttcccggtcgcgggaccgcggagagggaagtaggaggtactgaaccccagcctgtcctgggtcgcatggttgcgatcgaggactttattctctgcggtttttttcctccgccttctgaatttctccttttggtcttgaatttctatggtctttccttgctccatttgaaccccaactccatcgccttcccgagtatttttacgcatctttgtaaggcctacattttggtagagtcgtttcttgacctcttccacttttactatgagttacgctggatggaacctaaaaaggtgtccgggtgtgttggtttccgacttcgggatggcctgaagtcgcgatacatccccttccagtgcccctcatcacgcagcaaatggcgggggaggtggttctatcttcagatagaggattcggatccagtcttcgttgttcctgaggagcaaccagacaagattccatcttgggccaccaaacccacctagaccccatccctccaatctttcatcgatatcgttgacgacctccgagaacaggggttgtcggggtttgaagtcgctgccgacttcatcggtaggcggatccagccgctttaggctcgagcccatccagcctttgattattctgggccagagaacgcaacccgggtttctcctcggggtattttcctttttagttaaattgactcccttatgcgtgtgtccttcccaacttatcggattctggtctcgatctacaggcttggacagcgccaccgtggagcgccgcgtcagccaactgatgatcagtggcccgacaacggcgagcaacgtccccgtccccctttgcgagaaagaggcagccgagcgcgacgctgccatcaatgtaagtgtactcagcggtcttttcgcatttttcttccaagatcacattatgacttcatgaagcgtaggctctccctttgactgatatcatcgggctgctcgtggaccatcaggtggcggtgtcgctgaaggagaaagtcgccaaggaggcgtctgacactgctgccgccgctgccacaacgagtggcggcaacgctccgaaaaaggggaggaaattctcctctgtggtcggacaccgtcggaagacgcccaccccctcggtaagttctcctgccctttgatcgcgtagtcggaaaacttccacctcacatcatatcggttgtactccaggcctcggacgcgtctcccccacctccacgacggcagaggctagtgacgcttggcgagaagtaagtggatgactttgaggtcttgtctcttcgtcaaactgttgcagcctgtttcagttgcggattttcgcagggcggcatgggcgaaggcggcgcaagacgggtctagagggacctcgacggatttcgtggtcgcgcccaggagccgcgaggcgacacctagcggcccaactagcgatcttgcggctggtcggggtctgccggctgccattctcacctgggaggagctccaggttgagatggggcgcctcctcgaggctagtgctcgcgacattggccgcgagattgcggaggcgaggacggcggcggcgttgtcggcgaatgagcgcgccgaccggctggcgcacgatttggcggaggttcgcgaggacctccagaagatgggggaactggtggccggcaatgagcgacaacggcagggactcgagcaccgtatgtcggagctcgagaacaacttgtcggaaatccgtggctcgttgcgggtcacctatactggactgcaccagctcgccggggagtgcggtatcaagtttaccatcccggcgaatcccgatgagttctcgctgacgtcttctcttgcggagctggcggcggcaatggaggagatcccctccaagcatgcggccaggatcggagaggagacgtccaacgggatctataccggggcgtgccacgtccttgcatgtgtgagactggcgcacccaaaactcgatctgcggaagatcttggatcagggggcggctagcgacgcgtgcaaggatgtgatggaagaagtcggcgatctgggggagtctattctcccacttgttgaagagtaggattttgactctcttgtactctttagtcatgctttgtaaaactttcgttggttccaaccacctgtgtgtgtgcagtcagcgccttagctttctttagcattttgatcttgagtactttgttgtcgtttgtagagatgttgatgtcgaggatgtccagcagcgcgggcagcctgagctgccagtggtcgttccgttacttgcgtctgagccacacatgccggagggcgatgtagctcaaaattcgcctgtgggaatgagcatggcaacgactcccttaggttggttatctttgttttcatctcctttattcttccgtctggatcgacttgatttgctgtattctcgggagagaagagcagtctaacttagtcgtttccgtactgagcagacctcgagagtgcgcttgctgaccaggatcgtcgcatccagtattggaggacgaagtttgaggtcgcggaactcgagaggactatgttggaaatgaggaaggatcaggccgtggagacgctctgtggtcgcgaggtgtggttcaactcgtatctgaagagttgttgtacctccatgttaagagtctgtaaagagctccgagtaccccgtggggatcccgaggaatcggcggctggatacatctcgtggctgaatggggcctgcgcccagctcgagggcatcagccagcgtatcgacgaggccctgaagcaggagtgtcgtcggtcgagccgatatgccggggggcatgtattggcttgtatacgagatcatcgtccgtagctgcacctcgagttcctccacgaagggttttctcgtttttggagaactcctacggagatagatggcctggcgaagtcgatggcgccactggcggaaaaggtcttccaatctatggactggcgttggccttcctggtagtcttcgtgtcctgtgacaaatgtcttaggggaaaagtgtaatataattttggatttttatggaattgtaagaagtacttgtgaaatagaaaagaaatctatctaactaagctttcttactctggatgtagcgtgtatgagtgtcttcccagttcgcgacttcgatcagtcgtttgagttatacactctccctagcccccagccttgtcatcggagaattcttctcggaagataaggctcttggacctttgacctgcctcggttgaacaagcactgatcctagcccccagccatgaagttggaaaatttatttctgattacacggcttggttaatacgcacggcgagaactcttacacgactagatcttacatggtctttcgtctctacaggatccgacaaggccttatcggctctgggcgtccccagccgaagttcccttaggttcctcggaggccttgtcaagacgacgtaaagggacatgaggataggtttcaacactatgtgtcatttgggtaagggatcattgggaaggaacactttgatcgtagtctgtacctgaaaaataggctttattgaggctgtaagatgtcttacaagtatggatactattgacttatacatagaatttacgtaattgatcaatgttccaggaatttgccaactcgcgaccattgccgtctgcgattttgaatgcgcctggccgcagaacttgtgtgatcgtgtacggtccttcccatttgggtgagagcttgttgcgccctgcttggctttgaacccgtcggaggacgtagtcaccgatcgaaagcgtgcatgctcggatgcgcttcttgtggtaacagcgaagggcctgttggtagctggctgctcgaacggcaactcgttcgcgatgttcctcgagtagattcacatcgtcgtatcgttgctcctcctgatcctcatcggaatacttatgtactcgtttactttgatgtcgtagctcggtggggagcatggcctccgagatgtaatagactggtcgttgcaccttctctctctcgacaacaatgacagtgctaacggaatatggcgtggcggaaatatagagaaataattctttattaggttgggggcaacaagtacaggtggatttgataggtagcgcttgagtgcaatgaatgcctcttcgacttcctgtgtccatacgaatttgtcttgcttttttagcagagcgaagaaaggttgtcctcgctctcccatcctagcgacgaacctgcttagtgccgccatgcatccgattagcttctgtacttccttgagtcttgtaggcgacttcatgttctcgattgccttgatcttctcgggatttgcttctattcctctgccagagacgaggaagccgagtagcttgcccgatggtactccgaacgtgcacttctctggattgagcatgaggcgatatcgttggaggttgtcgaacgtttcccgcagatcgtcaatcaatgagtcacttgtcttggtcttgacaacaatgttatcgatgtaggcttcgacattatttccgagctggtcgctaagtgcaccttggaccgtgcgctggaaagtgtttcctgcggttattagtccgaacggcatcttaacgtagcagaataccccgaacggcgtgatgaatgttgtcttctcctcgtcctctttcgccatgctgatttggtagtaaccggagtaagcgtcgagaaagctcaacaactcacaaccggctgttgagtccaccagttggtctattcgaggaagagggaagtgatccttgggacacgccttgttgaggtcggtgaaatcgacacacattctccatttcccgttggccttccgcaccatgactaggttggttagccactctagatagagtacctctctgatgaaaccggctttgagaagtttgtcgagttcttctcgtatggcttgttttcgatctggtgcaaatctctgcagtttttgttttactggcttggcatcgggtcgcaccatgagtttgtgctcaatcacctccctgggtaccccgggcatgtcggacggctgccaagcgaacacgtcagcattgtcgcggaggaaggtgatgagcgcgagttcctatttctcgcctagtgatgccccgatcttgacggtcttgttggggttggcactggagagtggaacgatcttgattgcgccgtccatttcggcgtcttgtttgttttgctcactttcttgggtggctcagctgtggcgagtgggctgggtgtgtgctcgagcatgtcaaggctccgcttgtcgcattgcactgccagcttagcattcccttaaatagtgaatgttcccttcggtcccggtatcttgagcacttgatacgcgtagtgagatgcggccatgaacttcgcgagtgcagttctcccaatgatggcattttatgctgtatcgaattcagcgacatcaaaggtgatctgttccgttcggaagttatttgcttggccgaaagtcacaggcaacgtaattttgcccaatggtttagacgatgactgaggagtgattccatggaagggttgattggtgggtgtcaactctcttcgtgggatccccatcgcgtccaaagcgctggcgaagaaaaggttgattgagctgccgtcgtcgatcagaactcgcgtgaccttgatattccgaatagtgggttcgaccacgatcagatattgccctaggatgatggcagtattggggtgttcctcttctgagaatactatcttctgttcggatcacttcatcttgggcgcagccccctgccacatcgaacaaacttcacgtttcaccttcttgtattctcgctctgaggagtatgtcgtggaacctccgaagatgtgcgagacatggagatcggagtctggatatgctgagtctgattcctgagtaaccgcctcagcgtccttctcgaccacacgtattcgcttgcctttttcaaataccatatgttttacgagcgacttattgaagacgaggcaatcttctagagagtgtctatctgacttgtgtatagggcaccatattttcttcgcgtcgctgccttgtgggtctgggcgcttgggagggtccgcgtattctgctgcgagaacttccgcttgagctttccttttcccactcttgcgatttttcttcttgcttgactcgggtgcgtcctttgctggtttcttctctcctccggtcttcggtttgtcgttcttgcgtctcagtgcgtcgtccgcatgagcgcatcgatcgacaatttcgaataatctccgagtagtcatgacgcgcctcgttgccaactcctaagtagtatagcgatctctgacaccggacttgaaagcgcgaattacagaagcgtcggtgatttcagggattgtatttctgcactcgttaaagcgccaaacataatccctcaaggattcacccgggttctgtgtcaacgcatgtaggtcgtcttcgatcgcgtggcgcttgtacgttccttggaagttggcaacgaactgctgccacaggtctgcccacaaagaaatcgagtaagggggagatgcatcagccatgaacgtgcagagcctttcaatgcagttggcaagtaattcgccaatgcgttgtcgtccgctccggcagcgtagagtaccgtggagtagacctgaaggaattcttctaggtcggtgctcccatcgtatttctctattgctcctggttggaacctttcaggccatcggacatcttgaagtgaacgaccgaaagctctacacccagcgctgggggcggtgggttgtcggcgatcgtacgtccttcgcggatgtctatctgatgatgaggatgaggaagatgacgacaatgacgatggatcgcttggttccggcgtgcgattacgaggacgtcggccaggttctcgagaactctgtcgtcgtctctcgttgttgtctcggcgctgatctccatcatcgtcgtcattatggcaacgtcctcgaccagaatcgcccagcacccgccgctcgcgatcgtcgtgatcgcggcggttgtggcggttatctcagtctcggtcttcgctcgaacggcctcctcgttcttcgttatcgtgacgccgtgaagagacgcgatgtcaggaacggttctcgtcgactcgtgtgcgtcgcgcctctcggcggccattcaggtgatcgcggagatcaccggtgccgcgaggtggaggggtggctcgatgaggcgattcccgctgttcagggttttcaccattagcatcgccagttggtggctgtttcgggtgcgctgcagtggcggcctcttcgaacgcgttgctgaggttggtcactgattcccataaccgctttgtccatcgtgcgagatcgtcgttcagaacggggtcgtagggagtttccctcagtattgcgttgacggctctaatgtgctgggccggtgtaatcacttgattctccgcttccgcattggtgcatgctgacgtgccgacatcgtcgatagccaatacctcacgcggcatactcgttgtcgatgaaccatagtcttcgagcaggtgcaagactgatggttcgtggggatcgatgtcgattactccaacaaatcgatctgaaatcggcgtcgctccttgttccttgtcctcatccctgaagggaacgcgtgactgctggaccttaggaggtggcgtcttcatggcgctgagaaagaccttgcagctcgagaggttgtgattctttgtcttgtgaataggacaatagacatcacgagttggagaggtacgctgaattccatgctctttgcaggcacgaatttcagcatggacgttgaggaaaacccagcaggcttgcaaggtgtgttttctggttttgtggataggacaccaggaccttgtcacctcggaagtaatcctcgtcggctcatgattcctgtcgaaaagacaaggcttagccgcactaggatctcgaactcggatgttgtcgatgttccgatctccgcttcggcaggaggatccttcgacatggagtcgccccgggttgtagccactgcgttctcgtttccggtcattggcggactagctgagatcggcactgtggtgtaaaccggaaagacgatttcgccgacttgagtccacaccagtattgttgaagtaggaactctttggttgaggttggtattgacgctattgtcgacgaagctggatgtcatagtagtagaaccttgagcactaagtccccctacctggcgcaccactgtcgacgggggatacccgtagaccggatatagagggtattggggtacgctggtacgaggatctacgtaatacgacatcgagcaggcagaaaacaaagattatactggttcaggccccttgataggtaatagccctaatccagttgatatgggattatatggtgaaaaccacagattacaaagagaatagtggaactcgatgataccgacgagatcgtagtcgagttgatttgactagatctcccggcgacttggctcctgtaagctccggcttcgtaggctgtggtggatgtgttggtggtaagattcgatgccttaggtcctcccggagggtcccttttataccgcaggtcaactggtctccaagtaggactcggagacatcggacccgacacgatacaatgacgacccagttctatccgagtaggactccttacatctgtggactccataatggaattccttaacttatgccgaaaacgtccgtatacgcgcaagcataccatatcgatatgtgacgtatatcgaagggtagagagtataccttacccgtaaccctgacaaccaccaccacacatcgacaacatctacataaaatcaagaaaagagttagcaccagaccagccgttgctagacaaaaaaggagctacagccaaaccgttcaaaatcaaaccctaatagacgagcccctagccttctagatgttgtccggacgaaaaggatatagaaggagagggcaagagagaagaaagatccctctccctcggatagacccaccgatcggctgccatccagcggcttcgcatagactgtctaggaccagttttggcaaaagggggcctcctagatgacgtctccatagagaagagcgacactattgtccctcgtggtctctgtcagggttatgaataaggcataccttctatacttggagtcgagagatatacggatacggtataccttcaagtatacgaaaaggttacttttgggttaaggaagtcggtgggcttctcaggaaataatctctacaaattgaaggggtcagagtcctattcggagaacataaggattttttcatactgtgtgaggtctgttgtctccgagttctacttggatattaaggtgatctgtggtataaatgtaggccccccgagggtacagatcatcacatcttagtgcaatacacccaccatagtaggagcaatccagaggacttgaagccaactcgccgatagatctcatctagttgttctcgatagggatctcgtcagtaatctcaggattctattgttctctattgtactctatggttttttttcataatcccatataaaatggattaaggctattaccttacgagggggcctaaaccagtataatctttgtttcctgtgagcttgatgtcgtatcaacatacctcaatacccttagaatacggtcggcgggtatccccccgtcgatagtttcaaggagatctaagataaggttttcactaggaaagaagatggacatctcgacaactcccccaagagtgaatacgacgcctaaaccgtgtcgttgctgacccgacaagactgggctaggctttcacccacctcctgtcccctgtcgatctactgctaccgctccattgcaccaccaccagtcacccatcataagcgccaccgacacctcccgtcgaccatcctccgcatgcctccacatgctaacatgacacacatgccatcactagcctctcgccgctagtcatgcatgcatcctcgccgttgcccgtgtcaacctcccgtgttgctggtcttcctatcatcgttagagtcaacctccagcattcgtcagcctccctgttgtcacctgcattggccacacatgacctcccgctgttgccacgcgagtggtgtcggtagtgctgtagccactcccagcagcaacctccgggaagaggagcaaccactgccacacctagtaacagctgctcctccacacacaccgtcactagaggccatcaccatgtgcttctccctcaccaccgtcatttgtcatcaccgagagctacctcgtcgggggaagctagagggagctatgctggaggccgctggatttggcagctcccgctgccacctccgagtccacttctcgccaccctctgccatgccgcctagtacccccacccttctccaccatgccgtgcgctaaccttcacctcgccagatccgtgaaaagggctagatatggacagtgccacctccttcttcccggttgcttcagagcccatattaacgcgacgttctcgaggaggaaaagagttcggcatcatcttccttgcaaccacgtggcttgctgacgggttgctccggtggtggcaaggggcagaggtgcgggggtggctgcgtcgctcaattggttgtctcctgtgtcatcccggattatgatcacacgggtcctctacttagtgagccatatgccacttagagggtggtaagtgggctgcgagctagagcgtatattctggtcccgttcatttcttcaagagttggatgaagataaaaatttttgtgacacgtttttcaaaccgctaaatggtacgtttcgtacgaaaattttctatatgaaagttgctttaaaatatcatattaatatatttttaaagtttgtaataattaaaactcaatcaataatacgttaatactatatcattttacgttaataccatatagtagtagtttggcacgagaaaattgttccccgatcgtgcttattcaaatctacggtgagagctaacactacgtggaagaagaaccggacgtcggatgcggcgtcattgcaggatcggcggcgacgccgggggcggcgtgctgtggctgagccgcgccgcagttcgcggaccacacgcccccccaccccccgcctgccgcctggcccggctgccgccaagtgtccgccgccgcgtcgtgtcgcgtcgcgtcgctcggcccgcctcgcctcgcctcgccaccaatatctccccccaacctcgccgcgcaacgcgcaccccccgcgtcgaacacccgaggaccgggagcccgcgatggcgatggcgatggcctgcctcaaccctctcgcgctctccccgcgcctggcctacggcggtagagcggccccgcggcgctgctgctcggtggtggtgcccacatcctccgcgcgcgccgcggcgggtcgctgcagatggcggctcgcggcggtggcggaggagccgcaggccgtgcggcagcaggagcagcagcagcggacggaggggtcgggtgaggccggcgcggaggcggcggccgacgcctcgtccaagctagttctcgtcgtcggcgggaccggcggcgtaggtaaggagacccacatctctagcccttctctccatagcttcagtgtcaccttctctccattggagtgtcactactgtgtgagtatattttttttttcacaaaatatttcgtagcattttactatgccattatctgattatgtcaagctcatcatgctggtaattcttttagttaagcgtacatttgctctgcattttaagtgataaatatatgttctgcagttgtctagatattgattgagcagatctgtcgaaactagatttcggcaataataaaagggggtggctatcaagctcggaaagtgtatgggtttggagacaaaggatttatacaggttcaggccttcttataaaagaagtaataccctactcctgtccggggatgaatccgccgagtgtattattgattgtatgattcgggaaaaatcagcatatgcccctagaggcgcccggaccccccttatatactggaaggagtccggattacaaaagataatctatattcctaacggaatatgaagatagaggtaaaatacagtcgtaaccgactaagtctcagggtgtttccttgatacacaagttaagaaacaaacccgagatacagataagatattctatctacattaagtatccggtacccagttcgaataccatcgccgtgtagatatgggatacccataatctccacaagatccttgcagggcagttggtggtggcatctttactgagcaggaacatcaagacaaggttgttgctaagagatcctgcaaaggcagtgaccctattcggcgagcaagatgagagcgtatttcaggtgatcttacatccagagagcttgaacattctatttccttctgtgtaaattttgctcatgtaaattgttacttcatggaaggcttacaaggctgacacgagaaatgctgcagaattggatccagaaatatttgaggttcattttcttgtgttttattgttttgaagctgaaatggtagagcgttatgggctttctatttatgcatgattgaataaagcaaaatatagggatctcttttcacagggagttacgcatgtcatctgcactactggaactacagcattcccttcaaagcgctgggatggggataacactcctgaacgtgttggtacgtactgagtaaagttcttcagttcttgttgaaaccatctatttgtttgttctacgtacgtaaatggaacagtgatggttgatcttgggggatggatgatccttgggtaaagtctttcaatcccctatggacaaactaagaattcaactgtggcagtcgcggagtgctaataagctgcttatgatatttccagatcttggcattcccattgacagagtttaatatgtaccttttgttgatcatgatcatgcacactacagttaaattcattccctgtgcattgatgttaatgatatttcttataagttataactgatataacctggtctatctttgtcacgcataatgagctagcaacatcagctatgtgcctatgtcttgttgtgtttttttttttctgaacacacaccattttccctttctagattgggatggcacccgtaatctggtgagcgccatgccacggacaatcaagagactggttctggtgtcatccatcggcgttacaaaatacaatgaactaccatggaggtatactgcagaatttcaacgaaaaactttggtatcttacagttgaacttcctgtcagtcatactagtctccaaagtctaaagttgcatgcattccatgagctatcctgaaattttactagagtttaatgaagaatttatatcctcaatatacttatgagtttaatttagcaatggtttactgtgagacaatgtacttgctgtataagatttgcatgcttatgcttccaaaacccatcttaatcttgaattttagttcattaagtctagtgtctgcttcctcaacttctattgcgtcacaattttaaccttcactcatgctatgcatttttcagtatcatgaatctgtttggtgtgcttaagtacaagaagatggcagaggactttgtccagaactcaggcatacctttcaccatcataaggtattgtgcacataaatccttttcatggctcacaacggatacatttttatgacccaatactagctgcattgcaggcctgggagattaaccgatggaccctacacttcttatgaccttaacacacttcttcaagctactgctggagaaagacgggcagttgtcatgggcgaaggtaacttatactagttgttattaatggatttctgttaagctatcttattcttgcaactcttcatcactacccctattaggtgacaagcttgtgggagaagcaagcagactggtggtggcagaagcctgtatccaagctttggatattgaattcacagaaggacaaatatacgagatcaactcggtgaaggtatttatgcctggtgtttgatatttcctcgtgcgtgtgtgtgtgtgtgttctttttgaaaaatggcctttggttacgttgaaaactaaatatacaaaagctgtctagttacgttcaaactaaattatttatcttttgactgaagtgtcaattatcacttcagggcgaaggacctgggagcgacccagagaaatggaaggagctgttcagagctgttcaatgaaattaatggcattagctcaccctcatcgtgatgtattttgttcatgtatagtgtactttagtggaattccattgaggtagtttagtccattgtagttaactagtagtgtacaattcatatcatcatgtaatgagattttagcaattctaatcccaagaccgcattggtggtaattagatttggtactaccactgtcccaaaaggatttcatttctagccatgcatttgggcaagtattaggtgtatattgggcaggtattaggtgcatagtcaaaagtaaaatcttttacgggcaaaggtaggtagtaaaatgaagtaataactttttggctatgtatcggatatattcttttccagacatatagctaaaagttgcagatggagagaggtgtaattggcattcacttctaaagggtcaagcaaatactccctccatcccataaaaatagctatgatttagatttatttttttatgggacggatggagtacatcattttgttcttagagttgtattttttttcaatttttgggtaacttctggtcggttctaacgggaggatttatgggaaaaaaaaactgaactaaatattataaagctaacaagtaggcataggttaaaagaaaagttatcttagcgatcctaatgttgaaaaataattttcttatagaaattatactttttaatgtaaaactattacaacgttagatttttattcctttcattctaacatgttaatttctaagccttaattaacatctaaagctggaggttccacgaagatggaccagtttggcacaacttcaagtctagctccactttttcgtaatctggagtacagccaaatggcttcagctccaccaaaataaatggtaagagtgaagcatgttgaaatattcttataaaataaactagagaaattaaattgggctttgcgaaattcagagtaaatttttaaagttaaatccttaaaaaacatgccctcaccactacggtctacgggagagggaagagacagaaaccccgaaaccccccaaaggttcccacttcctcccacccgcccaaacccatcctccgccgccaacgcgccgagagcaaaaaaagagaagcaccgggatgctgtacatcgtggggctcggcctcggcgacgagcgcgacatcaccgtgcgggggctcgacgccgtccgccgctgcgccaaggtctacatggaggcctacacctccctcctttccctcggcctcgacccctccgcgctctccaacctcgtgcgttcccccccccccctccccctccccctcaccctccatgcccgccacctgttcgaccaaatgcctgttcccgctcacgcgccatcgccccactgttttcttgcgcaggagaagatgtatgggaaggagatcacggtggcggaccgcgagatggtggaggagcgcgccgaccagatgctccgcgaggccgccgacgcggacgtcgccttcctcgtcgtcggcgaccccttcgggtaatggtttgctctctgagagccttctgggtactgtaaacctttgctcttgtgcgacagcttttcggtttatgtcctgtttgaatgacaaattgcagcgcaactacacacactgatctggtggttcgcgccaagaacatgggggtggaagtgaaggtgatccacaatgcgtccgtcatgaatgcagttggagtttgcggattgcaactttaccgctacggggagaccatctctatacctttcttcacggagacatggaggccggacagtttctatgagaagattcagaacaatcgacggcttggactgcacacactttgcttactaggtttgtcatgcttgcttgatcatttatttcagtgtagtcaaagctcggcattcttaaggagagaggcaattgaacttgaatggctgctagtggctgacttcttttacggttaacacttccttacaaattacaatcatggttatggatcttggttcttatattggcaaatacaattgatattcaaaatgtaataaccaaagtaaacttttaatttatatgacagaccctggattgacaggtaaccactatttcctgtaatttattgatatcaacagctgatcctgaactgtcaaatgaacttgtcaggtgtaattttgtacatgcaacacttcatacgtctagcctaaatttattgacgcttgataatctttatggtttagtactttcttttcaagattaatcttgtgctactttcactttttccctgttactgcaagcgggcttgcttgactgttccttattaaagaaaaactgtggtttgattatccaatgcagatattcgtgttaaggaaccaacgcttgagtctttatgcaggtaaattgcatgatttcctgtctagtgtcagtagtgtgcagtgcagaactacaatttcttcttagaattagctatgtgctagagatgcttcattgctatgttctttcttcaaagaattgatcaatattctgtgcggcacaagcagattcatctgttgaatttttatgttgccatttaggatatatctatcttttgccattatattttatttttatttctttcaggggaaagaaagtgtatgaaccaccaaggttcatgtctgtaaacaccgcaataagtcagcttttggaggtggaggaactgcgtgggggatctggtattctcatggaatctctgaattaatttcccaagttaaaatgctcttgaaaaacagctgttagtctgcctatctaagtttaatgtaccaatctaaaaagggatttcattatgccctgcagggtaactatagctagatttttggacgttgcttacatgttctacttttcataggccagtaggttttacttctagattagcacttaaaaatcacttgtttccagcatatggcgcagattcactatgcataggtgttgctcgccttggaagtgatgatcagaagatcgtcgctggacctatgaagaaactactagatgtcgatttcggcccaccccttcactgccttatcatagtgggagagacgcatcctgtggaagaagagatgatagaattccacatgatcaagtcatgatgaatgaaagtgcttttatgtgagtttcactcctttcttgcaatgaaaaaaaaaaagcaatacttgtatgctttcattcgttacaaagcaatttctacaccttatatcctgtggctaatgttgagtcaatactcatttgcctccacaattttgaatcagggccttgtagctggatacatgatcccaggcttatagctcccttgaaacgatacttcgatgcttccgcccgccgtgaaaggtccaccagtagtagtttactgctccaattgttgctcatttttaagttaaactgggatcagctgttgttctttttttggcctgataccgaatactctcaaaccagtattgaaccttgtttacattgtgtgagctcatatttgaatgtgttcgtgcataaatcaccttgagatcaatgttactcatcaagaaacggttaccggaacattagctacaattgtggagtataaactcgtatgaatgaattgtggtaacccgtagtacgatttcgtgtcgtccgatcttctgtgccgtgtttcagatccatcttttgttgtctcacagctcagtctgagtctgggaagccttccagagttccagttgaagaggatgaacagtcacagaaaaaaaaagcaggatttttttttttttgctttatcgttcgttgcaaattacatgcttgatgatgctaattctcttcaccggataggggtgtactgctccatctgcagctggtgcagcgcggcctcggagccgaagctgtggcgtcccggcgacctccgggaccgggacctcgtcggcgtcatgggccccttcacccgcggcgaccgctgcgccgccgccggccggctggacctcgcgaagacgatgtcgctggcgatggacgggatcggcgacatggaggggatcggcgacaggaggcggtcggcgaacgggaagcactgctccgagtaggcgtccgccgcgccggcgccggagcgctccttgggcgtgctcatggaccggaacttggccttggccgacgccgtcgacgccatgtaccccgggaacgccgccgcgccgccgccgtcgtcgtccctcgccggcgtgcgcctcccggcgcgggtgaatgaccgcctcgccgagtacccgagctgcctgtcggcgtcgtcgtcgtcgccgccgacgcaggcgagcctgtcggccctggacctggaccggagcaccggcggcggcggcgggcgttcgtcgtcgttcatggcggcgccggcggcgtccctgcttggagattggtgcgcgacggggatgtccttatcgaacggcggctgcgacccgacccattcctccagccagctccaccgctggttcagcgtctccatctcctcccggctcatcggctgcctcctgaccccgaccttctcctgcgccaaaaattaacagctctcgatcagtcaccgacgagtgggcccagacagccggatcgcgggggccccgcgctgtcagtggctgggggacgtgacgtcatgggggaggtgaggtgacgtacgctctggtggagcgaggcgtactggagcgcgcggacgcgcttgagggcggcctcctccctgctccggctcatggcgctcatctcctccttcgacagtgtgctgctgtcccaccccttgctcagctgctgttcctgcacaacaacaacaaccaccaatcgcccttcagattcttcagtaaaatgaaatccattcactggctcgcccaccgaaatatgccaagctctctctctctctctctctctctctcttttccctcttctttttactgttactatgagcattggcacttgcaggcatggatcgatggacagacaagtataggaaaagaagagccagattacagcagaaacagcagctgatggtgcaaagcaaaatgttgtgagtagtactactactacagtgctacactggacagtgctacattgggcgcaagaacagaagcaacgaaagaatcggggcatatgcatgtgcatgtgtcctggcgatggccgcgcacgacaccgacgtgacgcggccgggtcgccgtctgccgtgccgccaccccgcaccacatgccgcgcatgtgcccagcaaatcattcgcacgttcctactacctagctatagcagctagctggtgagagtgttcttttactactagtgttacttacgtggacggcggcggcggcggcgtagtacagctcccggcctcgccggagcagcgcgtccatgccgtcgggcgccggcgaattagcggcgttgtggtcgccgccggcggcggcggcggatgaggccctggcgcgctgccgcgcctggatcttcatgagcgactcgaggccgcgcagcgtcgccgccgtctgccgccgcaccgcctgcccccggatcagcgcctgcagccgcaccaaccccttcaacgctcgcaacgccctcctcgcctgtaaaaaaacaaaaagaaaaaaaaaaggattaaagcaacagaaaatgtattgatacgaagacatttttggtgagcgacatcaaattcactgaaaattggacgaattatcaaatcgctacgaaatccattgaaaatgggggctataaattttgaaggtttgaagcaaaaaattttagttgtttgttttacttacgaggtatccacggtagacggattggatcataagggcggcgtgttcgtggccgtacggcgtcggcgtcgtcgtcgtcgccggcgccggagccaatgcggccgtcttcccggtgaggcggaccacctcggcggcggcgtgcgcggcggcgacggcggcctctgcggccgccgcggtggcgagcgcgaccgccatcgcgtgcttgctctgctcgtcctccgcctgcctgatctgctcctcctccaccgccggcgccggcgccggcagcgcgaacgagtgctgcgtcttgagcttgcccgcgaacatccacctcttgctcttcaccttctgatcaataaatcaatcaacaacaccacctcctcgtcagctcaactcatcaatcaatcaaacgaattctcgcaaaaatttcggcaaaatttgtggcaagaatgaatcggtgcaaaccttgtccggcttgggcttctgcttcggctcggagacgaagagcctcttgatgcgctcgagccatcccctcctcttcctctccatgtcgcagctaagcttcgtgcaagcttagctactaactagccttactacacctcgtcagtgtctgaaccgagcaaaatctgaagcaagaaacgcatcgtcattaccagaaatgcagatgaaataatagaaatgaaaaacaagaattgggagtagtagctggcatgtctcaatcgtaagatccaaggaaatgttgactaaagcttcggcaggacgagggcactttgctgccagcacaagctactgttcgtcagtggtgacggtcacagtgtccgagcaaaacgaagaaatcaagaagcggaaaaaataaaattcagagcaggactgctgctgcattggattcggttgatgatttgccgttgcatttgtcagtaatctgaagttttaacagtttttaatcacgcagtgggagccatttagaggctaaagccaagtgagtgattagctgggtgctttcttgtgtcacctgctaaaattccaaatagtagtacaaatcaagcgaaaaacaccaaccggaatgcctagttttgatgcgacaaaccgcagctataagctgtaatgttcagagtgtgacgggtttctatctgaatcatctcatggcaactgaacaaagaaccaaccataacactactagacagctacatgcgtcgcatctgaatttactctgaaatgactgcaccaacgaaagaaggaagaagactgaagaggaaagtgaaaacaatatcgaatgaatcaaccacgagacccaaaagatgaactgaaaatcaagtgatccaagatgagagtaccttgcagagtaatggtagggatgctagctctgagtgatccaagaactctctcactttcagcagctgcttgtggaggaggtggtgatgacacagacaggaggctcatgtaaggcagatcatgctctgcctgccatatgagggaggaagaaccaatttccagtggaaagccagcaggtcatgcctcaccatctcagagagaaccccacatgatgacatgaatcaagagcgctctctctctctctctcaatttatacggagtacaagatgtacatttgcaaagagaccttcagatttggcaaggtgtgaaacgccctgcttcctctgccatgtctgattacctcaagacccctctcaacttaagtactcctacttaacatgtgagcttgccgctaaactgagttgttgacagtgagaaaagataatactccctctgtcccataatatatgtgatgttgaaggaaatagtactagaaaatgtcacatccctctaaaatcttttagattatgagacaggggagtactatcaaagtacatgtgtgatgtgtgtattccttttacattgtatacacaaagaaaccaaaaattaggtgatattttacagaaaccaagggctaaaagatgcactttttttttcagcccgttgatgcagcctgcagcgtgtggtacattggtactagaaaacaacaaacggaacgggatggtggccacttgagaagtaaacaaaaaacgaaattaaaagggggatcaggcaaggcaggctggtccgcagcagccgcagcaacgcatgaatgaaagtcgtttttgtgggcgcactgcactgccgccacagctgagcgctgtctgaatgaagaattgaagatccgatcaaagacccccaaaagccgaaaaacaacacttgcttaaggacacccatcagcagtggacctcccaaccacatgtctctctgcttaagcttaacactagtgcctgtgactgagagagagagagagagagagatttggaggaagtgacatctctccagtccaaacatcttttaaaaagaaattacgagcgtgttagaaattaaacataaaatcttaaagttgaaaccacacactctttgtcattgcactaccaagtgcatcttgtgactgtgatcaaacacacaacagggaatgtcacataaaacattatcacatttgatcagtcttcagaaaaaaaagtttaaaaaataagaggaaattcctactttttaaaagggcccatcgaaattatatatttttataaattatagacaccgttgtgtttcacggggattcgatggtttgccactcttaaaggatgatatggtccacatgttattgacttaaaggatcatacatgacattgtcatgcggtggtgatggtagcaatgtaaagggtgggctgggtggcaaaccatcgaatatgccttttattcgtccgtgtatttaatcgtgacttcgatttacgatcagacggtcgcgatgttggatcatcgcaaaaaggtgttggctacgtgggtgattattactctttatccacaaaagaggggaggatggcctcctggacggtcaggaatctgtgatgaaccctaaaggggggcactttgctcaattgatggcaagaaatagtaccatttgacctgttttccacaggacaaaggttggaccttcagatccaatccaccattggttgcatcttgcattgcatggaaagaaaggcaaggcaataatgccagcaaccatgtgggcaggccatgctcctccactgatgagaggagaggagaagaagaggagaccattagaccattgccagcctttcatgcacacaaagcctagatatctgaacaattattaaagccatcttaacattcagaaaaggaaaaatgctactactactactactacctctcactctctgagatgccatgctagtgatgctgccacaatcaattcaattaaccttccataagctcaactgtagatcttggattatgcagagcaagaggaagtaaagtaaacagtggaattgcataatgtggacagtgttaggtgaatatatgttatgtcctgctttgatcttgcattgctgcagctctgtgtagtgtactgctagtaggccatttaggggtggtcatatgagcttaccctttttgcacttttgtcaaggttaagctgtaacaattgttgcactcatcactcagatggtaacctactgataaacaatacattactgccacttaatgtaatgccagatcattggtaagtataggagtaaatactaattactgttgggtggccagatgaatcatcagcttcttcagaaagcaaagacaggctttactcacttatccctttcactactgcagtagaattcaatcagatcagtaatacttcagtcttcagtcactgtgccctgcacatgtttatgacctgcatctgcatgatatggatcacatatctcatctcacacaaacatccccaggaacatgttgcagtgtttttttttctgcagagatgagttgtttgcatgtgtacaggagtcgaagggaccaagactttttgcaggctccctgccaaagattctgcatatgcatatgcattgccagccaaaatgtgaaattcagccagggcatggaatcaatcgaagtggatagaatagaaatcggtctggttttttaagttggattggctccaagatccatgggaaaacttgggttgacttgggagctaattaagctggaagaagtgtttttacaaatggttaagcttgtattgagatcttaaccagccacagtttttttactgtgcgtctgcacaccctgcaagcaagcatgagtaataatactactaccatgcttgggctagtgatcttagtactaaaatgttgaggtaattacacagcctttgagtcataggcctgtgtattactgattgttaataccatgcttatatattatcctccttattgtgcactttctgttacagtctgcttggacaaactcccaaggattgcatgtaccttcacaatgattgtctgaataatgtaattagggagctactactatacgtaggcagcttagctgcagctcactcgatgtgagagttaatctcttggttaagaccgacctagggttcaaattcctcggcagactgcatggatctttagaaacaaacttgattaatttacttgagcaaatatccggatcttgtcttctcattgtgcccttgatctatcacatcgtttggcatatgttagcttatcagcgacaaaaataatttatggatagaacttctataatgtgttcttaacggt

SEQ ID NO: 10435 - DNA, 41140 bp, Oryza sativa
  unsure (1)..(41140): unsure at all n locations
tcaccttttgagtttaaatcacaacctcaaacgtaatactagaaatcttaacccccaacttacaaaaccgatttaaattaggtcctccgacaatatagaaggttggtttctctaacgtgacaagttgactatggtcaacccgggtatcagcatgggacccacgtggactccacatataagtcggaaaaaaaagtggcctgggcactggaatcccgatgaacgtagtgggtatagtgacttgggcgttatcgagagcaggttgagaaacccactcaacgaggggattatccctgccgatgtcaccgacggtgaggggtgaggatggtgtggaggggcctgctatcccgcaactactgctccagtagtcgttgtgacgttggctgcggtgacaccaggtggggtgcctgctatccaactgtggtgaaaggcagggttttgcgaacaggtgtgtgtgcacgcatgcgcgcgtgcgtgtgtgttggggggaggaggggaagggacaaaggtggagatgaaaggcgggcgaatcttctagaggcgcatggagagaggcttgggttgctggtgctacggtggaagcaggcagtgaggggaatgctggtgcaacaacggtgaaggggtgccgacagtgagctgctggactatatcgtggaactggttcttgctaatgttttagacatgcgactgtggagactgtggagtggccttgcagatgttgtggctgatcatgttaacgccaagatgcatgttggtgttattgttggtgcgatccatggcggacggggataaaattagcggtcaggagcagcatgcctaggcgattgggcatggtggcgaagctaattgtagtcctggatgaaggggagggcatggacatggcggattggtggttgatgttatgcacggagatgagagaagaggaagctaagatgcacatgaaagggaaggagaatctgtcctcggcatccgcatccctgtgccctgcctagacctcaccgactacatcatccttgatctctacctcctatgcctcgctgtcgaaacttgggatggagagataggtgcactgtcgctaccgtgtgctaggggaagaggtgggagagaagggtttttcttgtatttttctgtgcgacttacgtgtggacccacatgggtcccacgttaactcaattggattgaccgtagtcaacttgccacataacaaaaccaaccttctatactaccggaggacctaatttaacccggttgtgctacttggggtcaaaatttctagtgttatggttgagggatgtgattcaaactcgacataaagatcatcaagtgaacttattccttgatcattccataggaatccgaccttttcctagacgaagaaaatggctcgcctaatatctaaaactcccagaactaaaatgcagagggagtacctaaacaaactgatgtccatcgatggttttcaatttaaaagctaataacgcactggtaagagcaggtacaataaacttccccttgccggttgaaagggtcaattaggcctagagggggagtgaataggctaatttaaaactttatgcggaagctaaaactgaaataaggtcggaaagtctgatccacagtcagactatctgaaaatatcagatagtctgatattggatcagactgagcacaacaagtagatctatcacacaaacaagagtaaagcacaaacagcgactagatctatagcggcacaattaagcaaagctaaaaggaggatgaagggagatcaccaatgatgaagttcacgaagttgttcccggagttcaaatccttgaggggattctactctccgttgaggagctcactaagagccgggtctttgctaaccctttccttaagaggttgcactaagcactcctccttccactaaggggtatctctttccttgcggaggcgagatccggccttcacaaacttctcctggccaatcacacgtagattagtggctcgggagtgacacctagccgtctaggagtcctcaacctccaagagtaacaaacaccacacaactcttggtcaaaccctagtgctcaagatcgagtgaaacacacactaggccctcaaacaccaaatccacaaccaccaagatccaccacacaaagaacaaggagggatttgagagagggagaaagagctcaaagatccaaagcaccttagcatcaagctcaacccaaagtgaatgagaatgaaatgagttgggtaaccctagaaaagggttaggtggggggtatttatagaccccccaaaaatgtggctgttggaggggaatctttcagcccatgtcggatagtccgatacaagatcggattgtccgatattttaaacctccaaggcaacaagaaacagagaacgaagttccatgaaattttggactttccgagacatcggactatctgatgttaaatcggagtatctgatattttagaagcaaaaacttcatcctcaaacagagactcaagttctatgaaatttcggagtctctgtatcatcggactatctgatccgacatcggatactccgatacttagaaaaactcactcgataggattttttcaaatcaagacagagagtgaagttctgtgaaaaatcggatagtctgatgttgctcaagtaaaactgcaataactttttactccgaactccgatttcgaagatcttggactctatggaaagctagtatcatgggctatcaaacccaacataaaacatggtccaaaacctttaagagatgttgaaaaacttgcaaagaaacccggtgtaagtgttgtgacaagtgaaacaactcgggattgaaattttgacttaggtttttcaactcacacaaagatgaagcattttgagcactaatattctaccaataatatgcatgtggtatccctcttaatagtacgacattcctacgacacaatgtaaggtaaaagatacaatataccatttgatcattccacattgcatcgtgatgtcgcattcatggggtatgcatctcattacaacatgtcgaggacataacaaccttcacatttgcttgaataaaagtgttagttctctctaatcgcattgtaatcaatcatcaaaatcattaggggcctagatgcactttcaccggtgatagggatcccacgtactccctccgtcccaaaaagagtcgaactctggaggggggagtttgtcccacaaaaaatcgagtcttgcgcagaaaactagaaacgtcgtctcggtggtggatgggcccacgctctctctctctctccagtctccaccacccgagccttatcccctcccacgcatctttctcgttctctccgtctctctcgcgcgagttcgcacaactcctccagaatccccatcgcatccaccacccagttcccctcctcactccacccatctctcccgctcctccccacaccttcttccccgctccatgccgctcctcctcactcccgtctctcccgcttctccgcgtccacctgcttgcggcggcggcggatagatccgttccgaggcggcggcgaccacgacggcgggtggaggcggctcggatgcttcggagatgtgatgcacaaggcggaggcgattgatggatgcagtgctgttggcggatttgatgcagatttaatttcttttttgttcttgattcttctgtgttttttttgttcttctatgttcttgttcttcctagttcatgcaggtgaattcaaagcatttcgtttggttgtagagatgttatcttttcctttggcaagtgtaaaaattgattggttcttgctcgtgaattcagagcacttattcttctctttttttttcttttcagattggagagatatctcttctttctttctgtagtataaaaatccaaattttctagcctttttgtatacggcagatgcctcctgtatgtactggagtactactaatcgatggataaaaaaacgacaaaaacaacaaacactgataagggtattttggtattttcacattcgtcctaaacttgcatcaggaatccaggagtagactctttaggacggagtgagtaggctgcattgctgagctagagggaaaaatgatggagagttagcgcaagcgggcgactatttatagtcgctgagctacacacgcatttcaagaaaacggggcccactagcagagcggagaggagctggtcggcagtcaacacaaccacagactgacgataaatatattgataaactactactcatcttaactactgtggtagtagctatctattgtacattttacctacaaagttaactcttcatgacatggtaaaagtttatagccagcaacgggctacactattaaacttgctctaatacagtttgaaattgtgttgttattgttgctattaatactctcttcgttttttaatatacgacgttattaattttttaacatatgactattcgtcttattaaaaaaaatttacaaatacataagatataaataatggtgaaagtacttagtgataaaacaactcacagcaaataaatgataattatgtagtttttttaataaggcaaatagttaaacgagtgccaaaaagtcaacgccatttgttagaagatgtatagtagtataaagtataacatggataaatttgtagatggccaaaaggcccgcccggcctggctcggccccggcacggcccagcagccatcggaccggcacggcctgatcggcacttcgtgccggcccatgggctgcacctcccgcctaggcacggctcaccagttgtcgggccgtgccggcccgaaggcacgggtggcggtcttttttaaaataagcctattttcctccctcctcgttggactgttacatatgtatagctaaaataagtctatttttcatccctcctctttgggctaacatgtatagataaaataagtctattttcctttcctcctctttgggttgacatatgtatagataaaataagtctattttatatccctattctttcgtccatggcatataatatatctatttttactcccctatttttttttggtgtatcaggcctggctgccgacccatcgtgtcgtgccaggccggtccaacgtgctggtggaggggcccaggcacggcccggtggtcaagccgagccggcatggaccagacctccgtcgggccgtgctatgcttgggccaggccaaaatgccgtgccatgggccgggctgtcgggcctcggtccttttagccatctatagataaattctctaaaaaagaagaccttacagaagctgcagtctccagaccacatagatatatttacgtgccggccacgatcacatgacaatattccgggcaaactgtggagacaggtaaggaaagcaagaaaaaaaaactcgcaagtacactacgacacggttcaagggaaatgtctcgagcactcactgaacagcagacaacgtcactcgagcaacaaggacgggtctctgctatgtacatcacgaccgcactcctaaaccatatatatcgattaatgctcctgagaaccactgcccatcacttggccacctcaaccccgatcctctctgcaacctgcgtagtttgaaataaccattagatagagagtacactgtacagaagatcattctactggaacctatcggagattcggagttgtggatgaaagggaacaccgaattacagaaaggatgctaaagaaagggacataaaactcccacatgattctagagcttcgatttaaacttcaaacgataaatctcccacatgattctagggctttgaattgaacctcaaatgcagcaggttcttctaaacaatgacaagttgacagctagtagtgtttaatgcgctactctcatgccagacatcactgtgccagtaatgcatgaaagatctgttgtaccttcattaacagtcgtcaaggcaacccctgacaacacaatgcacagttgcacacatagccagtaaacgaacctcacatagtcaaagactttgatgatgcaatttgattattaaataaatgtaagagcaactaacataaatctcctgaatgattgctacaaaccatgcagatggcatagtgttattaaattatttacaagttgtaaagaggatggcaactctgccaggaaacaatttgcaagagaagaaaatgactaatgttggggggtgtacagaagaaatacctccttgaaagagtgaacatcacttccccatagccaggcatcgcagcctgcatctctagctccccatatatcattctacgatcatcgccgacatgcacggcctcttcaggtttgacacctaaagactcacatgccttcagaaatattgttgggtttggcttttctgcagcaacctgttgtagattattaatgggaataagagaattatatataaaactgacttcaacagaatagataagagtatatgacacgagcatggtatgcatggaaaagcatataatgctgaagaaatgacaatataagtcgacatacctcagcagagaccgcaaccgcatcaaaccagtgatcacacttcagaacatgtaacagaggccgtagacgggtatcaaaattggagacaacagcagttttgacacctgcctttcttaaagctttaaatacgttttcagcatcaggatcacaaagcttccaagcctatcaagcaaaaaggattctcattaggcccacaaaatggaagctgaactattttcatacgttgaaggcacagttaatcttaccttctctgtcatatagtactgatatagttcctcaaagtactgcaaatctgaacagccagtagaagaagtgactatatgctgccaaaagggtctaccatcatccacataccttaaccaagttggaaatatacgaagtgagatcaatcttaaagctgtctaactaccgtcaacagaaaatacgcagtagtgcagtacatggaacataacaaacaaaggaaacatcagtcaaattggaattcaactgaaaagaaaacatcatgaacaacagcatgttcttgatctaagcacaagaatgttgaattccccactgtctatacaatttttgaaccaaatatacaacatcccattgtttgtttatccaaaaagggcatttcaggaggcaacagaatggtagttatccacaattttttttatttggtagaaattcagtgtacatcattgttaaggtgcataccatcatatcctttttgtcgttatctgcaaaatctagggatgctaataagaaacaagtaacagctgaactgaaagtagttactactaattaagtgatggggcgcttgctgtccaataagaatgattgtgaattacaatgaatatgtgctgacccttcaacatgttaaggaagaaggttacataggaaagagaactcgaactacatacacagagtcaatgaatacccagtttaaatcttttatcatgattcattatttgtagatagaaagacagtgagttcacacagatcccttaaccttataagctgacatgtgtaaaatgatgtttgtgcttgtgctctggcaaagcatgtaattgccaatttatgcaggtttacgtgaatgaagctgcttccagcttagaaaaattctaaacatttcacaatgacttcaaaagatgcttccagcgtaggttttcatgacattaaaagtcagcagaacaatagtcaataccagcaagttcaacttattgttactcaatcaaggtacagattgcatcaatataataatcaatttgtatgcaatatatataccgcattcaacagaataagatttaaacagattacagttcataaacagcagcaattacacaagtatcagatcagatgatgagatgaatgaattggcactttggcagtcaataatttcgcgtgtatataccacagattcgcacctgagccgtgatccgccccacggttgctcatacgcacgccggtatctcgcaaggatctcatcttcggagtacttcactccatacttctcaccaatgctcttatacacctaaacaaaaggggaaaaaaaccacggttcaaagctcaaacggtcagagatcaattcatcgcaggagcgacatcgcactgcaaactctgcaccccaacaattccggctgaactccattgatcagaccccgagacccacacatcgcagtgcgcactgaggagacgagggccaggagctaactgaccttagcggtgggctgcgcggggacgacgagggtgccgacggcgtcgacgaggagggcgcggtgggtgacgtcgccgtagacggacttgcggtagtcgtagtactcccgcgccgccgagagctcccacctcgccccggccccgccctccctctccgcctccgcctacgccgccgtccccagccaccgcagcccgccacccttgcgcgcccccgcggcggccgcggccgcggcagtcgcggaccgcagcgtcgccgtcgccgccgccgccatctcgatcacggtgggggatgacgccggctggctccgtcgatggtggtggaaggctctctctctctctctctctctctctctccggagagccgccggggaatgcggggctccggttgtcgtgcgcggtggtggcggagatggggggagagggtggcggccgtgtgctgcactgttgctgctttcgtttcctttcttcttggagatggacttctgttggtatcggaccttctagaacacattcctttaattttttaggaagcctgaaagggtaaaaagaaaaaaaaagtgagtttgtatgaagacagccaagataagtttaatttatcaaaataggaggactccctcaattccataaaacacagactaatatgatatctaaattagtaacattgcaatatggtatatcatatattagatcatttttatagaacggaagaagcatatgtttttataaaagctacgaattctaactgtctgaatatcaagctgtgaaataaaattttgttatcggtatttataaaagcatcaccaatagtctccttattctatccacaatcctatttttttaaggattttggtgaaaaaaatagctccaacagatcttatatttgatttttttttaagtcccttccatgcatcctttgctctcttcatttgagggagagcgacggggcgtttgccgtccccaatctctcattccgcgtgtttttttttctcagggggagtgctaggagagcacgctagagggaggaaaacaggaaaaactgttagagtccactttatttttttaggattttggtaaaaaaaggctccaaccggtctcatatctgatttttttttttgaaatcccttccccgcatccttcgctctcttcatttgagggagaaggacagcgcgtttgccatctccaatctgtcattccgcgtgttttttctgggggggggggggggcaggagagcgtgtgagagggaggaaaacgtgaaaatttattagtttagcagaagagtccacttctaatttagggataaaatttaggctttatcttggcgggatcagttttttggctatctattttcagattaggaaacccaaaaacaacttttttgggagattatacgtaatctcttggtgatgtgatgctaaacctctccgcttttggccttgcaaaattctaaggttaattgctcggtaaattggttaactttaaaatattaaattttactttttaaaatgaaaaataatcaaattccactggcagtcaacggtttttaatttttcttttgaaaaccaagaaataaatatcaataatgccttatttaaatgtggtttggttttgtgaaaatatgtgtgtggtcatattctaagaaaaataaacatgtgtgtgaataataaagagacattgcagcacaatttctagattactccattggaatttggaggatggcaggaaagaaggataatgatagttgcatgctgcatggaattgagttatggttaggattggtttggacatttgctttcctatggcccagtggcccactatgttataatgatagaccacgtcattggttccataggatagcttctagccaggatcatttcttctgataaattttcatatatagtcaccgtatgattgataagtttccatatattgttcatacctaactctattggacgtatgcctaatattgtttaattataagaaaaatatcatttgaaatggtctaagcaacgtttgcaacatattttgggacaaataagatgttaaaaataaagttatgttggaacggcagggatatatgttttttttagaaataaaaaattcaattatgccatgagtctagcaaccttgaagtttgaggcgtcttggtcaaaagtgagcaaaataactttgaagtcacgaatatattgctatagataagaagaaagtagttcatatgagtactatatttgtattagaaacccgtaaaccgaaaacatgtgcgatggtattgacgcttccgatatgattcttaaattaataaggtattgttggaccaaactactatcaaatttgtttagcattgttcgcttgcaaccatgtgtggccattaaaccaatctcgcattattccctttcaaaacaaagggagaacacaaaagcactcacatcaaaaatggttctgtgagacattacgttgttgctcatcatactagaatgtgtcatatctagttaaagtttcttatattttggaacgaatagagtgctatgtttagatcagtgccaaaatatattatatagttataggagacaaatatatgattaaatattgaaattttcggtagggcttaaattaatttgagtaaattaagtttatgattatattttagtatcaaagtttcactttggatcacctttcatcttatcttttcactttgaacaaagttactttgactttgttttattttggatcacctaaaacaacttttctcaagcacatcaattacaattactttaagcacatcgacacccataaaccggcatgtcttcacaacttacacataagtattcattgcaagattagaaagtagatgtggctagacaagtaatttggggtaatccaaagtacaacaaaggtaatctatctaatctaaaataaaaatattactagttagagagtagtccaaagtgaattttgataataaagagaaacacctaagcgtcttccggttaactccgaaaggttgtgagctagccaacatgggttcggagcctcaccccttctatttatttgatattaggttcttccctaatattcaccttttttatttttgataataaaagatggatttaaagtgcaattacatttaattttctgtatcttttggtctgctaccactctaccagtaccatattaggttattccttaatattcgtgttttttaattttgataataataaatgaaataaagtgcaattaaatttaattttccgtccccttctccctcctctctgcccgctcgagctcgccgccgcctccccttcttcggtcacattgtcgacgaggcgtggcccgcccagttcatggtggtgaagagatctccgacgtcgagctccatgtggcagagggcgacgggatcggcggcgcttgagctctctggcgtggatccgacatcatgcttgctggatctagcagagctcgagcgccaaacaggtccacagatctggcatcatgctcgtcggatctagccgagctgccgctgtcgtcggcatcttcccggagatggcgtcgatatgttcagagctgttgtcatcaatgcgaatcgagttggcttcctccttggctaccgccgccgggctccctctcctccctccctggcagcgtgggccacagcgaggtgtgggctggctatggcgacgacaacctctagctcgttgtctcgtcggtagcctccagttcctcctttttctcctctacaacttcccggaccatacaaatcgtcttctctctctcctagaaccaccattcaaccactgttttctctgcatgaacctctgtcaccctgtgagaccactccaaacctttagcgtggtatctgaatctaagtgtaacttaaaaccacgggtgtgagacaccgcattgtaggtgtgtttggttgggtggatgaactcggatgggagatggccacccgatttttttgtggtgtttggttggaggtcagggtggatggggcagcccaaaatagggaatattccctcaatatactggatgagtgcatccggccgatttggctggatgaagccatccagttttggtctgggtgatgtgtcatgttctgattggctgtggttggtttgattttctgttaagcaagctccaaatgactttttctcctaaaccgttttatctaatttatgatttgattacaccattatatttgttacaattaaatctttaaaacaagatctcggatgattatatcttgataaaaaaattatatgataaatgggtctcactaacttttggttgttttcatccatgctatatctctccaaccaaacaagaaattagatcgccatatccatacaaaccaaataaaaaaaataaatcgtcatattcaataaaatatggatggctatatgctatccatacgtgaccgtaaacatagaatggtcttatgggacggagggaccagggagtactcctcgggggtcaggtcatcggcggggtgcgtggattgcgccacttgtagaccgggccccacatgccagacgcatcgatgcttcgctttgtttacgcggcgcgcctctctttttccttagccaccaaggctcagaaaccgcctacaaaacggcgcccggcgtcccacggatcaagcgaccccctaaaaaaccaaccgaaaaagaaaaaaaaaagaagcagagaaaaaagctctcgcggcatggattcgcacgtaggcaagttattcgattcggtgggctcgatcttccgcggcagcgacaccctcccctggtgcgaccgcgacatcatcgctgtaagcttccccaccccatcctcctccccctcctcctcatgaacccttggctccgccctccgggttgatccgtgtttggctctagtatggccatttcttttcccccgcttcgtgagtggatgtttcgttgtggctgcgaattttctgtggaatgtacgcgctctcgcgaattggaggttttaggtgttcggtgaccgctaaatccctagctattgctgtgtttgtgctaccatctgctccgagtttgcgtttgttttagctattgtcgctcggtgatcaaacattttgatatcatgtgctattgtcgacatctgcggttgaatcacaaaattagcccccattttaccctcgagctaccgtggtcgtaggcctaaacgaactatatgttcagttgcaagctgctatatgcctatattcacttgcctcgcgtatcatgttctctgtcctaatctatgtcatgccatgtgcactttttgtcttgttgaccagggttgtgagaacgaggttgcggaggctgcgaatgaagaacagaagaatgagagccttatgaggctttcgtgggcgcttgttcactccagacagcctgaggatgtgaaccgcggcattggaatgcttcaaggtaatgaagccacatacatcctttaattttttttagcatttggaatttgttaatcaattcaaaagctgaatgaatagagtagtagtttactgtttctaacatatgaatgtttaccccatcactttctgaaaatttatacgaccatgataatatgtgtctccccatgtgaactatttatatattatttttggtcatgaaaacatttatcagttctccagaatgcaacttgcttgaccacgaattatctataatgtgtctgtagggccgatattattatggtataatgaaagtactttggggacaaatctacacataatttttgtgtatctaatctaaatatttaaaagacatttctgctcaaagtctcgatgtatgtccaaatgaagatgttttcatgaccaaagggagtatataagtcagatattgttaacctggaatacaaatctatctggaaatcatgattttaattctgacgctgtttcagacttatatatttaagtttcaacagatgagccacacattgtctaacaatttatctagggggacccctttttaatcgaatcaaatagcttttaacatatgttataagtgtcctcccacatgattacccattctgacgctcctattaaacttcctgtatgcactcttctgaacaaactttattaatagtgccgttaatatggcactctaatgctgaatcaaaatgtcacttcattacattgtgtcacctataaagtgatattccaatccattgtccacattttcttgtatgtcaaccatttttcaattttctttaacacttttttgatcggttggcaatcagatattgtatctgaccttcctgctttcacttgtggttgggggggactcatgtttttctcttggcacctggcagcttctttggacaggtctaccagtccactgcagacaagggagaagctctacttactggctgttggacactacagaactggtgattatacaaggagtcggcagcttttggaaagatgcttagaggtttgattactgaatatatttctaatcattttatttgctgtttccatgagcccatggtcgctggtaccattattgttgtatggatatgagatctatagatactgttgtaaatggtcatggtggtaacctcagcttgcaagacaattaactgattttaattgattatcataatattgcatttttatcaacgaagcatctgttagtttaaaaatgacaaagtagaacaagtgtatgacctgccatcatgttcactcaagacttgaagctgctataagagaaacaggctgctttgtagaattacgctgtttagattggattggtgccaatttttgcttaacataatgtgtttgtctctttaatcagatagacatctgagatatcttatttttgtacgtttagattctaacttttttgagattatcctgaatttgatgttaatgaatgcacatttatcaccttttgcagattcaacctgactggaggcaagctctcactttacaaaggcttgttgaggacaaaaccagaagaggtagggtatattatttaacatccaagccttcttcagactggaaaatgaatttgcactcaattttcatttcatactgttagtataattgtcaaatatattggttaggggaactgtagttatcagcagggcacgcatgaaagttgatattaacaaagggtatcttagttatgtctgcacttcacattataaagaaagaagtatcggagcagctcagcaccctcttgtgtcctttggagatcggaacaaagaaattctagaagatctgtgtaggaaataatctaattccaatgaattttagtaaaatatttccgtactaatctaattcgtaggagtacaatggtttttgcaactcggatcgattgaaggatgggcattactgactgctttttaaatgcagacggtatgattggcatggctattgtcactggtgccttcggacttgtgggacttgttgctggtggaatcatcgctgccgcttcttcttcatcctcatcatctaggaagaaatgaggaacccatatcaagtgaataagatgtcaagatgggcaagaaatcgatgtaaatatgcgcatcttgctgtcatacttgttgcaaccgtatactcacgtctccatttttcagtccttttaccatgagttcaaacaggagacatcacatgcctgcatgttaaacatcatggaagatgaggaggctcctgttatgagttgcaatcaggatttacgtaaccttgtggttatcatggttatcatgtgcagtaattttctcagtttttgaaaccacggtaaacctcgcggtggccgcacggttaccacgataaccatcttaccgtggggtggttgtaaccccgctcaaaatggtttggtaaacctggttgcaatccttcagtacttgaactgatggctactaccttaaattgtggagtaaaattttaattaactagataatgtctcgtgctttgttacaggatatatgttaaatattatagaaatgataaaatgatttgaattgaaatattgtgaaaatgatttgagaacgatgatttagcatgtgtatattgagttttagaatgaaataaattgtagatgtaattactatatgcatacttacatgttgagttttaggtgattacggattatgtatgttgaccttagtgggttgatgtatgttgagttttaggagtttagtgggttataatggtaggtatagatgagaggcatcttttagtttcctcccgaacggtagaaatttaaccgtaagatgacatatagatggtgaactgaatgaacattggtgacaaccgtcagttcaagtgagagaggggatcgggagagatggtttcattttgttcttttttctttgtccacaaaagttatcttgtcattttagaaagagaaccttggtaaacaagaaaaatatgaaattaatgatcctagttaacatggaaaaaataactgcaaaaagactaaaacagattaaagattacgagtcctcattgtttcatgtgaatacaagagttggagttgagagtggagacatgtttttcacggttggttgtattttgattttttttatctatttatgatgtataaatacattaatcatgttgggtttttgaagaattacgcttttgtcgtggcaaattttttagcatgtaatcattgatgaccgatagtgtcagaagtatctagtttggatttaaattgacagcaacatgcatataattagtttttttttctaattcaaacatttgttaaaaacaaccgttaacctccgccggtcatatattagtcacaagtatttataaccttggtttggagtcgatctaaataaaatagttaaaattattttaataatgtactatttcaacaccatatctatatctatacctaattaaaaaatacataagacttctctgaggattttcgttcgtcttagtccgtcgtccgcatcatgcgcacctcctctccacttcatctgccgttcgcccgtgttaacgcgcattcgctctgaagatcccacaaccaatcccaatcattataaatctaaaaaaactaaatcctagtccaattggtatcatcataaatccaatcagaaatcgcaaaataaatcacacaagaaataggaggagaggcggaaatcacacaggagatgagagatgagaggagagggagtggcaagcgggaggctgccgctgctccttgccgcttcgccaccgtggagatcccgagctcaggggccagatcccaatccgccgtgccgggggatgattgagagggagagggaggaggaaggtggcgacgatgaggccgagaaggtggtgtggcttatgaaacttctgtatattttttttcacattggtttatattagtttcaacatcacgcaatactattaaggaggactgatgtacttttatctcaacaaattaaaactatagtgggagccgggaggtctccaaagactcagagaggtagggaaaaaaagtaagagagcatctctgagactcttaccagttttattgtttggagggcatgtttgattactcgtatttccctagcctggctaatctcctttatataagtgagtgtggtatggataagagcatttttaagagcctcttaaatagactctccgagccaaattttggcaattcaaaaaaataaatttcactccaatagccaaatgacttgccaaactccgtccctcatgaggagctgtacgcggtgaggcgagccgaggtggaggagatacggcggccggaggtggagaagaaggagagcgaagaggttgacaggtggggtccacgtcactttccacgcgggcatgccatgatggctcaccacgtaggcaaaataggcaaatagttaagaaatcacctctctccaatgataaattattaagagagaatttattctataccactgagtttgttcgagttcaacgatttaccattgatattgtctctttctacgatatacaggcgacattatcaatgttctacaatacgccattgggctggatattcttttcaagaatacccaaaatacccttatggacatataaagttaacaattgatttatcccattagaagttttcaaaaaaataaaaactttgatgtggcctccttacacaacatgaaagttcgtataaaagtttcaagttttttaatttatatttttaaaaaaaagatgtaacttatctgttatatgctatacaaaacacttttttatttatgttttgaatataaatcatctttcatacactacataagatatttttgtgctattatctctcgtataagcaaattttctctcgtatactacataatttttttttctaacaataaatataccagaaaaaaaacttgaaacatataaacaaactttcacgttgtgtaacgaggccacataaaaatgttcatattttttttggaacttctaattagataaatcaattattaaccttgtatgtccataagggtattttaggtatttttttgaaaagaatgcccaacctaatggcgtattgtagaacaattgataaagtcgccggtatattatagaaagagaatgtcgatggcaaattgttgaactcgaacaaattcagtggcatagaatatattctctcaattattaaatacaaacctcatacgggtatttggataagtgaaaaatctaaaagtggcaaatagttaaattccccgcatctttccgctgcctagcagttggaggagagaggagaaggcggtggcggtaacagagaagggaggcggtgccggcaactgagaaggaaggcggcgccggcaatggcaaggaaggctgatggaaggagagggcggcgtgatgctgcggttggggtctgttagtcatcggtggatctggtgcgttgaagctttatgaagggagtcagcatccggcaaggaagacggcgccgacgacagtgaagagaggaagatgatggcggcgggaaggacaacaccctcaagcttccagatctgcattgtcctctcctacgtcctaaatcgggtgccaagcaaatgagggaaggcggtgacgggacgcgttgacccccctggctagcctcgccgaatccgctcgttcccgcgttagcatgactccgagcaagcgatgccttttggtagagcgagtgataggggcagcggcagcagggccttccttcaccgtgctagggatgagtggtgagctaccggatttcgattcaacttagagtatctcttttacagtttcttattcgaatttcctttttcagagttttggttgtttcttccacggctcaagattgtttgtgttctctagattgaattttcactgaaaaactttgaacgctaggagaccaggagaggattcacactcttccgtagtggatcagagatgagaggaggagcatgtcgtcccatctactccatgccatcccctctcacaatagatggagcatgtcttacatggcttgggaggacgagctccagaaatatattatatatgttcttctttcttatctctctttaatcgattcggttttaacatggcaattgatctgttggcactagtatcgatcaatttgtatcttttttttttgtctaatatctatcaatttttatccctttttatctgatatctgagttagtttcactttctgtttcttgtctcgcttgaggggacgtcacagactcctcttccattgctcactgtctcgctaggttgcctgccgaacaaggctctcttttgtcaactttctctgtcttttattcccgttacaactcacagcctctttgttagcctctttcttaaaagacaagaaaaggatgggagtacatatgtataggagatccgtttggattgcgatctgtgaccgagttgtacttgtacgtggccacggaaactggtaccggtaccgagcttcaacctatataatctgaacgtgcatacctcaatccgtttcaaaattgaatctaaccatatgatatgacataacgtagcctagattgatttatttcagacggagaaagtatatactcctatattacacaattgactacaggaagatcaatctagttgtacttgtacagtcttcggttctatcctctatgggccttcctagctccggcggcccggcccacaacgcgagccttggacctgctcgcacatggacctcctccctcttcgcccgccgcgccggcgacccctccgccgccatcgccggcttccagcgccgcctctacggaggccaccggcgccccgatgtccctctcgccggcggcagtctcgccgatagctacgccgagtgagaaaccccctccgaaaattatatgttagcgaatttatttgattgatcgatctatctgtttatatgtggcattgatgtgatgatcaggccttgatgagattagggcctttatatattaattaatctgtttctgtggcatcgatgccttttcttttttctttttaattattatgttatttgcaggcgtagggttgagattcccaaaagtttcgtcatactagaagatattctgcaacacaccctgtctaatatgcacagtatccaggaaagcatactgttctggcagtccaatgctctggtatttttacgccgcaaaccctttcttttcctagactcccagtatttagatatgattcttgcatttatctatctgccatttacctatacttggaattgtttctcttttcttttcagagaacaaattcgcagaaagcgtattttatgatctttcaaagaggtccaagggcctttgttgcaacaacatgtcaaacgctggctaaacttcagaacaaagggagtccagtccagggccttttggactctgcatcttctatgttctcaacaaaacttgccatcctaacaaggatgcaacactgcttggcttcttttcttgctgaggtttgtttactaaaataccaatattaaaaagcttttttcaaagtcctggtctcttcccaaaaactgaggcatggtcagcttcaaagccagctgttggtatggcatatatgaacttaaattctacctttgcttttttccataggtttacaatgaaactgacaaacgcagaagtgtattaattagaagatcagaacaatcgctgcatagtctcttcgttgctctgaataacatcttctccaatttggaggtagaacttagaaatgctggtgaggtatgaaatgtttttttctttttaacttaattcgagattctaggtgtaaatctttctttgttgttttctaatatggtctcggtttttcttttccagcagggggctgtattagcgaatcatgataataactcattcgaactcttccaaagattgccagaagctgatgttcagagttcagctgctataagtttgatctatgaaaaccttcagaagttagatatttttctttcctctcgggtttgcaactccccccctactacactttcacacgtgatttttttttcacttgtcagcctcgcagttcccagattactgttacctgtattttaattgggacattaaggctgtgttcatttggattaatatgattatttcaagcaactttcctatagttttttttgttgcaaaaagtatattatttaacagtttgagaagcgtgtgtacggaaaataagaaagccaaagttggtaagggggagaaatgaacgcaccctaaggattcaatgttgtacccaagtttttttggctactagtttgtgcttttagtcgaaactcaaaaaagtatttttaggcatatgcaagtaaaccaaaaactgttccatacatgaatggtttcaaatgagaaatcagtgctactgctaattattctaaagtaccaaaaacatttttgggtgattacggaaaatctcccacttgaggcatcaaaatcaactaattaatcatgtggataattgacaaagtgttaaatcttgtacatcaatatcagatttagtagtctagcaatcctttttacataattcacctatttattttattttttatgttagaaaactatatgtgggtcttgtactcttgttcatctcacaaaagtagatcttccggtgcagttcttagaagatatctatatgttgcttataatttcattatgccaagaaatgtgttgcttatttatctgaattctgaagcaagtaattttatgcaatgatagctttcaagccataaaaagccgagaaaaatgaccaaatattggttaccctacacatttggagcattgggcctctctgcatttaccctatggcttttacgccacagtagcttgatgggaagttctgacattgacaactggcttcatggtgctaaaaagttgctggtttggtgttgggatgagaatgttcagaaaccagtaagatactctatctatattctattttttttatttattttgtgcacaatggtagtgcaaattactccctttgtttttaaatattcaaactttcaaaggtttaactggatcttgtccaaaaatcaagtgtttgtgaccggagagagtggttggttggattcgcagtcagttactcccttcgtttttttgataaatgacgatcaaacgtttgtccaaaaatcaatagcgccgtgtattaaaaaacggagggagtaactgattgtgaatccaactactctctccggtaaccaatacttgatgttttttggacaagatctggtcaaaccttgaaaccttttaaaatagtaattagttttaaaacataagattgatttgtgtagatttgtcttcaaaagtattttcacaatcacagttctaaatttctaaaaataaattgtgtctaagtcacacctcgaagaccatgaaagaaaaatgtcaatgtcatgcactttttactgaaagaaaaaaaaagatcattctctagttatctcaaacggttcatttaattttcatgtgtaaccactaaattttggaagtgttgctacaacaagctcgtccaagtttccatatatttatccactatcaagatgaacataatgatctgtctagttgttcgaatttggaaattagtactttctgttgtgtcactgaccgcacgcatgacacgttttttctattatggatctttaggtcagttctataaggtatctcaccaatacactccatcaaagcaaaggtgtaacaggaaaacaatatatccaattccctgaagatacattaagcaaatgcaggaacatatcgtcttctctctgcgaaaggtaatacctggtttacatttgagtttctgattgaaaataaaataataaaatgttcccttaaggggttatgagaaatccctatgcaggggcggatccaggatcaaaaaaattgggggggactcaattacacagtttcttcaacctccagccatctaaggacctttagattaccattcatggtgaaaaaattaaaggaggtgctcggggggtatccatgggtcttgtgggtgtagggagtcccccctacacccacgttggatccgcccctgtccctatgtgtaatggcatattaatacataagacttgaaaaggttttctggtggtcaatagagtccctggtagtcactttgtagtcaatagagtcccatttctagaattggttatctttatagaagttaaatttcaaaatcgattcaactcaatatttaaagtagaaaatttccaaatggacttgatgtcaatatttgccgaaaatcaattcaaaatcaatctttctttatcgtgcatagcaatttgcagtttcatcttgtagaattcttatttgacattacagttttgagttatttgagaacctgtttgaaccattgagtgtcatggttgctgaatccactttctaataatgtacacaaggcagttaggaatagacctttatagcgtatctcgtatcgtacgtccatgaagctatatgtcaaattttgatccaaataatgtcactatctaatcactaattaggatggcattcaattgcaataccatctgccggagaataattatgatatgtacacgttatttagctattccgaattactctattttgggtgatcctcgaacaattgttctctctatcgtgctcaattgaaaatgtgagtatgtttgatcattcagctatattctatgcatattaagtgcaggtatgagatggaaccaggatctcctgaagaattagcatgtctcatgattaatcaggttattttccttccttgtgtacatatatttgcatttaataaattcaggtcgcttttttctcaccaactttgaaatttcagactaagaagtttttacgggattttaaagagtaagttaaactattcatgtctgacaaatatatattggtaaaaacacacagaaaactcttatctagtataagtattcaccagctgagtttgttggattgttcttgcacagggtaatgccggaattagaacatgttcttagggtacagcaggttactcttgcatttggtcgatggcttcttctgccggtacttctaaagccagcaagggttgtccatgtacgtttattccaatgtttaccttcttctcaatatcacttgcctaagtagtgtattatctccgtcccaaaataaactaacctagacgacgatgtaacatatcatagtctagctatctatatttattgtattaggatgtattatattatctttgagatttgtttattttgagacaggcctcagtatgttctactctattatctgtgtgcctggcatctgttgtgaaaggagtacaagtgttaccaggcttaacatataactgttgacctctggttatctatacaacagggtcaggttacacagagaagagatagaattgcacatcttaagcgatgtcagcttctctctggagtacaggaaatgcttgcagagtttcagtactgtatggacaagggaatggtaatttatctatatctaaaattagtctattaagatccagaatttatattataactacgattattccctgaggatctactttatttcctttacagaaggaagaggcacaatgttcgcttggactattattgtacagcatttatagattttacagaggtgttgagtcgagttcaaaagaaacaggcgagtggatatagtaagtcgcaagtgatcttgactaaatatttaaaatattcctttctatccttgattgcctaggaacccttactatcctggattcaaatgttttttattgcagtatgaaggaacacattttctgtctggcagaccctcaattgggcgtggcaatcaagcgggacattctttcgagtctacggaattataaatgcttatcaccaccatcgagtttgtatggattttagtcgagcatatatttatggtaactattaggaattaataagatcgttattccccttttaatttttggcttctcatatgaaattacattgacgactaacgtgtctaaaccggtgaaaaagaacagcccctaagggtcacttcattacaaaaaatttctatagaagattttttaaaaaagtcaaataaatcaattgtcgataagtctgtcttctatctattcttcttcgaactttctgtcaaatcaaacccccgtcaatcctccaggacccaaacaactcacttttcgcccatgaaccatttgtgtcaatggattggtttgatcaaaaacttgagataagggatatgtaccaaagaaggtctcgtaagtagttattaataaaatcgaggttgaagttggagttaccaaagtttgtggagtcggttttgattgacgtatcaatactctataatgggtgtcccaatattggtgttgttcgggctatgcagcggaaaaagagattatgtattctcgctggaatcaatcacacattctgcccctaaagcgccagattcagacagaacaagagggaaagacccggccgactcgcccagggctcgaggacgagccatacgagagtgagtcgaattctgtttacgttctcggtttggtttgggcccctctcgatcttttgcgtataaggagttacgtcaactccaaaaggattataaggtttaaccggtaaagcttatgagagaagttcgaagctgggacaagattttatcgtctcgttcgagaacttctttatgcaagaaatgggctacccgtgtcgaccagtaccctttttactcagtgtagtacccactcggagaacgtgagagtatgttcccctgccctcttctagactttatacacttgtaaaaatatattcgacagtggtggatcatagctcaaagaacctattccagtgaacttgactaccattggaaatgtcggtgccgtatttctttttcttgtttggatagcttttgagaattctcttaccgaggaaggcacaaaccttttgaagtagtggaattgccaaccctatcttacttttgttttgggaatgctgattcattttccccttttctatactactcattccattctctttgtcttcaatgagaaggagaacttcgtatttggtaccaccacactagatctagtctactcatatttgttcgacgaggtcgtcccgatcagtcccagcgcacgcaccctgtagttgtcggcctttagaactttttgaaagagatggatgtctgggatcgatttcaactcagagattgcctactggccacgaggcttatgaggcctgcggaggaggtggagggaaacgtatgagatgagggatttggacttgctacacttaccagatgtgaggtagttaaatgctttccttccattgcagatatccatattgctatagtgtctataaattatcatatagaaagaagctaaggggattctacaagatgttctgaagtgtcgatatacgacgaacaggaatctattctacaagatgtttgaatgtgtgagtatccttgtgtggatcagcccgaaggctgtcgattttaaaaggtgaagacaaggaagagccattcttcatacataggagcgagtggtcgaaatggaaagcggacaaccggaattcagtacaactatagggttcggttcctctcatgtttacgctaggggatgattctactcgttcatcgacttcccccgcatggagcagcatagatctaaatttaggaggattatccagatcgtagtactctaaagcacaattcttcttggaggagggttggtttgcccaggtgactgatcctgccataatatactcccgccaattctattgcaccggcaaccgaagttgaacatacatacgacgatcttcatgtgtgaagggacgggaggaaagaaagggcggtagatgataatgcgaaagggcgccgcgtctgggcgggcgggctaaatggataagcgaagaacatgttagagacttgaacttcatcggacaagaaggcgctggttgtggtttgattcccagagctagatgggatatgccactggatatttttccagaaggaaattgtcctgcgaaagcgaagcgacgttggctccatactgggaataaaaaagtatggaactttctttgattgcaaaatcatgaaaatggctcagttcgaggggagtcgtaacaggtataccacgcacaccccctttccaagggtagtagtagataggttgagctaactctttcgctataatcttctatctcgcattgctacgtgctcgaaacaaccaattcgctcgtatagctaatgcaacctatagagtttggagagtgctgctattctttccaaatggtctctgagtgcggtctgtcaattcctgttgtagacatctgaggagaggtggaagaagagtagacttactacttttgcaaatcaaagaaagaatttaaacagacatcgtactcgagcgggacactgcagtctacttcttggttttccaaaggtccggaggagcggaagagtttctagtcgagaagggtcgggcattagcaaatccttcaatcccagattcgagggctaaaccactacttgaatgaacaaagcaagcaacagttttgtttttcaaccgagaagaaaggcgggcaagcgggcgccacactcccctataaccttcttgcactccactccggtatatctttactctacactcctctacaagatagagatctacgtttagctgtggaagggatcacggagatatgtgctctaacgactcaacccttttttgaccagggaacgggagaattcccactaccgctggcaggccagccgggccgtgagcgcggtgggaacgggcttcccaaaaaaagagccccggcccgggtcagcatagaatggggggagggatccttcacaaaaggcgaaatggatatgaaaaaaagattgattgaactttccgacggactcatgggatgagtaaaagattgaatgggattcgtttgggcaacggaatcaagtgctggtccccttttctctcttattgaattaactaattcatttacttttgacttttgttggatttttggatatttttttggtgttgatttggcattattcaacaagaataaaagaaaaatttcgataaattcctttttttaattatgagaaccaatcctactacttctcatcccatcagacgaagacgaacttgcatttgttgaataaagaaaagaagagttcgatgtaggaggagcgagcctcccccagagctttcggcagccatactttcttcacaaaactttatgataaagatggactctctttcaccgcaacttgcccgccctaacagatggaattgattcacgatcagcctccttcggacccggtagctacagcccataagcaaaacaagatttggtctcgtacgcttgctaagcaagtttcctctctttttaatttttaactgatagccctctcgttacttgaaaggaaatggaatgcatcttcggtgcctaagcttgagtgagcgcatcgcaactgtgccgatttctttcttttgttgccgtacttggtaggctccttgtccccttgatttttcaaggaactcatttttttactggctccctttcctccctatgctcccccggcgcaggcccaccacgcttcgcgcctgcggcgttttcgccagacggcacggcgtcggctttcataaagcaaccgaattaaatcctcctttattttgaattctgtttcaaaataagaaagaatcatttcttgttccataactctgtgtacactccgtgttgataatttgagacctaatggacacatcatacataagaacccgttgtcgagattccatcaatatcttgcttggcagcttcataaacttcgtcgtcctcagatcagaaggagttttgtcaaatgaaatgctggacaatctacatgagtgaaaggatgtagcattagactctttcgagcagaaggagaagacggacctttatgtatgactctggtaccggcatgataccaaattatgggctttgtgtaaatggcttcatgctggtatggggtattaccctattttactcaaaatactgtgacttgtagctcagtccaaaagcctgctgcttatggtactgctagtctgttatgtacaagtatcttaccgacgaaaaatgagagataacatgctttagtctggttcctataggccgtggtcaatgaaaacttataatcggggacagataaactggaaaaacagcaatagctatcgatactatattaaaccaaaagcaaatgaactcaaggggcacaaatgagagtgagacattgtattgtgtctatgttgcgattggacaaaaatgctcgactgtggcacaattagttcaataatgcgatgggcgaatgacgggaattgaacccgcgcatggtggattcacaatccactgccttgatccacttggctacatccgccccttatccagctaaaggattttctcttttttccattcatcattattctatttattctgacctccatacttcgatcgagatattggacatcgaatgccactctttaaaatggaaaaataactcagttcattcttgaatttcggcttgtagctttgctacgcaacctcgcattcgaaattagtacttacttggaaagcagggacagtagtatatggtagtcagctttgaattgttctctgtgtagaatgcctattggtttttcacgaaacagtactatatgtggtcagtacataggtatcaagaaagagggctagctctgtttgaatagttaccagccaagaaaagactactcaaaaatctgctacttcgtttccaagcaagcaaagcgccgctacttatttctttctcactcactacttttttctattttcttttgtctatcgaaacagcctaggattcaatttgatttatcctagtggtgacagcttatgcttcatttccttcgaattcttctttcgatatgcctttgttgaaggtcgttcgagcttttcctgggagtatggcatgggttacatacttcagcgccgtagcgcctggtatgagcctcgtggagaagcaatggctagtccacttgatctcaaacctcagatagcgacacaagaagacatcaaaaccatagtagcattgcgaatgataagaagaaaaaaggatgagtttgggattgcagccatgcttcgctttgatgaacgaaagaaagagtctggactcactagaactctctctctggttgcagttctctactagctttcccaaacttcactagcaaaagacttgaagaaggaagcattatgaaggggagtactcttcttctactgaagtcagatattgcactagaaatggaatagaggaggaagaggtgactgctaggtaggcagtagtagcgcatgctggaaagctagtcaagggagctttgattggttaggtcaactattcagaaacaatatcatcgattgagataaattgacctataagaatgtatgtattttttttcataaaaagatcttttaccacctaagaaggtgtgggtacttttttgccggcatacatactcccaactactttcctgaatctcattttttggtagtacgaagggggaattggcccaaaaattggataggggtaaagacgcagctggggggcggcggcttattcaagtgccgcaagctctgatagtgagacaacaaaggaaagaatcttcaggctattcgcttccctctttcagtgtagccggtccattcgagggctattggacccttctccacgaatttgttcgcgaacacgtttgtacctacgtcgggatacatgatcgctagaagagggttatacaaaagagagggacctgagtaattcctttacaggtcatcgctgagaaagcatcatgcatccacataaaccatacagtgaggccttttctttatgaaagttggctagtgaccctatgagtctgttctttcaagcatcaagttttttcttctaatttctactatttcttccaggatcaaaaatattttatttggttgagctttgtcaacagattggcagtgaaatagaaacttttctatggtgaaatattagagaataactatataaaataaaaaatatctctttgagatttcctcgctggcgctcgctcaatccgttcaccagggttcctttcctttcctttacggtcgagctacttctcgttcatcatcaagtggtttcaaaaagaattggaaaagggatgacgcaagagcagcggaaggtgacttagcaacatcagtcatttcttatagaaaggaaggaaatgatctctcttctgtctagacgaaagatctcatttttgctaccgctccccctcttatgagtctctgtcagccgttgtttagtagctttcaacgcgagttcagtcattctcttatatactgaaaagtacgaactgacttaaagcacgaacatgaaggagaattcgaaacatcttgaatcttctcagagagcttgagtgtgaaatgagtgggccggccaaagaagaccactatggaagtgaaaggggagggcaagagcagttcgaaggtcaatgaaatgggttcagttcccttgtcaaataggggccccgacccaagtgatagctctcttggcgaagaatgaatagtagggacagcaggtaaagcagttgggacggcctgtgaagctttcgcccttgcttgtcttgtcccaaagctaactctttcttttaggcatgcaggaaaagaaaggttggaaaagggggaactaagaaaagtgaaaggccaggcttgtagctaagaaatatacttaataacacgacccccttactaagtttgcctcacagttttgttatgataaatcactcgtgggtttgagatatttcataagtagtggccaactaccacacctaattggtgttatgattggttaagatgaatgagaatacaaccaaataaaggttgttaatccaccttcaatagggaaagaatgacaggatataataatattgcggagtccctaaatcgcagggaagcactaagaaacaacatgccatttgaagcactcggatgcccaaccacagctatcacaatcactcgaatccggtgaagaaaagtaccttcatagcgtaggagggagagattgttttcatttcgattttatggcctggcagaaatgcgtgtccctatctagtgacatcgttgagagggaggcagtgttcagcttctcatggggatagaaaaggagattgcgtactccttctaagacatgaactcggaaaagagattgaatggcaagtgaactaattcctgaaagtcgtcgtgattggatcaatcagacttccccacaggaaatgccaaggggcgccctttatcatcgcccatttcttccttgtctgctgctgccttaagtgcgtaaagtaggctcaacttctttggtttctaaatatcttgtagtagtcgaaggtagtccagtccgcttgttagattgaattgaatcttatataacctacgtagctaaagagaaaatcataatagtctaagtggacctctcaaaggtataaataagtatacattagtcttactggttcggtctttttctttttctttttatagcctgcttgtttggtttgctagttcctggaaagataacccttgctttgattgaaggaagtgagcggacaatactgttcctccggtccgtggttcgacctcccgtagtggtccttgcttttctttttgaaagctccgtcaaaagcaaatgcttcgctcttcttttacaagaaaggtactatctccatatttgtgttgatatatgttgatgacatcattgttgctagttcttgtgaaaaagcaacttcggcattacttcaagatttgaaagaagaatttgcccttaaggatcttggtgcgttgcactatttcttgggcatagaagttaataaagttcatgatggaattatcttgactcaagagaagtatgctactgatctgttaaaacgtgttggcatgcatggctgcaaggagatcaatacaccgttatcaacaacagataaattattgatgaaagaaggtgaacccgtgacattttgtacccaaaacaaacgcgctaccaagctgcgctacatcccttttccaaattgttgtacagtgtcattgtacaaaacccctgtcttgttttccacatcataattttatcctccatctatatacaactttcttgtcatttcttctttttggttcctggctggatccggcctgggatagtggcgcccattcctaaccagttctgaaaaggttcgctcatgctggaggtactaaccacttagtgatcggtccgctagttcacgcaaatccgaagaagttatcacggacgagccacatgcctacttctttttgttgtggaaaaaggtctttccaccgagatcctaaagtgcattcatttcctatttatagagcagcctgtaccacgtattcctccctagttttgaagcagggcgagactactttagctaggagcctcttttccttctgcccagctccccgaaaacaannnnnnnnnnnnnnnnnnnnnnnnnnnnnnnnnnnnnnnnnnnnnnnnnnnnnnnnnnnnagattttgactctgattgggccgaacagtggtagaacctggtgaaccaggcctactactaaacattgattctctctcctaaccactcttaaatatgttaaatacactccatcgatcaaaaactacaagcaagggagtcagctcttattgccgtaaaggaaaaataaccccttgattcctttcataaagatgaagggacagaggtgactaattccccatctcatttggggcggaaaacgaatcgacatctcgatgtgatacagccctttccattttcgttgggaaagaacggcgaagtccatccgaaccctccaatgaagaaataagaggagagcaaagcgccaatggcgcgcgaagcgcatgcggaaggggcacggagaaataaagaagtgtggaggagaagcagccgagctcattcccttcgcttcctgggctcaaagcagtgctttgtttcctggccaaatcaaggatttggggctgattgcaaaagatatctgaatatcaagatagatccatccatctatccagatatctaaaaaagaatcgattttgatttcataaaacctttgattcaaagaactgcgcttagcccccccactcatgaaacgcatcagcattcgcaagaaagagaaagaactcggttcaaagaatcgcttcggtctaaaacgagtcttccaagatcatgtctatgtgaagagcttgaaccaagcgttcacacgcatacgccctctgaagatcggcgagaaaaacaaatcgtattctatagaatatggtagtggtaattatataactgctttgaggaggaagagggaaattgtcaaggaaaatgccactggaggtacatgtatgcatccacttccaaattcggatgatccaacacaaaaagtatgatatttctattctctagctctcgtcatatagaaaaggtatctagctcgtccctctagcgctcgtaaaagaaatcctggcaaagggaaagccagtagagtatgccttggtttaagagagagatcccttttgattctaatccgcaatgacagtttcccttgctttgattgaattgacgaatggtaactactaccaggctttccctcgaggaactaatccactgagagtggtgcgttcccgtctgtgatatagacagagacaatcttatccttctctactctcgtaacaaaaactaattcatcgatgagtttataatagttaatacttatttagtcatgtattaataagatatcaggaccgtgctcagttttcggacgaaataaacatatcttgcttttctcattgtttgcttcttattgaatcgcctctctcaccgccatctccaaaaacttttttggcggtttgggagttggcttctgttgacgtgacaagttgatcgtggttgactatatgagttacatgtaggatccacatgtcatcctagctaatatcaccttctttggggttaggattcgaaggaaaggacggctctttgcgattaggatttcgttgactcgtcgttccaacctcgaaaagtagagtgtcattactgtcgagaatgctaacttgagcgctcgcattgccggtgcacacttccggcccacatggcccagcacgcgcgcgtttcttctttttttttcgcagtttgctatcgccgtttcttctctttcttttttcgctttcttttttctgtgatttttctccttttcttttttcgattactttttaaatatttttccatgattttttcttaatcttccaacaacacgtatttttcaaatgttttgtgttgaaagcttttaaatcttaacttaaacattttaaatttggagttgaaagctttcaaatcttgagttaaaaattttcaaatcgtaagttgaaagttttgaaatttttcgaatctcgagtcgaaagttttcaaatttttcaaatctggacttagaaagatttcgaatatcgattctcaagttaaaagttttcgaatctcgagttgaaagttttcaaatctgagttgaaagttttcaaaatttgactttaaaatttgaaacttaaatcgaaagttttcaaatctaacttaaaaaattttcaatctgttagtaaaaaaatatccaaaaatatcttcagaatcttacctaattactatcattagtgttggcatgtttggtacagctccaactcctaaatttagctccaggagttgggtctgaagtggagttgtggagctgcctaaacccagctccacaactctagtttattttgtgagagagctccacccaactccactcccagttttggtggagctgagactgtttggctgagctccagctcccggaggggtggagctggagttgtagctgtgccaaacagccccgcgctagcggcgcgtacgcgctagctaagagcccccattactgtagccatccaatggatcagctcatttttacactacaaatacgaggcataacaacgatcaagtgcatgcacaccagtaaattaagtacaacacccccagtgctgtcagtcactagctagctagagcctagagctgacgacaacgcgccgcacggtccgctttaatttggctctccgcaacgatcgacacgacggtcaccagcgacgtcgcgggccggcggcctcgtcgtcgatcggcctcgaattgtgagtggaagcccaactacgtcgatctcctgaattaggtggggccgtcctcccagctctgctcctgcaacttttctatgccaaccgcgcccctcgatcgccagtcgtcagggacgcggctcgtcggcatcggcgtcgatgactacggcgtctcgcgtgcgcggcgcccgtggtcctacctaccgacttagctagttaacttggtcaacctgtcacattagcggaaaccgcctcccaaaccgttgaggccttgttcagttatgtccggattcaatccgagccgggaataacaagtatagtaaaaaatttatgtatatacaataagagaccgggatttattctgggtcaggaacaaatttacttatgatagggataataagagaccgggaatcaatccactggttaagaggtgttgaactaattcgaatgttttgttgtccctatcatgtaaattggtttccggcccggaataaattccggtctctcattgtatctattataaattttttattatacttgtcattccagtccggattaaatccgggtgtaaccgaataaggcttgaaggagttggtttccatcagttttcagagatgagggaaggaggtgttacacctaattttgcggtttgagactttgaggggatacattattttcgggagcaagacatgaggagctcaaatcagttcctttccgaacacagcacacccctccttgacatgggccggcccaaggcccagcacctgtatctggttacggtatactaagtctgcagttaagtaattaattaattatggtatgtgatacttttctcaatacgtaataatgttcactttgatgttattttcatccatactatttttagataaagttaccaaaaattttaactaccttaagtttattgccaaattttagcaagtaattatgaaatcttgccaaattttggcaaccttgccaaaattttgacaacttagctaaaatttggtaatgccaaaacttgataaggttaaaaatggtagcaaagtgaacaagcccgaaatggtgtgttaaccacttcggttaattaatttcagtactcagttcattaaattaattaaagaaaggccgaatccctagaggtggggaacgggtgggcccgcgcaaacgccacgaggaagaaagagagagaaaaggttagcaactttcacgggacaaaaaccagcagactagtcagatatacatatactcctcctcaacaaaacaaaacaaaaaacgcgagaagagagagagagaagcttttaattcgaattctctctctcatcacggcttcttctgcttctccttctcctcccccctcatccctcctccgccggtagccgccggccgggagcgagcagcgagcgagaccggagcccgccggagccggtctcgctcccccctcctcccttgttcgcgccacccccgaggtacatcccgccgatctctctctttctctctctcgttggtctgctctgtgattttttttttttttgccaaggctgttctttatttggcacagagattgttttttttttccttctttgcgggtgtccggttcgagtccacggggtttgactctgccggaaatggttcgaatgcggcggccggagggcggaggaggggttttggggggcgttcttggtgggttggtttgcgccgagtctttgttaatttgttagggttcttgatctgatgcggcttctcgttgccgggatgcgcttgcctcatggctgaattcaaacaggccggtctctctctccctccctctctcccgtcagccgtgtgctttgaccgagtaagtttttgaacttcgattggttgagctgggggttcttgactttttcttactccacgaatgttcctttttgcacaatggggctactaatgaatggaaagctagagatggtgtgcctaatggtgatgtgccgtcattgtgttagctcggatttgtactgcgaatttgcgagctcacatgctcagctgatgatgtgttgatccagggagtatatataattggttggtagagtacttgctagattgtgctcacgggtctcatttcaaagttcagtatgaaatcttggttgtaaagtagtactagtgttttgttaatcgttagggagtacttctcctgcatttttcttaattttttccctttaaaaactgtaggtggatttgttattagtaaagctgatttgtgccaaatagaaattctgttttatccgcagtaaggtactgtaaacagtacttgcaggcactagggtttattggcaaggttttctatgttacattttaataaatgccacctttttcttcgtcaaaagaagccacggttataaagaaaaagtgaagcattaattgatgtaaatgcacgaactacaaatttccacaaatataaaccttttaataaaatccacaaatgaaagaaaaatgcagttcacacaccaatctctttctcaaaatttacacttttcttataacaggtatgctaaattttcttaatacaaagcatatacaaaacatcacaagcactatagacattcatgacatatctgttgcataggacaatatgcagtatgaagacctggctggtcaaaacttccgatgcacatgtgaggccctatccatgtgctttcttgatttctgctcctttatggccctatctccttcaaagcccttaaacacttcaacagtgtccaatcatactatgagactgtatggatatgggcatatggctatacttttgatgaggcaatgattttttttgttaataatagtgttaataggaagtgttgaattggttttttaaaaggaagtatttaagcattgaatttgtcatttattttgactcactaataacacagatagttctctttcctagcaggaccccttacaatatctagtgtatttatggcctcagttacttatattgatgactccggttctgaggtaattgatcctccaaagactgaggtgctggatgttaccgaacttgctggtgatcctgttccgcattcaccaaaaccaaatgtggtagtttctagcagtgtgcgtgaactgcttgaatgtccagtctgcctgagcgcaatgtatcctcccattcatcaggtgcacatataccacttattgaatcttttttgcacttaaaaaggatattttcttgtatggaagtcacttgggaaacaaaatgcgtgtttcatttaattgcattgcttttactatcttgaatcctgctatcatatttgtagtctggcctgatctatttgaacttatctagatgatttcctggtttaaaacggtcgttctgagctgctttttcacatatgttctgttccactaccaaattgttacccatgtatttaagcaccaaaaaagaagttagctaagatagtatgtacaatatgcacattgttgtactatgttgtaagttgtaaccccaactctttttctgctaatgcagtgctctaatggtcatacattgtgctctggatgcaaaccaagggttcacaatcgctgtccaacttgtaggcatgaactgggtaatattagatgtcttgctctcgagaaggtggctgcgtcgcttgaacttccatgcaagtaccagaacttcgggtgtgtaggcatttatccttactactgcaagctgaagcatgagtcacagtgccaatataggccttatagctgtccatatgctggatctgaatgcacagttgctggtgacattccatacttggtgaatcacttgaaagatgaccacaaggttgacatgcataatggctgcaccttcaaccatcgctatgtcaagtcgaatcctcatgaagttgagaatgccacctggatgcttacggtatcccctcgttaactccaccatgttagttattgtgaagtatatcactgatgtttacttatgcaaagattggttcacttgtctgctaagatagtccatatttctgtactgagttttatgagcctttctgtaaaaataaacattggttcacttgtacagtatgattgcactctgtacttttcatgtcaactgaggatgctgatcatgcagcatagttattggtctaaaataatctctcacctatgaagaaactatgcatcagaatatccatctgcttccatttccaaaaaaaaaaaaaaaaactttgtctgctttacagcacaataatagcatttggacagggctcttgatctgcaaccttttcttgctgctttctaagtgcaatataaaattaagaatttccttctaatctgttcttttccattgaacaaaatggactaagtaac

SEQ ID NO: 10436 - DNA, 27873 bp, Oryza sativa
gaggtgagggggctgccgccgccgtcgccggcgacggggccgcacgccggcggcggtaggtcgcgcggggcgcggcggcagggggagaccatcgccaagggccacaagaactatgagcttatgctcaacctccagctcggcatcaggtgcgtgcgtctgtcccgtctcttactcttcttctccttcttcttgttctttttatttttgtccgttctttcgatccgggtgctccatccaaattttccctacatggatttcctctcctttttcaatgtatttatgctgattgcgcattttgaatttcgtatgatgtaatgccatcgccaattaatctaccgtgcagataaatttgcaaaaaaaaaaaaggttagaaggtgatgtttattacatgattttaattagattattctggtctcatggtaagcaaaacttttcaatggctagctacaaatgccgaatgattttacctccccctcctgacggggatgtggcaattttacaagaagtcattgtttgcacgtagaggaagcgacgcgttgaaaaattcaacaaaaaattctatgcctaacatgtgcatttgtttattgactcgaagctgaaatggtggcaaattgtgattaattggaattttacgacaagaagaggggattctttttattgaaaaatttaatatgaagtcaagcataataacagcagggcatactgtgggccaaaagcatacttgcatattttcatttaagcagatattatatcttcttacactagaatagtaaaatgcatgtatttgcaacatttcagaatgaatttgtctatgctctaataactttgtctgggcaatagacatgcagtaggaaaacaaggcccgattacgcttgatttgaagtcatcagcttttgacccaaaggagaaagtatggacaaggtttcctccagaaggatcaaagtacacccctcctcacagttcttgcgatttcaaatggaaagattactgcccgcaagtgttccggttggtcatcactccaatgacttatttgtgtgttatgcctgcatttagcttaattcattctcatcagcggtacaacttgtcctggattgaatcacaggacactacgcaagttattcaaggttgatgcggcagattatatgttgtccctttgtggtgatcaggctctccgggagctctcatcccccggtaagagtggaagcttcttttatctcacgagcaatgatcagtacatgataaagacgatgaagaaatctgaagtaaaggttggtgcatcatgtttagtttgtccagatgctttctgaattcacatctggcacttctgtactaaatctacaaagaacttgccatcatgtagatatttcttaagatgcttcgagcttactacaatcatgttcggtcatttgagaacactctagtcaccaaattttttggtctacattgtgtaaagttagctggagctaaccaaaagaaggtcagtacttaatatatatctgtatatcatgctaaagctaatttattagccaatagattcttattaagcttataaatcaatatgtcatgtctgctcatctgtttgctatattattaccaggttcgtttcgtcatcatgggaaacttgttttgttctgattattccattcatagacgatttgatctgaaaggctcatcacttggacgtacaactgacaagccacaaacagaaattgacgaatacactactttgaaagacctcgatcttaactttatctttcgattgcaaaaacactggcaccaagagttcctaaggtaagtgaggctagtgcaagagtgagtggtcatcacatttttactcgttgtgttaatgtagaagttaaatgtgttcaagcagacaagtcgataaggactgcgactttcttgagcaagagaacatcatggactacagtcttttggtgggtgtacatttcagagacaaaagaaatctattagcaagtgaaggtaagatgaaaaatataatcaatttaagtttttgacatggttgttctataccttacgaagtgcatgggttgaaggttcctttgatagtgatagtagcagagcgtcatcgcctcacctgtctagaggagatactgatccaaacaggtaaaataagatacttgattactcttgctcttgttgtcaatacttttcaggcatacacatgctatacgatcttccatattgagatgccccatatatatgcttccttgatgttcgccttgattctaatgttatgttcaacgggcttcattgcagtagagatatacgatacttgtcatcaagaactaataggcagcattcgttgccaccaccattttacctccttttccttgcacttctatatgataagaaataatttggctgtattgatgtctccaagttctaattttaacatcactaagattctttgggtggacaggttttcgaagataaaacttgggtccaacatgccaacaagagctgagctaacagtacgaaagagtgagtgcgagcctcagatcatcggagagcctactggggagttctacgatgttatactatattttgggattatagacatccttcaagactacgatatcagcaaaaagcttgagcatgcatacaagtcctttcagtatgacccaacatctatttcagcagtagatccgaaacagtattccagacgcttcaaagattttgtgtacaaagcgttccaagaagagaagatagacatctgaaaacacattgggactccagagctaccgcagctgccgacatagatgctggtcatatttcagcaggtttgatgcctctacttgtatatgatcaagcagaagccatcaggctgatcaaggccctgcttgcagacccccaaggaattcagatggctccgattgggacaatggtgcttttcaataatctcagattcaacagtcttttcttcccctgaaaaatagacacagcttcctatctacagctactttgttacaatggccagtctagcatagcacatcaatgccaagctatgcctaaatatagctatatacatgcatatagaatccactaatgttagtgtagatgctgacttgaagattcattcttttttttggcacacttgaagattcaacttacagagagaagtttgtagtgacaaagttcagagatgtaaatgttttatgagataacatgtcgctatcctcttgtttatgtgtgttattaacgagggcatattcgccttatgtaactcatatgaatcattctaaagtccataactttaggagattcttcactgttgaagtcaatggcatgcaggaatatctgagactgacaccatttttgctaccacctctgaaatcaatgaaacgtattgctcagggtattttcttagcattcctgaacctgatatcaacggtaagatggtgtattttagctatgtcacttaggtcaaagtaagcacatactgttgtttttgccgggttgtcagatttcttccaagataatggggaaaattaacttaatgatttgccactcggacccatatgtccgacatatgagtgttagaaatataggatcattaggtgcggatctaggggtgatatgctattttttcgcgaatgcgcaaaaggattgcacgtcaatataggggggggggggttgagatgctagctcatagcaataatgggttgatgttcttgaggggtgagcggagggagagagagagagagagaggcgtcggacttggagcttgatgcggccacggcgacggtgtagcggagtggtgtggtgttggtgtagatgacgatggcggcggcagtgagaacgtgagtaatcccctcacttcaacgccttcccagattggagggacttagggtttgtggggagcacatgtgcatgggaaaaactcacttcgcgtgtgccggtgactccccttttattgtggcgctgcgtgagaggggctcacagccatggaacggctagcgcccccgatcagggcgcttacgtgcgtggagtggggaatcgggaaacaatgagggctcacacgtaattgatacataggtgccaaatagttaaacacttaaatgccaaatctaagagtggcaaatagatattggagatgcaacattttgtgagatgcatcttgtttgcgctaaaattgggagcattcttcattcttcggttttcagttacacagaaactcttcccaattcaaatgctattcattgtcaaattatacatgaggaattaccggccagacgctcttgaagtggacgacatttacttagcatgactagctatttatattcacagtaacataacaaatattacttcatgttgacttgcaacaactgactcactaacaacaacaaaaaaaaaagattgtgtttaaaactctacaaaaattcatgctgaactccctaatttcataagaagaaggaaataataaaaaattacatgggattgggatcaccagaatcctctacatgttgacaacaacatctttgctatcaatcgcagcgaaccagcggtcagtgatccgtcgatgccttgccggcagtcgtccgaacagcttgcataccatcaagcaaattaacaatgtcccagaggaccagcatatgccagtcgcggctgctccgtgtcaagggtatagggctcacgcggcgcttcatgatcaagctccgcctaagaccagtcctaacccaagacattagacatagttttcataaactccacatcatcaataaactactactagacactactctttcaatataaacaccattcttccatacttaaatttaattctacttatctctcatgatatgttggatattgtgtagaaactaccccctccatactcgtaaaggaagtcgttttagacagcgacacggtctccaaaatacaactttaacttcttgtttctataaaaatatttattaaaaagtgatatatgtatacttttatgaaagtatttttcaaagacaaatctattcatataatttttacattttcaaattcaacaacttaagagttattcatgatttatattcctaaggcttgacttaagcattgtcctaaacgacttcctttacgagtacagagggagtatgtcttatgcaagatctgattttattctcttttctcatttttttcgcttgccacatcatctttcatcataggtggtagcttatttaatactatggacaccatcctgatcattgagttggaactggcctaaaagccgcgcaacctctcgatccagcgctgtggccggccgccgccgccattgctcacctcccgctctgctggccgaagccgcagagtcgtttcttctctccgtttggatttttcgtcgacatccaacggtaaaaaatatatttttttgccgtaacagtattgagagacccatcatactttcggcccggaacgacactgcggcccacatgaagcctattgtgtttttggtccggaatgggattgccgcccacatgaggcccattaaattctggtccgaaaggaattacggcctacgcgaggtttctttttggaataagttcaccggaggtccctcaacttaacagcgagatttttcgagaactcttaaccacaaaaccagaaatcttcaccccaaaactatacaaaaccgttcactcaaggtccctaggcagtatatatgagtggtttcgctgacgtggcatcctagttagccaaaaaaaaattaaaaaatacgtggggcccacatgtcagctgcacttttttttcctctcttttcttctccttatcttctcttttctctcttctctatttctcttcttcagtgagggaggccggcggcaggcggagcagcgcgcgcagatgcgggtggcgcagcagagggcaagcgccagcggagcggcggcgggcgcaatcgtggcgggccgagcagtggagcgcaagcacggccgcgggcagagaagcggagggcgagcgcggcggcgggtggagcggcggagggcgagcgtggcagtggagcggaggtgggcgagcgcggaggcgcatccagcccaccccaatcgaccaaagcacgccctttgccctcggccataagccccgccgccaagtcgccgtcgccgtcctcctcgtcgtcgtcgagcggcagcgatgacttcgcggtgctcctcgacgcggagctcgagctcaccttcgccgatgactcggcctctgccggagacaacgacttcgaggaagacccctcccagccttccctccttcctcctcgagctccctcacgccggcgccggcgccggcgcctacagggatgggaagccgacagtgctggccgtcgtggtcagctcgcttgccgcggcaacgctggtcccggcgctaaccggctgatgcgtctgcggatcgatgccctggctcatgagcttgcgcttgatgtgctgttccacctgcagaaccaatcaatcagcaccaagaacacaagaagagctaaccggagcagatgacaacacgttgaaatttgttttgcttacttgttgccgagaagggcgtggagcttgatggtgagctcgtcgtcgtcgtcggtgaaagttgctgcacttgaggtcggggataaggtagttcatcgagtggaggcagcagctctttcggcagcggagcagccccatcgccttggggagggagagagggtcgacagggagagcgcgccgctcatcgggcggcggcggggcccgtggtcgagcacccggcacgttcgaacatctccgccgccgagctcgccgtcgcaccggccgccacctctcctccgctcccgccgccgccgtcgcatcgactgcctctctctccctctccgctgccgccgtccccgctccgccgccggccacttctctccccccggtcgccgcgcctgctcgacactcgagagaactcggagagaagagaagagaaaaagaaaaaaaacagagaaatgtggaacccacaccattgtctcacttacatgtgggccacacattaattttatttttttttctggctaggatgccacgtcagcaaaaccacctgtatatactgcctagggaccttgagtgaacggttttatatagtttaggggtggagatttctggttttatggttaagggacctcaaaaaatctcggtgtaaagttaagggacagccggtgaacttattcctttccttttttccggtccatttttctcggtccaagtgagccttacggttcggtttgtccctcgctgtgttctaatttccactacgtacggtacgacacagcatggcatcagaatggacaagggaaaattacttgcaatggtaataaagctaagcttcaaacacagattgtttatgcaccaacagggttctcatttaatcattttctttctcaccttcatcaaaccaagtgttataaaccaaacaaccgtacaaacgcgtaactctattccttccttttgagtagccacacaaaaatacaaatatatactgttatagcgctggaaatttttgttttgaatggcaccccaccttgacacattacatacaggagactataacatcacactcaagttgctaactcgtgcaaagcgatacgataaaacccgtattggagaacaaaaataaatttacattctcaacagcaattcctacaaatgattaacatggatgggaaaagaataactaccaagaatatacaatcgtggaactgaatgaacatcctaccttggactgtcccaaggagagggcggtttgttgtatggaaaaccctgagaagcggatccatgtcctaaatcgagactgtggagttgttccatcagttgcgacctccgctctttgaagaagtctagcctagttgtcagttctaccaaagtggaggaggccaccattggttgcctcccataatcaacaccctgccatacgataaaaataagaacaatcttcctttggaggatattagtagtgctaaatagagtggctgtgatttccctaacctcagtaaactttggggcattgatagccatagcagtgttatctgttggcatgctcgtcgatgcctccatgcctcttgaatcgcttgaagatgcgtccaaagagagcttgcgggtgagtggccttgaagaaccataaggtagcacatgctgcttgatatttctccactgtgatgagtccaccgaactctcctgccatgccaaaatatgatccgatgttagtcagggatacgatgccaatatcagattaaagcgagtgtgtttccttcagtccttctggtggaaactcctaacaatattatcgtgcaagaaattgtttgggtaccacaacccacacatcaaaatagagcaattattatttgtttaggagacatgatcaatagcagtaatatccgtttccaaaactgaaaatgagtaaaaactaataaaacagtataatagagcattcttgttatgctgatgtgcacaggggtcaagttggacctgaaattcaacacacctctgtgttgttattaagctcacaatgtgtagagtaaatagttcttaacaaacctcatttctctgcttctcttggttgcagaaggcaaggttcatgtcgaatcctggctgaacaaagttcctggcaccaataaaatagtcaaaataagatagaaatcattaagctcagtaaagcatatccaatatgtctcgatacattgagctatcaattagtactgcacagattgttttccagtgaaatgttgtccacaatcagatttcaagtaagcaccagttgcagcataattctgtggctgcatacctgcagccactctttacagaaatggggccacttggatgaaacagaacaataaacacaattacagaaaatcaaaaggtgccaaacctactgaactagcaacatccatccgtataaatagcagtagtaaaaaagaaaacaacaaagttgattacttactgctgcgaaaaatggccaggaatacggtggtaacgatcatttgcatctaccatagggccatactggtgttggcgctgttggttgagttggagatgaagctctgcaaccttctgctttaaccttgcaacatcagcttcagcaagagcaatctcctcaagttcagctctcgtcttgagaaaaacaatgagtgaaaatgagactccgtaaagtaattccataaagtagagcggtcactagaggtaccttcgtgtccatagcacgtgaactagaaaactgactggaagacatgctcaatccaacctccaatgcagctctaagatctctctctgcctgtagttgctcttgcaacctagacacctatcaatatcacacttgtagaaattactatctgaatgtttcagtcaccatcaaatatatcacaagtgttcagccaaaaccaaatgtaagggaaagtatcgttttggttcctcagtctatgggctatgggtaaaagtgacttttgtgcaggcattatttcattttagtccctcaattttacagcatttccaatgcaagggatgaaggcaacctcagcaacaaattaatcaaacttatcgagcctctgggtcagggttaaaaaaaactggtggtaagcagtccaggtcctgggactggttaggggatgctcaccaacaggaatgatgttgagattatatttataatttataattattctgacagttatcagtgcagtaaaatccagtaaccagaaggttactgtatttcactgatgaacgataataccaggattactgatattaggaaccctgatctgattcaacgataagcaaggcccaaggagctatcagttcaaatgtcaacgaggggatccaagtctctgcctggacctcattctgaattgctggaaatccaggcaagaaccaggatttctgtgttttgcatgtaactagtgaacagtgaggtttgtgattgctattttcaaggaatatagacagcgctgatgattcaacgtgtagaaaaagaagagacaagcttcaagaaacacacaaaataaaagacaaatgaaaagaacgctagatgcacaatgtcaataaaactaggcattttccagcaaaccagtgggatgttggatttgaaagaattctaagattcagaacctgcctaagggacaaaaaaaaagggtatctttccccaatatactatagtaaaacatatgcacttgacgaccaagcaaatttgatggtacaagggaatgcaacatacatcctgttccagggccaaacgacgttcatgcagtgcttgtttccttctttccaaacttgcctgtagaattgcattacccctagcctgaagccactccttgttagatggcaagcataaaatagaatattcttatgtgcattttcttcacatacctctttggcaattctgttctgcagatcattctttgctatttcgagcctttgaatagcaagcctggaagtttttatttgcaaagcaaaattacaatcaattaatctatggtatgcatattcaacaaatgaacagcagcggcgtacagtagcaatatcagcaaccagggagtgtccttagcaagttattgatcctttaacttctctggattaggttaggcttagttagcaagttatgaatcagcaagttaaaggattaggttaggcttagttaacaaacaagttattgatcgatataggaaggtttgggtgttcaaggtattccattatgacgactactaagacttctgtttcagcctcattcaaaacaatgttagaccctaggttaatccaacgtttctccatttggataggggaattcctattaatctatcgacagcttattagttgggaatattaaattgagttgttaggggcattatcatccttttcagcaggcaactaggcaagaaatgaaaatagaagtccgtagactctcccttctcagccagaggcctcagtgccttggcagcagcaatggagggggtcaaggaagggcaagtgctagagcattggcaaacatttccacagtcaatatagaatggcctaatgcaatacaactgctcagattcacaactattaacaactaaactcaacgaaacagcactgtaaagtgtaaacaaaaatgatttgttggtgctttagtggcaaagggcttactcttcttcaccagatgagtcgactgattcagagtgttgactctttcttgcctgcataaaacatgcatatagaactcagaacagaataaggtttctaataattccagaaacaacttcaggaacaatatggagccaactaaaccataattcgatggagtaggaaggtggaacagcaatgcactattaatacccagtagctccaaaaaaaaggcagaaaagaaataaacatagctaggtttttcttacattattcctcccccagaagttactgcgtttcacatgtgggtgagatccattgattttggctggctgtctgctttctacagaatattcaccactgtgattagctaaagatattccaggatccaaagaagaaagtatttctcccatagacagtggagtctcatggctagatattgggttagaaggattcttttcactcagcaatgtttccatatatgctgaaccgttttcagctgaatgactttttggacctttgcttaactcaatctttacttccgctgccttagcatcttcagaacgttcagcatctgaatcatcagcatgaacaacctgttcaatcaggtgaacataagaaataaagtattaagattgggacattcaaaagtacacagaaataaaattaaaaattgcctctcaacacagtattgaagctagaaagggaaacgcacaaatgagatactcatataacctagaaatacaaccaccaaaacttcaagacatttcttacatggaacaaggtaatattctaaagtggaagatctataggcagaagcatttaacagaagatgacagccttcagggttatattaccatcaatataaccataatagatccatgccgcaagctctaatccataaaatacatggaagtggaaatttacaagcataacccagactggcatgattaaataatactgcaagatgacaaaaacaataagcaagggttctcaaaatattgtttattagtttttctgaacccaggcagtttatcgcttggcgggacattgctgggttctaagtttgcatgcattcaaactcattggctgaccaggtcaaatggttttgagaaaccatatttgttcagacctagcaacaaagatttcacccgagtctttcgtatctgcaatgatatctactggcaggggtcaaaatgggtcatcctatcatatcctttggtcctccaaaaaaactacaataattacatttaaattacatattcacagtttgcagctgaaaatgtactggtgtccaaaaaacaagctcctcatagatgtacaacaactcaacaggaagtcaggaactacttttaatgccctactagtttttatcttcattcttaagaccataaaaaggcatacttatacatgtacaacaataaataacagcagtaataaccagattagagatttaaaaagtaggaagcatatcaaaaccttgtagtcatagaggtcactgccagcgtatccactgctctcactcagttttccactaagtatacgttctgcgccattctcatcatccatttcctgatctacatcattttcagcatcatgaaatccattacccttgacatccaaatttacatcatctgttgatgcctcgctaccgctatcttcaatttgagactctggcgacagggagcatctaaggttgtgttcaccctgtaagatatataaatatgaatgatcaatagattagtgttgtctttatttctagttcacatttcaaaatatgttctacacagaaaagaaaaaggcatagcttccagcagacagattccaatgaaaaagaattagcgcaactgttgatgtgaagtattgttagcttttcgatggataatggtaatatcaacagattgttcacagaaaaggtgaatccacaaaaggagttgagaatcttacatcaaatatactctcgtattcctctaagagagttgtgacaatgccttgagcactgttagcggcatttgcagcagcaagaagctgtgcagaatcatcgccatccatatcaaatacctcatccatttcacattcaccagcaagaagtggacgcaacaacagaggagccatacaggcagcaactgctgatgctgtcattcggttctcggaagtatgagaagcgatagtatacatcattttcaaaattctgcaaataaaatctcaattagaaaaaggagtttttgacatatgattattatccaaattctaattgatcaaacaagacatctagataaagattattgaggtgttgctacttcaaacttaaaattcaaccaaggctaaaataaccaggttagtatatgctctattctgtaagggttccaaaaatcaaattatggaaggtgctcttacgcttcaccctttgagaaccgccacaaagtttgaagcataagtcaagggtggattccaactacttacccttcactagtgcttcaagatttgtgtaacttgtattacaaaacatgaaagcacttgtaacaaggtttttaacccataaacagtataaatcatttagcataagctggcggacttgaagcccaagcgagagtaataaaacttcctagaacatttagatgcgatccagtataacaaaaaagaaaaacagaaaaaaaaattgatacgaggaaaaccatgaaactaacctctgcagtaaccgccgattaggctctggaaatgtctcaactatagctgagcgcatagcatttatccgagcatccttagtctccagccctaggaaagtaaagcagaatatagacagttagtcaaataaaaagacagcaaaggaaatgagaaagcatgtaagatcttagcgataaatgtacatcaactagcatcttagatgcttgcctagatcaactaaaattcagaggcaaagaatacacgggaatagaggagcatactatgaaactatatagaaatataatcatcggccatacaaggggacatgccaatgccaggcacttttgagcaaaataactacataattcaaaaagataattatccccatttccacagttatctacagacttcctggaatagactgagatggaattaaattgtaagtgatacacaacaggaacctaggtgtgtttcctagtatcctatgcatatgtcaatactcaacagtgacggaatatactagagcaatatcacttagtttaaactgaatagaacacttacgaaaagcttccaataatgctgtacagcaggaagcaggaactggagaggatggtagctctcggagaacatgctgcagagatgtttacatgaacatacagttagtgatagaacggattattcaagctcccagcacaaaaaagaagaggtaccgtgacagagttacctttacacaatcaccaacaatgtgagaatcttcatccggtgcaaactccgtccttcctggtaggggatataaacaggcacaataatggaaccatatgcaaattaatcaataagcgaagacaaaaacaaaacagagctaccaataccatcaaattaacaatactagtcatagaataaactaagaaatggttcaaccttgctcgtattcctgcaatctcctgtcaacctcctctacatctgcagcctggcgtagaattccttccacctttatccctacaagaaaagattaacataactattgtacattgtacagatgctaaactagcagtactccaggttctaaagatggtgctagttaaaaattatttgtgcacccaccatatttctcaagaaaacgcagagctttttctagaaaagaagggcttccatcaatatcctcaagtgcgagaagaattggcctgccaacaactaacgacttgatcggcctcttctctctccctgcaaataattggaaaggcatgagttaacaacaaacaaggttgtaatgagtaggagaagaaaaaaaaatgaaatagcataagtagaccaacaatttgggatagctccatcatatgtgtcagtcgtttcattacgaaagatcccattatgtcccatcacaagagctgcatttggagcctgcgcaagagcctcttctaatgctgttttccactcaaataaatcttcagaagtttctgcctgtattaagcaaatatacaacattcagaaaatactaataaggagtaaggagcatgaacatatgtctgatcattcaatctctcatctgtgttgagatgatccaattattaaataggaaaggaaaaaccatcttaccttaagggtgaatgcacgaccatcacggccatctgggaaaaggacagtcaataacttcttgtcttctctgactaccacactgcaaatgataagagcttttaatacagtattatctgtacatcctaaaagggaaaagaaaatctcaagaatgaggtaaatacctcccagaattattcaagtcaattcctcccagagtaacattcacttcaccacctctctggggcaaggtactctacaatgtcaacaaaaggtttatcaagaattaggaaatggttgttgttacacaagttataactgcactagtgggtgggtgggagagagagagaaaggactcattaaataatttaactcaactccctatcgaaaatagaaaaggaaatgcacatcaattgggagaaaacaagttgttcaaaacttaagacaggagagcttatataaccaaagcatgttgtgtaattgatttgttatgagcactagatgttgaaaactcatgcatttcaaagtattgcacacatgcgaaaaatggatcgaaaattgaaactatatactattaactatcaaattatctgtgcatggcaaggtggcaatgaacttttttttccctagtaggacttgtcttacaagcagaacaatttatagcagtttcaacaaataagagtgatggcacttaaagccaaataatcacattctgtggtggttgtgcttttgccggaaaaagttcatatgctatacttcatctataacatcaactaaattcagggctctgagaaacaagttatgcaaaggtacaccaggctaattattgacttctcaagcagaggaaacatataatgatagaaatactaacaggatcactcttgaagaaaaccaatgatgttcgtgtgaggatgaaccaccgttttttccatgatttccacccgattcctgaaaattatatataaaaagagttttctttactgtagaagaatatgatatcatattagaaagttgtagaagacataccaaaaatagacaatgtgatactgactcacaacacatgatttaattcaaatatgaaagggtgattttggtagattaactaaattacaattcgtaggaatcaatctgctcaggaaaatcatgattcagctggcaggagtcatatttggcactctaattgaatttctgaggcataaggcaatccaaactatcatttggtttggattttggagccttccccatggcaacaggtttatctttcccacgtaagttggtgacaaaggcatgatacaagcatatctaactttgagaaaagttattctctagataattcctggattcgtatagttcctttgtgcgtacatgattgctagcaagatacttcaacctgattaacctatgttggaaattacagaacatatgttcctcccccttcgcttataatccaagaaaccaagaaataattaatatcacaaaaaagaagaatattatggcatcctctatataatcatggtgtcggcgttcatcaccaaaaatatgtgagtgcctcaattctttgaagaattcaaacagagacacaagagaaaatgggaatatttggactaactttacatgtttacatcacataaacggcctgaaacaacttatgatacatgtgacagaggtagagagcaagaatgtaccctttgatgaaatgaagagaggtccactcttgaaaacctggttagcacactagttgacatcagaaatgtgaacaggacaataatattaaatatactaagagattgcaatacctagcaagtacgtaatatgtatatagacaaacattcaaaattcatagtagatgaaatggaaaggaattgtatatgtatatccgatacatgaccacgttgttaattaactcttgtgtgttcaactctagtgctaactaaaagcatactgctttatgctcaacatgatgaataaaaacagttccaagaattcccaaattaattttctggagaaaatcactgtgcatggacctaacaaagtgaatatgattaggttttcattactaaaagttgcatcctgtgatggcatgataacaaaattagtgttgaaggtaatgtcatagtagtattggaatttgatcttctaaatatagacgaggtgagcgcagcaagtagaatgtagattgatgctaagatgtctatttctatctagctttatcaagagttagggcttggggaactgaactactgaagtcgatcaatttaccatgtcatctgatctgagtttacatgcatgcttatttacaatttactaatgtaatgggaagccacgcagaaagcttaagcacattcatgaaatgcatatgctagacatcaaaccatttagaattccccaaatctagtttcacgaaataatagatgtatctgcatgtgtgagcttcctaaattctactccctccttgtgctgacagctgatcatcttccaaccagatattatttcttcctttcttacctgtgcaccgctccaccctgctcttatcatttttgctccaaattatccttcacggttaccatgccacaaatctcccgccctcaaattctctctccactcggccccaattcacgcgtgtcaccatcacgtcaaaccccacgcaacatctgacacaccattcagccgtaatcagagccaatctcaggtcaaaaccaggcaagcttcacgatgcccccatcgacattcggcaagcatcaaaacctccacaaatgtagttacatttccttatccattgcatgttccggtgattatcctaagctgcattgccagcaccccgccaatatgaccatcggtatgaaggaaatcgaagctcgtgggagccccccaaaaaagggcagctcatctgatgcaacccgactgaagtcgaaaccttcctattaatagcagctacgcagcatctccttgccagcaatgccagtctagagcagaagcttgcggcggccgctgaaccccccatgaggtccaaattatagagccgcgggaacacgaaaccgagatgcccgtaagcatcagataccaaaacccaccccaaaatcccccaagccaccacccgcgcatgacgcacgcaaggaagctagctagctactcctagctaagcccagtccacacggagaggagaggcgacgcgacgtgaacgcaccgtgttcccgctggccgccggcgcgcccgcccgctggtaccggtcgaacgccccgcccgccgccggcgcggacgacatcccttcctccctcccaccacctcagatcgggcccgctcacccacgctacagcggccgcagccgccgccgcattggatccggccgacgcgtacggatccgcgcgcggcgcgcggatggctccgccccggccccggggggaggtggccgcgacggagtggggtctaggtctagggtttggttttagcgcggcggtggctcgccgtcacaggaaggattcgggcggcggcggcggcggcggcgggggagggaggaaagcgaggcggatggatgcgaagagcgaagagagagagggggggagggagtaggatgccgttgtgttgtgtgtgatggggcgctgcgctgctgcttccgctttggcagctggcttcgctttggagccttttgctcgcctcgtgtgcgtgctgcgttgtaatcgtatcgtacgcctgctcgagcaagtagtagtagcgagtagccgacgagtttactacactggttggtaggtgatggtttggtttggttgatgtgggttttagcaggcttacgctgcgctgctatagtgtgaatcgactgtgatctcggcgattctattatatggattaaaatagatgtaatttaataaaaaacaggtgtcacttgtcacgagggatactagcactgtatcattcagataaccttcacaattaatgttgatgggtattataacgcgacttcgccgaatcgcaattaggaaagtttggattcaaacatggcctaatatagatgtcggttttatgctccactcaatcctctaaaaccattattcgatctatactcgcaccgaagttggtttaagaagatctagtttttaaaataaaggataatataagaggatttagttataaagagacttgtgggatggctctttttttttatctcaaaattatagcatcctttcaccattaattttttttccatatccaaacttctttataggattgcgggtgttcttgaacacctaggtttctacaagattttgtgcattgattactttatttctgtctcactcatgttgtgactacgttctatgatccaatgtcaatcacagaggtatgaaaatgtaaatgtgtaacgagccaagaccatgacaacgacacaaatgaaaggaacgcaacaaaaatctaatcaatgttagcaatcaaaaagtacattgatgtaccattaatgattcttatgaagtagggaggaaaatgtaggtgcactaaaggttaatgttaggaattgccaatttattggttagtatttgtgcttgtagttgtaggacaacgatggtgactcatgaaaatttatatgaaaaaccagtgaaaatcaaatctaaaagttctccaaatttatataaaaaatttataaagataagtataagcgtgaactacattaccacgaaatctcaagtccaaatttaactttattttaaaggaaaaaacaaattttgagcaaatcctagggcactatgtattaaggttaatctattcatgactacttatatactccctccgtcccaaaataaactaacctcgtaccggatatgacacatcctaatttacttatcacttactttgggaagatcttttgtcattactaatgaccaatttatattgttaagataggtcctgaaaaaaaaactactactacgtagataataggaaacgtgcaaatattcattaggttttcttttcctatataacattattatttattacattagcacgtttttacatgtcatcaaattttatgactacgtgtgctgggttatctagaaactttcagggcccctttcaatcctatagaaaaatttcctatgaagccctttgaatcaaaggattgaatcctatccaatcctttgaaattcctatggaatggacaatcctatagagattttggaggaaatttagcaagagcttcaacctcttgctaactttcctttgagtctatctctctcatctaattcctgcgtttttcctgcggttcaatcaaacggtcattcatgtgtttttcctgcgttttgcaatcctctgttttacacttacattcctaccaaaatcctacgtttttcctattcctacgttttttcaatcctgcgattcaaagggaccctcaatatatctatttttcctatattactttcaatataaaataagaaaggccactatgtcacttccttcgtcacaaaatatatcaatttacgattaatactccttatggggcatcatctattcgtacaaatctgagacttatcaagtgcagtactaacatgacagagaacggaaaaaagaaaaagacatttgcagattattaaaccctctaataaagtgtttggtgccgattttttgtttgattaaaagtgggcagttgctggcaggcaggctggctggctggctggattgttgggccgtacgttgcgccgcgccaatggcccgtgggggtcaccaccactaccttctccctttcccttttgttttgttctctcctcagcttctttgtccctttgctcgtttgctcgcctagctagcaacaccggccggtggcggccaccggagccggccggaggcgccggccggcatgccggaccacactcgccgccgcatcgtaggcgctggatgctgccacatgtcatgctgaatctacttttgtttgcttttggttcatttcagacggtacgtgtgtgcaccacacctctgcatatgcatgttataagacgttttggtctctcgatgcatcgattagattcactaataacatctatataaatttagatagatacgtgaaacaaaatacatgtatccatatatgaatctattaaaaaaaccccgaaatattttatgatgtgaaacagaggaagtactaaatccttttacgatatttttagttgtctaggtttttcctcatggtgcggtccaaatgagagtagagaaatacgatagctttggttgaaattaatcggtgtcactttgtgtgttgattctctgatcggttagagaccaatgttggttagtactaagtactacataatacagtttatgcttgtctcgattagttctttttctgttcatcgttggctccttgttgtcccgaagtgaaatgtcaactttctaagagaaataatgagctcacaaacatcattcagacaacgaaaagaaatgcatacatgatacatgcaagaaaaagcatggaaagctaagttagatggtataattgccatgtgagtactcgctttgaacctttttgcgaaaaatcaggatccaaaatgacttttgcagttttgctctcgcctcccacaggagggggaaaaaaggtttgcattttgttgtattgaaaacaacaaattctagtacattaatcatgcatcaacaacaaccaatgaccaacctggatcttaatgtctctctcacacacacagagagaaagagagggcattaacatctaattaacttctataatgtttcagtaaaattttatttctacatgcacttagtactagtacatgtcaatcggcaagtgcatcacatggtgccattaatctcgacctatccatagtatccagggaggacaaggatgcagccaccatattagcttattttgtacttcacctgtttcacaatgtaagttattttagcattttctacatttatattgatgttaatgaatctagcatcaatataaatatgagaaatgttagaatgacttatattgtgaaacggagggagtagtataggagatcatagctgaggttaattacccgtttcagttacgacgtagtaactgcggcgtactgatcatcagcgttaattcgctgatcgatgcatccatccgaggtactacaaaaaaaattgtcccggcaagaatgccatgaatgagttctgggtccatcttgtttttttggtcttggacccgcgtgtagctctggcaatgggactacatgccaactatacggatgcaaatgcgagctgaataataatgcccttccttgtacggtttggtaaggcaatttagtacggtttggtcgcgtcgtgttcggtgtttatcacacggcaaaaataatttagtacagttatattgtttgtaaaaataatatctctattattataaaaacacggtttgttctctcctttttcctgtcaaattatggacacaagtacacacaaccacccattctcaataaaactagaaaaaaaaatcaagtgggttggttaaaaaaattcagaaaaaaacaattaattgttttttttaaaaaaattgaatcatgtcctatttttaggctttttaggcccttgcaatgtatcccaaataggactgtgcatcctcaaaaccgtacttttgccacggttttgtttggcgttacagttagctatgataatttactagaattaatttagatattttatagcttcattgtttcttcagcttatctgccgtaaccaaaatttaaatatttaaagtccattttggtttttttattacggtttatttttttcattaacttttaagtcattaacaacacatatataaaattttgactcacaaattagtttttatcattaataaatgttagtgcctacaatcatcttgaagcgaaacgatggggctataatatgttttgcaaactgtttttctttattttaatttgcaagctagtattattatctttcgaagatatgaacaaacagtagagagagatgacaatattttttaaactttttttaaaataaattctctcaaaacttgcatccagatggcaaccttttgccatggtaaaaggatgctgccatgccgttaaaaaccatgggcgtggcaccaatttgaccaaaagatctttttaaattaagtttcagaagttttatttttaaaagtttaaattaaaaggttttttttttttgaaaagtactagcaatagccctgtagcatggaggacccctctgccgctacaacataggagcgacaaattgccagttcaactgaactaaattaccctttgaactcaaaatagaaattgcttcaaaggtcttgatataccactgagaataatgggcatcttcatggttatttcaattcttttaacaaagccatgccagggactgtactatcaaacaaacaaagtgattttatagactgattatgaggggtaaattatacatcaaggtaactctttatgctgttgctgttggaatcaactcgatggggagagaccatagacactggacttagaaactctcctccctctgaaaaagtatcgaaccaatcataactgcgattccagtcaccgcaattgtgaagagcagacgcttgtgctgtgcaccatgcataggccgtggcggtcttactggtggaggaggacgcacttctctctctggaatgattcgggcactgaaatttgaagcatcttatcagtacaagatttgtagtacttcacatttggactagtaaaattgctagtaacatcttgctaatcatgaaaggtataaacaagaatcatcaggatacaaagcaccagttccattactctgatacacattatcatcttgaaagaagtgggaaacatctaattgaattattgaatgaatctgacctacattgactaaagaatgcagggatcaaggctcaaatgctaagtgtatataatttgcatataatagattgcaataatttagcttgagaaaatctaccttcactgaaaatgaacagtcaaagaagtatgcaactctcgtattaaaatgataagaattatacattacatcataccaaggttacattaacgataaaaaatcagcatgtgttaagagaaacgcctaagattttaccttgatgtctgtgcagaagcatttgcatttgcatttgcatgacactgtatttcatgcccaatccattcacgtagtctaacatacttcttgcatgtttgacaaaattctgttcggtttccgcatacatcctgcatctcaaactagtacgattaaaacatatatctacgacttaaaaaaaaagatgtattccttacatattgtgtgtattataaggtatttggttgatgccatatagtcttgtgtataattttcagaattaagggcaattatttttgcaattagctctagatcttatagtatattacttgttataaatcgaaggcacgggcatactgttagtaaaaaaaaaagagagagattgtttcaaggcaaacaacaaaacagcacctgatgttcatgaagctcaaccgcaggcaactcaaactcacaatattcacatgcaacaatcctttgtgggcactgttcacttttatgaagatcccagatctcgcgtgttacaatttccttgcaaagagtgcaatttacctgtatgtaacatgattagagtgatcatacattgccgaaaaaatacaattgctctatagatcatggaacatgtaaattctaatattcttactattgtatatggaattgtaatgtggcattagttcctggtttcagttggtacgcaaaaatatcatgcatttggcaaacataacagaacgtgtatccaatttgtacgtacaacaaaaagtttacaggctgatgatggttggatgaagcatagcaaccacaaccatggtgtatggggtttgtggtgtgcaattagttattccacaaaaaaagccacactgtcccaccatcaaccagcatgccacagtgcttccctcttgctctacccttccctttcttttcctttgtaatgagactctggatacaatccaggaaacgctgctgatgcctcatatccttggtgtggtggcttcaaatagcaaagagacaacagtggcttcagcgagcaacatgtgaagaaattatggtggagacagacatattgacacaaaaagcaacggctgtagctacagttcgtgctccctcttcccttcccctactctctgccccttggtgtatagggtcactgatttggccaattcgtgcagttcaggtgtcgttccacagcgatcctaaagtcgcaggcataatgcagttcagttcatgcaattgaacatgtggcctcatggcatgattttggtagctatggaacgaaaattgttcttgtttataactgtaagcctcacacatttagttattattattgctgcatgctttgcttgcttcaaaaaccagtaacccctctacggaaagagtttaagaatattaaagcttattgtgaagagtaaatatgtacctaaaatgatcaattaaattataggttggagatctcatcatccaactatggcagtgatatattcaatagcgcaggcaatctcatgttcatctttactactttaaaagagtgtagtggtgacggtgaatccgagtctacacattaccaaaaactactccatctatccacctcttctacctatgaagctcgaagctaccatgtagctggaaaatatgagatggaataacagaaccaccctttgatccaacatgtagagagtacccagaagttactatgaaactccaacatgtaactggagttgtagatgcacaactacaaaaaaactccagggttactctactatagaaatactctcttgattataattaaatattagaaaattacagtgcactttgaaattagttcttttatgttggttgggagattgttacctttgcagcgcacaggcatttggctagtaactaagttttcacgccaatgaccaatggtaagcaatttggtatgtaactatgtatacattaaattttgcacgttcattcatggagaattgtgccatgagatagtggaagccgtatttttcaggagttaatgacaactgcaggtcccactaacagagttacagaggagatgccagatgtgcagggatcttctctctctgtttttctttttcagaaagggaatccagaacatgggccactgtcaaaacctatttcagttttgattatgtaacagagaaataggctatattccccttttaaactaaaaaaaggtttaatcacatccctcgaattgcatcaagtaatacaactttctaagagtaccacaaaagaaagtcctaattggtgcagtcaactgtcaagtgccaacatattgctcaactgagtcctaagataaataaacagatagcactgaaatggaagcatcccaagcaaatcacaagtatggtataatgttttgaaagcccaaaactcaagatttatgatgaggttttgaacatactggagcatggctttcattgtagtgctcgtccataagctttctggccaccatttctccacagtgttcacacttttgaaggttacgtgcgcagtgtgccgaatgtaagtcaatgtttgacgatggaatttctcgctggctgaaaaagaaagaacacgtaaacaaaactaaaatttgtatctaccatccaacatggcaaatgaagaatgggcatgatgctcatgaaatcagcaccgcaccacatatcataaattgtgttgagctagccttgactaagggtagcaggtagaaaaattctgaaactaaaagctgctgatcccatagcactccaactaatatcatgcatatttttttatgagattagaaacaaacccagaaagtgtaaaagcaagcaaactgtatatcgcattaatacgaagaaatgcatcggaagtgctctggtactaaatatgccaaacgatgatccattattatccatttggtttctgcaaatagcactgggttagtttgatgaaacaatggtctgcaaacccagtgcaagcactatccccagttcccgtaagcgcattaaccaagcataaaatgagctccgttctcctcaaaccaaattggtggtttctaacggaatcagtgctaccttagttcaattgtaagggtatgcagttgcttctgctgagtgctaacaattccagataaaagtcccagcaacaataaattttgctctttatgaaaaaaaaacactcactcgtaattacagcctatgtactttgtttcgtagaccaatgaatagattattcctcaattttttttaggaacacgatactataattgtctgatgaacttcgatccattacattgcaacgatggagaagcctctattctattccgatagcgcaaacgctcatcgaatcgatcggatcctcatcctcagctcagatccactcccacacgagatcaaacaacgaatcagagcagcagcctcacctccccccctccaccgatacgcacacgccacatgacagggaaaagcaacaaacaaacaaacaaacaaacaaaccgagccgagagagggaggtggggcgcggggggggggggggatcg

SEQ ID NO: 10437 - DNA, 43707 bp, Oryza sativa
  unsure (1)..(43707): unsure at all n locations
ccacctcctcctcctcctcccccgcacccgcacntcggcctcctccgccaccaccaccaccaccaccgcaatgccgcacgtggtgcccccatccagagcaccccctccccccgcaaactcggatctcttcaaagcttttccgcctcctcttctctctcctcccacccgggagttttgctccccgcgcggacgccgagctcgcgcgcccgctcgctcgcttcaaccatggcctcccctgctccccccgccacgtgccgcctccagggcgtcccacgtcaccccctcctagctcactttctcctttagccgcagccagccgcagccagcacatgcacacagatgcaccaaatggatccatatgattttacaatgttaaaaaaatcctccctccgttgacgccgttggtttttttaaacatgtttgaccattcgccttactaaaaaaaatttaagtaattattaattctttttctatcatttgattcattgttaaatatacttttatgtatacatatagttttacatatttcacaaaagtttttgaataaaatcaatggtcaaatatgttttaaaaagtcaacggcgttaaacatttagggaaggagagagtatataagaaactatcgccgcaaaacttgagataagagatgtgtctatacctatattaattgcactgcgtatttttccttttgttgcaattttgtaccgttacccctttttaactaaagtggtactccctccgtcccataatacaagggattttgagtttttatttgcactgtttgatcactcgtcttattaaaaaaattagaattattatttattttttttgacttactttattatccaaagtactttaagcacaacttttcattttttatatttgcataaattttttgaataagacgagtagtcaaacaatacaaacaaaaactcaaaatcccttatattatgggacggagaaaatagcatcgtgaggtaatcttcttgattttggaaacatcttaaattttttaagtaacctctgggttgtcgttgtaatcgtgataccaccatcggataacggtaaccccgtcaaaaatagtaaggaaaatcttgctttctactaaggtcctgtttagatcccacgcaaaaattttacactctgtcacatcgaacgtttgaacacctgcatgaagtattaaatattggctaaaaaataactaattatacagattgcgactaatttgcgagacgaatcttttgagcctaattgctccatgatttaacaatgtggtgctacagtcaacatttgctaatgacaaattaattaggcttaataaatttgtctcgcggtttattgacaaattttgtaattagtttttttattagtgcccgaacaccccatgcaacaccctatataatatccgatgtgacacgataaaactttatacccttggatctaaacacaccctaagaataattaagtaccgccaatgtcaaatataaaatggttagagggagtattacaaaaactttaatgttcatctacaggtgtagtgcaacaaatgaaacttaaatagcaaaatttactacatgacacttaaagtttgtaatttttagtttggacactgcaaagatgtgacacactcaaggtcatataaaatagatgatagtaatttgctaaaagacaacgtgaccattattttatcattttcaagccaaatggaggaaaaaaaaacacttagaaaagacgatttatctctcaggccaacaacatgtaacccagctaggtatgtttcacagcagacttcaatttctagatttttggagatggggtcagtggagggaatggggcttgggtctggtttgaactagacccaaccaagttacatgctgctctccggaggggcaaacttgtcttttctatgcattttctgtcttgatttaacccgaaaatgataaaataatagatatggtgtccttccgtaaattatcagttttgggttgtactcgagccatatcatgtttctgcggagtgcaggagcaaagaccagaaacttttggtattctatagaaaaatttgtcaatttatattacattatctataatgtagtgtagaaaaaaaattgagccaccgaaacaatgatcaggtcaaatcatggaacatttcaaacttttaactgtcaaactgtattatttttcccagcaatactcagattttctgtcgttttacctaacaaaatgaatacgcagacagatatgagcagaaaaaaaaaagagaacaaaaccaaggtaatataagtgtattgcacatacacctccaacaaattctttttggctgggccggcaaaagatgccggcttagtttattcagatcttacatatgccttccatgtaatagcagggttgtaattacttttctatttaatatattggatactgttttggaaagaaaattaaaaaaagaaaaacgccagtccagtatattcaaaaaggagagtacaacaacaacgtactacctccgttacaaaatataagacattttggctttgcgatggaagtagtatagttgttccccaccaacaaattctcgcatatagaattttgctacaaacagttcatactctttaaaattgctgattaaacctgctttgagctcacttccccctgctcagaggtcacaacttcacattattatggcctttgaatgatctaacaacctgcagttgaaaccttggacatagctgtttgatctgtctctttcatcgccacagtcaggtacacactgtgcaacttgcttctgtgttttttttggcttgaagcagattgccatcatcacaaacagacctgcaagcagaccaaatgttgatgcccaagctgccaccagtggggtcatctcacaattgcataagctgcctgggattaggcaggtagcacaggcattgtcactgtcaatatatcatcaccagattatattccatctggaaatcaaactgagacagaatgatcatgccccttcaattgcatctcacattctgaacacaccatcagcaaacagttcatcacatcttgccttttgtagcatcaagagagaaattaagagggacgtgatcaatttgttacagaggcactggtagaagaaaggggatgatgactcacaatttggatttaatgtcgcgcaaaatcaagaacagaaaaaaattccttccaatatgtcaaaggttttcagtacatgaaagaatgatctcctcaggcaaaggagcatttacattttacaacctctgactggcttgtgcacccgtggtttacatgtttctatgtgtaattttgaatctgtatgttacatctactcttgtaaatattagtgaactccgtgtatatgtacgtagctactcatatttacaggaaagtcaatcccgattcctggaaggcgaggaaccagcagcctgaatggtgctccagcaactactgataccttctacaaaaacagccgaattccagatgaccagtttggtgcaggcaatcgaatatgcgagcttgtgtagcgccgtgctgtcctgcgctgtgcttgatctttggcctttgcaaagtcctcactttggagctacattttgtcagataaactttcagctctctgctcgatcttcttggaacgcgttgtatatgaaatctctgaagcgcctggaatactgtcttgggtctactgctgagatggatgtcgagtcgtattgaaaagacttgtaagcatgctcgatctttttgccgatatcatagtcttgaagtatgtctattatcccaaaatataatatcacgtcgcagtactgcccggttggctgtccaacgacatcagtgtcattctttctgattgtcagttcagcccttgacagcatgtttgccccaagtttaatcttcgaccacctgaagtcagatttgttgaattactttataatgtagcattttcaaatatacatagggcataaaaaattccatttggacaattgcaatgaacagttgcaccatctgtttgatacttggaggatttacatttcttggcatttacataacaaatacaatttaccaagaaattacagaaagtgagataatatacctaaaatactttctactccggagaatgaatacccccaacagaatactacagtgaacttgtatatttaaaatggataagcagaaggttacctaaagccttttcataacaaaattactggtaaaaatcattagttaccaaactaagacggctatagcatgaatcaaactatcaatgagtagggttctccactacatacatactaactaaatgattttgaacgaggaaaactaactaaaactaggattgcagtatagctgagagaggaataatttagtactccatatctcggttacctgtttgggtcagaaagaaagtgatccctgtcccatcttgaaaggcgtggtgatgcaggtatgtcaccatcaatatcaacggcacctttttaaccaaggtaaataagtcagccttaagattgtgcaaactattgtcagaagcacactttcttacctctaaaatgtacacccactaaaagactgtaatccatgatcttctcatgctcaagaaattcacagtccttgtctacttgcctgcttcaaaatatttaaaaattcattagcacaagggatagatagcatggttatacagaaattaggcactaaggtgtatgggtatcacttagcacctttggaactcttggaaccattgtttttgcaaccgaaagatgaaattaagatcaagatctttcagagttgtatactcatcaatttctgccagtggcttgttagttgtacggccaagagatgatcctttcagatcaaatcgcctatgaatagtgtgatcagagcagaaaagatttcccattatgacgaaacgaacctaggtagtagtacagcagcaaacaatcaggcatattatgcttgaaaaatagcatattcatgagggcggagtggataatcatatattgttctaaccttcttctgatttgctccagccaactttacacaatgtaggccaaaaaactttgtcaccagggtatcctcgaatgcccgaacatgattgtagtaagctggaagcatcttcagaagcatctgtgtggcaaagtttgtccatgtattcagaatagaacttctaaatatagaagcttaaatggtgctatttgaacaaagacagcaaaggacaacctttacttcagatttcttcattgtctttatcatgtagcggtcgtcatttgtcaagtaaaagaagcttccacttttaccaggggacgagagttcacggagagcatcatctccacaaagggatagcatatagtcagctggatcaaccttaaacagcttgcgcaatgtcctgtgattttgtaaagaacaaatgtgcatgttgacatggatgaagccataaaacagtcactaatctataatgtatctatcatgggagtgataaccaaccggaacacctttgggcagtaatccttccatctgaaatcagaagaattgtgtggaggggtgtattttgagccttctggagggaatttagtccatactttttcttttgcgtcaaatgctgatgacttcaggtctaatataacctggccttgccttcctactgcatgcctatgtacaataagcatactcagtgataataagttactttctgagcttacaaagaaatatggcaatcttactgtcgaataattacatcttctcaaaagatatggaagtgctacaagttctgaaaaaacaataacaatcttggtttctaaagtaaaatatgttgtaaacacaaagattggtaatggagaaaattcaatgataatccttacatgattaatcgttgataatgaactataagaatttcattttataactttgtaagagtactgtctatggagtctatgatatatgatttcattttcaggatttcaaactactgatagaaggactagtgaggcagtgttaagatgataagaatgccataagagtccacaaaaatgcctcagccaagtcatcgaattgtgctcaaatcattactactttacatgcaaggcctcggattctttcttgatgtccacactaccaacgcatatgaattttgtcgctgaaaatgtttgtccattctagataaatgcttcaatgcacacccctaatatttcgcccaaaattcccatttcgttgtttaccgacgagatgacaacatgattgttcatgcgagatttcctaatttcacatttttaaattcctcgcatggaaacaaattgaagtattgcgagtgcaatcaaagagacagaaaatcgcgggaaagaaacacacgcacctgatcccgagctgcaggttgagcatgagctcgtagttcttgtggcccttggcgatggtcaccccctgccgcttcatcacccgcggcggcgccgcccccttgtcgacgtgcggcggcggcggcggcgccgccagcgaaggcggcggcggtcccctcccctccctgacgctgctccggcgcctccagtcgtcggcaatgtcgggcttgacctcgccgtcggagccccagaggtgcggcacgcccaccacggagccgatgctccggcccgacgacgagctcccgcggccgctgatcgaccgcgccagccacctcagcgaacgcagcgacggcagcgccgactgcccttccgtgctggagcggacgcactcggggagctcccgcgcgaacacctccctggggtcgcgggactcgcccgccgccgccggggacgggtagtagacgcccttctggtggacggcgccgccgggggcctcgcggccccagaagccgacgtagaggctgccgtcggaccagcggaaggtgccctggccgcgggggcggccgccctcccacccgccgtcgtagcggttgccgttggcccagacgagggcgccgcggccgtggatgaggcccgcgcgccagccgccggcgtactcggtgccgtcgcgccacgcgtagcggccgcagccctccgggaggcccgcgcgccactcgccgtcgtagcagtcgccgttggcgtagcgcttctcgccggcgccgtgctcgaggttcttggcccaggcgccgcggtaggtgtcccccgcggcgcccacgtaggcgccggcgccgtgcatgaagccgtcgaggaactccccctcgtaggtggcgcccgacggccacgagaacctcccccgcccggtcgccttcccccgccgccactccccctcgtacatgcacccgtccgcccacaggtacttcccggcgccgtgcggcgagccgccgcgccactgccccgtgtacaggtccccattggggagcacccgctccgcgcgctgctgctcattcccctgcgcctgcgcctgcgcctcgccttcgtcggcaccgctgcaggacgacgccgtgtcggcgtcctcgccggggggcatcggtgacacgcgtcctcctcctcctcctcctctccctcgcccacgccgttcgtgctcgcgcattggtcgcgtcgcctcgagccccacggcgaggccgcccgcgcgcgcgcgcggcgaacgtgggatctagcagcggcgccggctgctgctgccgccgcgcgcccgcgcgcgccgcggcggcattgtctcgggagtcggtgggtggagaggaggcgccagggtgggatgataattttctctcctttttttttttcagaccattcccaattccgaaggcttggggagagggagtggacgaggagaggagggccacaacaacgtgcaaagacgtgtgttttttctattattttttctcatgttctatttcttcattttgaataatatcaatatggagtacttctacttgttatattttcagatctacttggtttgactcagacaagttttgggagtacgcgtagaacattcgatagttttgtagaagaaaaacttacaaatgtaactagtatataatcacaatgcaactagtatgtaactaacacgtaacgtgatttttttttccaaaaacacccagcatcataagtggctagggcagtggacttgcaaagcagcaagtcaaggattcgattctctattcgcgcatgcacaattattatatttatctcggtagcatgaatcttaaagaacatttgacggtggaaaataaatgtgtcgaaagtttttaacaaaacctaagtcagatatattttggtatactcgggccttgtttggatccaaaaatttttgcctaaaaacgtgaaaagaaaccaattgcacagtttgcatgtaaattgtgagacgaatcttttgagcctaattatgttatgatttgacaatgtgatgctacagtaaataattactaatgatggattaattaggcttaataaattcatcgagcagtttacaggcgaaatctgtaatttgttttgttattaatttacgtttaatactttaaatgtacgtccatatacttcaaaaattttacacccaaaaaactaaacacaccctcggatattatttccaagttcatgcataaataatgacacctgtaaaattgatgcatgtgtctgaagaggatggctaaattagtgcaatttaggtgaaattggagtaagccacttggacaggaaaatgaaaaatagggtaaggagtaattaaggtggggcagaaaaggaaatatcaaatatggggcataaatagatgtatctaattttctaagagaaaaattagcaagagaaatagttgaattgttgcgttgacacgtttattaagccaactcaatcaaatattccatccaagatcttctctgttttttttttatttttcgtttgcttcaatcaattctcacacagctatgtgtacagtacatgtgtctgtatacaagggacagtgtgtatgattatttaatatgcattattgagttgcacatgactctttttgcatgtatgtttagacttttgatgaacgtaaagtcatgggatctacaccaaaatccaaattagtggcgtgtatgaataagaacggaatgtgtatcacccacaatctggggcaaaatttttctggtcttcctctccaccggggaaagtgaatgatcgattgatcgggtactggataatatcagactaatatacttttaatgtacaaccttagactgtttttctttcgaaaaacagattataagtatttaaaagtatacttacactatcaaagttctttgcacgttaaatatatataactacatatactacttgcgttcatcaaaatgtactaatttaaaagttttttttaaagtggacgaagatgagactgataccagaataggtaggagcccatggcgatatgttttttcttcctctgtaaatctttcggtttctttatcttaactcgacaaaatcaacttcttttgggaggctgatacatatttttttcactaaacaataatgtttacttcatctatctcaaaatataactatttataagtgttaaaattatcttaaaataaaactatttctccatgtacctctcttatttaatttcctcatatactttctcgtatcaatcgatcacaaccatctctaacgtctaacattaatctcttaaaaaggcacacttagttgtactttgagaccaactctccaaatgtccaaatgcattgcttgtaattaatgcctgaattccataggactctattatgcatgaaatcatatttctatatttttcatgttcatgcgtttttaaaatcttactacgttctaaaagagctaacactaaaacgatgagggagggggtgctctcttctccgctcctaaagaggagtccccgtatggttaccgtgttacatgtctaattcacttatctattttttctttgtccttaatttgaagtacaatagtagaaaccgtggaaacaactacaatagttttcttttttttattattttcttacctcgtaaggaaaaacgatttagttttgaaattttatagcgtcgttttattacccctgctggtagaggattatgggtgcatataacttctattgaaatgttcgtaacttgtacacgcgtgcaaaagaaatttactgagatcaaggaatcatcattggtttcagactgaatcaaagaatttatttaggaatttcatatgattcaagtcctataaaaaattttcctatttgaccttttaatttaaaagattgaagcttttcaaatcttatgaaattcctatggaatggcacattccatgtggattttgaaggaaacttaacaagagctccaacctcttgttttacatttcaattcctattaaaattctttgttttttcaaccctgtgattcaaaggggcccaagcatatgttaataagtgtatctgttgatgtatactgcgtttggcagctggagaaagggagagagcttgtttcgttttccgcgcgcacgcttcccaaactactaaacgttgtgttttttgcaaaaattttctataggaaagttgctttaagaaattatattaatctatttttaaaatttaaaataattaatactcaattaatcatacgctaatagctcacctcgttttacgtatcttcccaatcttttcaatccccttctcctcgttaagtatggtgtgacctatgtttctttgagcatgttttgaagtggacgtattttcgaatatgtgagagtggtgcatgttcaacgccttccgtgtaatttcaacggaacaatagtaccatcccatactgccatacattcgaccgtgtaattccaacaaaaataataatatcaccccatacattagaactttttttttcaaacaaaaattgaaaagtggcttctactacgtactgcgcgccactagtggtcaagatttccggtgggagcgcaccatcatcaattcgacggttcgggcgtctccttctcctctccccacccctctcctccgtctccgttacccaaccccaactctccccaagcaaacgaagacgacgacgacgacgacgaccgcgccaccgtggccgcgcgcgatggtggatggataggaattgttcagggagatcgaggaacagcgcgcgctgcccccgcgtcgggctacacgcggcggcggacggcgtggggctcctctctcgatcgctttcgccggccgaccggccggcttggcccttctgctcctgccctgcctccccactaattaatccgcgttcccccctccctcttaattgatccgtcgatttctcggtacgtactatagcatgtatgaattctgatcgagatcgggatgactgggaggatgcagtgcattagtgcaaccaaacctactggaattaattgatggaaacgctactcactctactctcgatctctgttttttttttaaacactgttacagttctgctatccctttgttttcttttggtacaagcttttctagatcactaattttggctaattggcataactaagggcgtgtttggttatttgtatcactctagccggactcatctccctcatataggttaactggctaagtttgcccaggctgaggatatacatatgcacttgtttggctgctagcataagatgagtcagactacggttagatgttttggttggttgtattgaatatactggacgtgtaagattttgtttggttgattgcgtggactttgagtgtggttacctctttatttagtggtagagtgaagttaccactgcaatatcgtatataaaataaaatcatattaattagtatctgatttgacaagttgtattaatttgtataacatnnnnnnnnnnnnnnnnnnnnnnnnnnnnaaatcactgtagaaactgcgattatctctatattaataagctcaactttgtttgacagtatattggtgtaaaaaaagagaaaaagtaaaacaagatggaggagaacggtgtcctcgtcgtagtcaacgacgggcgtccgccgctcaccagccattggaaacgccacatccggtggccacgagttcgccaccgccggatctagtggcggcgagctcgtggccgccgaatccggtggtcctgtggcagaagatggttgctgacgacggcgagaaagaagtggaggcagcagcagcggcaaggaaggagcggaggtagcggcggtggcaatggagaggtgagaagcgttggcagtagcggagcggtggcgctcttctcgccggatttggcggcgggcttcgagtggccatatccggcatcggggagcttgtggctgacggagctggcgaggcgagtggcgatgtcgatgacgacagccgtgcgcggggtggaggcgaatgacggtggccgtgcgcggcgtggaggcgacgacggcggccttgcgccgtgcagaggcgatgacgactcggaaggtactgagcgggtaaatggtggaaaagaggtgatgagatgcgcgattccctctcgcctcctgcacgcacgtgaccccgttctacacgcgctcgtccccgtgcctgcacgcgctccactccgacgaggagggaagctcgattcgggcgtttccctttggcctggttgggaaggtgattttgtatgcgatgagccaagccctggaggctatggcaggtatccaaacatccctccactgcacgcgcggatgcgagccatgcaacatgcaggtaaccaaacgagccccaaatgaatccatacttgctgaaatgagaaggcctgaaacttcttaagttagtccctgatatttattgggacattttatataacattcgatagaaacccgcttaaaactctgttaaatgtaactataatacgactgcaatgtaattacaacgtataattaacttgtaattataatgtaaatagaatatatataagtgacttacattatgaaacggaggaagtaactattaaggacatgtttggtagtactctaacttctaaatttaactttaaaaattaggtctagagtaaagttgtgaaactatataaatttagctatatatctagtttactttaggagaacactctaatcaaattcactttttctggttgagcgaaaagatggagctaaaggtgaagccatgccagacgggctccacgctagctcagctgctcagtcagcatagatggaaaatgtctaatgcagtagaaccgaaccaactaaatacaaagatatgataattaacagcacttaagagttactccatccgctccataatgtaagactttctaacattatccatatttatataaatgttaatgaatctaaacatacatatatgtctaaattcattaatatttatatgaatgtgggtaatactagaaagtcttacattatgaaatggaggaagtattatactaagatcatacaagatcacagtagacagtagcttattgagaccctgtttagatgagataactttttaagtccctatcacatcggatgtttggacactaattataaatattaaacgtagactattaataaaacccttctataatcttggactaattcgcgagacgaatttattaagcctaattaatctatgattagtctatgtgatactgcaataaacattatctaattatgaattaattaggcttaaaaaatttacctcgcgaattagctttcatttatgtaattagttttataaatagtctatatttaatactctaaattagtgtcagagaataaattaagttactgaatccaagtaccacctgacttaactacggtctacggctaattgcatgcagtctataatcgagccccgttgtggctgtccatttccaagatccatccactgtctccgtgttgtccccgttatagtgtcggcctgtcagacaaggacaccggctagttagtagtacaattaagctgacactgcgctgccgtgtcaccattacttggctggtcgtatgggccccaccttattcctaggtgatcctgatgggccctgatattctgcatggcctgcatcttcccggcccacctctatagctgatttcgtatttgctttactccctccatcctaaaaaataatcaatcttgaagggagtactatacgcatgtgtattagcgtatgcattgtctctccttcctctcagtgtcctgcggcaaagtgtcaccaattaagtgattaattaaatcaccctgttgccataaatcgtgctggcaactttttgatctgaggatcaatgtagcgcgtaagcatgtaaacatgcccttactagtagtacaagcctgaagtgcctcaatggataagtaaatatggccccttacaagtacagacaacgaaaataacggaattattcttttattatattatcgtggtagaattaatttagtactatctccctccgagaaggagttaatttatactagcaatttcaaaacaaactaagtatagaggaaaaaactaaagtatcatcattaatacgagcattgttagatgggtaggtaagtagaattgaagggataaaactaaataagtacttttcgatttgtgaactaggatatatgtaaggggctagagatcaagtgtttttgggacaaagggtgtgcttgttgacggggtatgcccgataatggtattttatggtacggctgatacgaatgtatgcacgagtttggaataaagagataaggacaatggtttttatattggtttagactcctgagaaggtgaatatatatacatttgagatgtatcacaccgagtacaaaggtggagcaagctagctattctaacatatcaaactaatctcgatgagcaaggtgcccggttgtagtccacggttagcagaaaagcggtgggctacacatgctggtcggaatcactgtgagggatgtcggtcttgggcaacaatggttatcggggaagcggcgtccaaaggagtcccattaggcaattggtgcggggcaggccagtccaacgaccatggcaaggagtgccatggctgagatggttattgcatgactgcatgctatccatcgtgtccagcgggacgacttcggtcctgatgatgatgaagacaatggtactgaatcccaccatacagcattggttcgaagacctcatgcattactttggccattgtcttaatagtgctaagggtccaccaaagggcaaatcagtggcgacgactaatgagggagggagatcggtagatcgaggcggcggcgttgtagggagaatcggagtaccaattggctcggcttttctgcttgtggttctggttctgggagccacgcccacaagtgaagcacgagttgagccaagcgaggcacagttgtggataccggccagcgtgaggtacgcttggagtcacgaccatcgtatgggcaaaattgctatttagtgatcagccacgcgcgtcccaatcacgttttaggcctgctttttttctgggttgttgagccccctgacattccaatttaagatttttaagccatccatcatttctgaaacaacatgtatctcctatgcatgatcacaagaacatcgaacattctccaatggcaattcattaaaacaagagataccaccttacacaatacatatggggtggtgtagttccttacaattttcccaaaataactactcctgtcgtgcacgaaccatcatgaactactaaagcctagctgaagactaggcatcattggacatgctaagcatccaaacatcaacaccgacagcactaatatctggtagggggtatgtaggaccataaacgatacagagagtcaagggtacattagcactaagcagggagccgccacattcgaatgcaagcaagaaaatcagaccactctggctgcgtgccatcggtctcccctgccacatcaggtggcagaggcgtgcctccatccatcctggcgagtgcccgattcccttcaccacaaccatcggcagaggagcctcaaagtgcttgatgtactgatcagcaaccacatcattgcccaccagctctccttgttgcaaaatccccatatccttgatgatacggacttgagctcgcagtgaaaccgggaccgaagataccccccttcgagactcttggtctagcagcttgctaccagaaccttcttgcactctctttagcaccgaagcgacgacgtcgctaccacgagcaatgactgcagtgtagcgaacaacactaggtcctcttgggccgtacctatgcctccacgggaaccccgacttgcccaagcatgataagcccaagcggcccatcaggcgacaagaatggcccatcaaacgacccatccaagaaggtgagacctagggcatacgcaggcatctccctcattgatagcacaacagtagccgttgccagctccagaagcatcgggtcgtcgtctcgtgccggcctcctcgtcgtgtccacgtcagagcagcacagggctgggtcaaccctgactggcgttggcgcgatgcagctgatcggcgttggcatgatctggggaaggatgcccgaggctagggaggcatgcttatggagcaggcctttgtcgttttcccctccacaattacaattggatttgggcgaaacagacaatttgggcctaatttttgggggattgggggagggggggtgggtctccgagccaaattctggggtagtctcgagcccaccgagactaccccttggctacgcccctgtattattgcgcagcgtcattcatgccattgcaattgaacatggcatgctactacatactactccctccgtcccaaaaaaatataaaaacttaggatcaaatggaacattttctaatactacgaactacgaatctgtacataatgttctatatggttttagatttttatattaattatattctgagatgatgggagtagctaggtgcggcctgttaggttgcaccattgctagctacccacctcccacccactaagtcctccccctccacccacctctcccttcactccctcacctcactacctctcctcacctcctccatccagtcgggcatcaatagtaggcggaggcggcgcccctctcctctcctcccctccctcctagatccgactggaggaggagagggcggcggccacagcaaccggcggcgcataggcagcgctcccctcctccctctctccccgctcctagaaccggccggaggaggaaagcggtggcggtgcccctctcctctcctcccctccctcctagatccgactggaggaggagagggccgcagccacagcaaccggcggcacgtaggcagcgctcccctcctccctctctccccgctcctagaaccggccggaggaggaaagcggtgccggtggcagtggcggtggagatggaggctagctgcactcccctccctctctcctagatttggccggaggagcaacgacgcaggcccctcccctccctcccagatccgaccggaagaggggagccgtcagcgacggtggaggcgatgctccccctcccctcccccctccctccctcccgcacagatttggctgaaagagggaagccgacggtggcggcggagtcggctctcccctccttcccagatccaaccggaggaggggagccagggagccggccggcggtagcggcagaggcaacgctcccatcgggtggtggcggcggatggaggaaaagagccggaggtcagagggggagggcagcagcgggggacggagaaggagaaccggtggctggaggggggaagggtggcagcgggggattctttttgttccgtgagattgttttttgcaggcgagtggatgtagcagcctacgaaagtgactttttgcaggcggggataacgatcggatgcaaaaatcgtctatttttgcaggttttgaagtgcaagcggggctaatggccgcctataaaaatctttttttcccgtctgaaagaaatcagtcttctagtagggaaatatgggttgattttttttaagacaaatggcctatggtcaggccggtcataaaatatcggatcgatgtccggtactcgatcaggttaatgcacgcacgtactacctccgtctcaaaatgtagctatttctagcacagtactttatcctaaaatgaagctatttttctacctaccttctcctctcaaccaatcacatccattctttttcacctactttctcttttcaaccaatcacacaccttcttcaattattctcacctactttcttaatacctatgccaatctcaaaaatccttacattttgggacggaggaacggaggaagtaagccgtaaggtacgggttcggctgatacactagtagcgccgcccatcgtcgtcgttgctgtaccatgtcaacacgcgcatgcagtgaagtcgtactgaagtacgtggatcggcgtgacggccgggcggctttcatgcgtgccgttgcctcatgggctatacattacccggaccaaaacgtctctttccttgtgggctagctaagctcctcccggcccatcggtcggacgtcgcagcccatcgaatcgaggctcaatttcatcgtctcgtgcactgcacacccgtgatggcaattggcagcagaaaccaccatgcatgcatgacccaaccaccgtgcaccaacgcctccccgcccacccgcccgcccacgcacaaaacacccgagagagtccacgcgcgctcgtacaaatcccccatcccctcctcgccgctcgcgccacgccgcggcctgtacaaaaggcgccgccagtatcgtctcgtccccccacgcgcgcgcgcgcgcgtgcacaacgatcgacttcgaacgccgcgccgcggccgcaccgatcgatcgatggcgccggcatcgacgacggcgacggcgacgtctgccgcggcggccgccagagccatctgcgtgctgctgctgctgctggtagcggtcgtcgtggtggcggggcaggcgccagagccggagggcgacgatcaggccgcggcgatcgaccaggcgggtggcggcggcggcggcggcggcaacaacaacggcacggccggccgcgcgagaggcggcggcggcaacaacaacggcaccgggcgcgcgagggacggcggcggcgaccgcgaccgtggcgcagacggaggcggaggcgggcggagcaagctggcgagcagcatcgactgccagatctgcgaggcgacgtgccgggtgaagtgcctcgtcaacagcctcttccagtggggcggatgctaccagcgctgcaggtccgacaactgcaacgactggtgcaccagaggctaacgtaacctagctgatgaacggatccatccttcggatcggacggcttgcgatcgtttagccctcgatctgacggttacagctgcagtactaatttttttggacaaagatgatggtatataccagcttgttttttttttcaaaagatagaaaatggtattacttatgtgctcaggatagatccagcatgggtgtgccagagggacttgagtcctccgtgcccactagatcatcattgataaaaggagagagagtcgaaagaaaaagagagataggaggaagagtaggggttgaaggaggagatgaatttcctctctagttttattctagattcgcccctgatactcataatgttggaattaatgaatgggccttagcccactagaagattaattctttggaaatcacaaaagcccacctcatggaatggcatgcatgtggagtttagtaccaccctgcttattctaggagagggggacctccttaaaagggatgatgcccttctagccacttgaagcatgtgtggtggagagaagagggggaacacacgcgcgcgctcgctcgcctggcctggtaggcgcgcgtgcacgacgtacgcgtcgaatggtccgccaaaattggttcctcgccttgcgcagatgcagcctccttttgcagttttattttgctgcaaattcggattcgtttttgttttggaaacgttccgaaaaatccggtgcgtgcaaacggcgtggagtccggataagttacgcgcgacttatccggttcggttacgcgcagtggagatcatgcgggcgccctgatcaagcgacccttctctatataaaccgacccgccgtcttcacgcaacacacgcgaaatcaatctagggtttgcctcctactctgtgctgcgccgtcgctcgtagattactccatcccgctcgccgacgtgcacctacgatcgggagagtagatctccggaacctctgccttcgacgtcctgcaccgggagaaggcggcaataaagttttttgggaagcgctttgcgcgactgctccctgttcgtccgcgacggcttgtcttcctcttcgctcgcgtgctgcgtgccttcatagatgcctgcgaaaagtttcgaccgagcagccggtctttccgccacctcgatacgtgttcaatatgttgcgcatatttgatctgttcatgttatactgtgtagtttacatgtgtagatctaatgatgcgttcatgctagttttcatctgtaatatcatgatttatttatggaatagattaaatcattatatgcctataatctcaacacataacgtacgtaaactcacccctataaatatatacacatacttctatccttatccaatatatggtaatctcgttaaatgaaaattaaacggtgtgttaattagttgtccgacccagtactagacgagtaaataactgcgtaatttgcatggcagaaccgtgcttagaccaactactcaaattaattaacaagctcaggttgtgcataaatacagacggtggccgttgaacaaggtacagaggtagatgtggttaccggtgtcgcaaggactaaatgcttcatgtttgtctatttaattattggttcctgtacctatctcgtcagacttttcaaagactatacgaataaaaccaccagcatgatctaaattatgaattcatatacatatccggattgaatttaacaggcactccaaagtctaaagatgacgactcactgtttgaatctaacatcttaatttagatcatgccaaaacaaagatcttaagttagctatttaaatatactctttaattagttagtctatagggatggatggatatgatcatagatgctgcgatatagagtagttgtcactgtactttaagtaattgacttgacctatgtagctagctcatccggatggattattatttgtttatatatgtaaatcatactagtatttgccacgagattttctactctcggactagtccatatatatatatatatatatatatatatatatatatatatatatttgcacgttttttctcggcgtcatgcatgcatgaaacggagtttggcgtttttcttcgccttttccgagggccgacttggtgtccacatcagcaatcacatgtcctgaaaagaaaaacaaatagagtactcagtcgtcactgcagtctctgtagtatggacatgatattgaagcgtgggtacacagaatttttttaaaaagcaatatgattttaatggaaaatcgcaaaactataggtcagttaggcaaaatcgcaagtttagcaccctatcgaacaaccgcggttcgacagggatacctatcgaacaaccacagttcgacaggtacatgtcgaactacgtgagttcgacagggtaggtggtccaaaaacaaataaaaaattacatgaacagtatcactacaatactaggcagggacatatcgaacagccaaagttcgatagggttgcgtgaacagcgcgctacagtgatgctacagtgctcgcaggcacatatcgaactgccatagttcgatagggtattgtgaacagtgtgcaacagtgatttttctctttttttaattattttaatcacctgtcgaactaccgtagttcgacaggtaccctatcgaactgtggttgttcgataggtaccttgtcgaaccacggttgttcgatagggtgctaaacttgcgatttcgcctaactgacctatagttttgcgattttccattaaaatcatattacttttaaaaaaaattctgggtacacacatctagtctgagctccacctctccacacaaaaaagtattatctattaacacatgattaattaaatattaattaaaaattaaaaataaattaatatgcttattaaaacaaatattttttagaaaacttaaaaaagatcatttagcaggttaaaagtgtgcaagaaaaaaaaaagagagatgtgagctagaaatgaaggggaagaacatagccgtagacactccttaacttcaagctggctgcttagagaaaggatacgatgacaatgtccaaaatatgtttcagtaaactacatcagcatgatatatttatttatatacatcgaaaataactactgtactaattacctcgtgagcgtatatgacattgttgattattattttacttcctccgtttcaggttataagacgttttaactttggttaaagttaaactgtttttaagtttgactaagtttatagacaaatatagtaatatttataatactaaattcagtgacggacgtagctttaaaatatagatggggcggagaacggagatgttcactcgataagagcattcgaacacaacagatatcatattaatagttcattcgcataactccctcaatttgttgggtgttcacaccttgttatatctaaatttgatggcccataactactataagggggtaaggggggtcttgagggttgacccaccccacctaatgagtagatccgcctgacggagcgtggggctcctcaccgggagaccgcgcaggcccccctttgccgattcggccgggggccctgggtgagattctaagctcctagtctgtggaaagttcgcgagaatggaaaaagcacaagacacgggcgatgtatacaggttcgggccgctgagaagcgtaataccctactcctgtgttctggtggatctgtgtatgaagaagctacaaagagctggagagccagagagctcttattctaaaaaccctcttctcctttttttttctctcgtgggatctcctctctagatcctccccccttccaacccccctcttaagtgggcaaggtcctccttttatatctcaaggggataccacatgcaccacttctccctctctctctttttgggtgggggcccatcctatctatagtaaaacttggcttgccttctcttggaagctgaaacactgcctgtttttgagtgtggccacgcgtcctcgttcgtctgacctcggggatcaccctgtcatctcttcataaatgggcggagatttgcaacggctgctgcccgagtgacccttctgatgggacggcccatacctacctccactccgccggaagcaggtgcaacgtgggaacacggttgtcttccggcaacataaccagtgtcagaccagtcacagaccggtcacctttgtccaccacgtgtcagtttagcaatctgcatgttcgcccttcttcatacaacgtcttgcttataatggttgggataaagcctggcatatatctgaccaggaccaacgtgccatctccaggagctagcacgctggctccggctagggacgagtgcctagagactctcatcctgacgggacggggcgaggcgtgtgtcagatcgcctgttgcctcctaacccgcaatctgaccgatctgtgaccggtcacagaccggataaacgagcgtgccatactgcgctacatgtggcgtgacgcgctcgtccaaaccgcaataaatgcggttaggtgagccccgctatgctcacctaccccatatacgcggcgcaaaacccacaaggggtcggggcgcctcggccctcggggccgagacgggagcggtccgacccctcggggagacaaagagaagggcggccgtatcaccctcgggcccgacccccccgagggggttaggccacgtgggtgatcgtgtctgcctcaagtctctaagtcatgatactcccggtcccatgtcaccgacagtagcccccggcgttatgccagggcgattgccctcctcgagggaagcggtcgggcgtgacgccacttcctaaggcctggtgacaggtggggccggtctaaaaatcgggacaagccggttcgtttttcctggagatatggtgatggcgctttggtcggcgagcgtaattaacgcgcgcacgatatgttccatctcgactgccacagccgcatatccacctcatgcaccgcaaacgggcgaatgggattagtggaagcgtgggcgcgagaaacgagggggcaagatagtgggcgcgagaaacgaggagccgggcacagcgttggcaagggtataaagtcgccgaggaagagatttgcttccttcctctcgccattattccccttgtcttcgccgcttgcgccctaactccttgtttcctgtgtcctaccttcgccacacgcgctcgctctcaaacatctcttcttccggcgtcatggcacggggctccgctccgcttgacggtagcgtgctgccgccttcccgcatcgtgagcgagagacaggccgggctgccgcgccgcttcatgccagaatctgccaccggccgggagatagtctcactgggcgagggatgccctgcgccacgctacccggggcggtccgtcttcttcctcccttttgctatggcagggctggttccgccattttcttctttcttcatggatgttctggagttttacgatctccagatggcgcacctcacccccaacgcggtaatgacattggccatcttcgcgcacctgtgcgagatgttcatcggggtgcgcccatcccttcggctgttccggtggttcttcaccgtacagccggtgtcgccgccgtcggtggttggtggttgctacttccagccgcgggggccggtgctgaaccgctacattccctgcgtcctccgcaagaagtgggatgactggaagagcgactggttctacacccccctcgccgacgaagcgcgcctccgacttccgagccagcctccagcgcaggcctccaactggcgggcgccggtagatctgggagatggctacgacgccgtcctcgaccgcctggcgggcctgcgatcccaggggctcacaggggccatggtgttcggcgactatcttcgtcgccggatcgcgccactccagcggcgcgcccggggcgcctgggagtacaccgggtccgaggactgtatgaggacccaccggggggtcaaatgggactgggtccccgaagacttcaaggtaatgatccaacgggtgctgaatctcagctccgcggaggcatccctcatcccccaaggagtcctccccctctgcagcgatccagatcgcgccaacatcctgtccatcataatggcggcggggcctcagaggaacgagctcctaagggccatgacggtgcgagcgggagccacaagggagatcaatctaccccaggagggggttgtgcttccgggccccgtgatgggggctcggggggcagccgccctgccgacgcccgagggaagaggaagcaagagggtacttcctccccatctcctccccgagggggcggggcggcgcgtgtcagcagcaggcgcccggagggggccgcgccgacgccgcagcccgagggggagcggaagaagaaacggctccgcaagatgggggggacagaaccatcccggggaaacctcatttcccctccaaggtggtcgtttaaccgaccccctcgcaggttcgtcccacgcccattgtggctgtattcattcttccaacacaagttttcattcacccatcttgtttgtcttctggcttttcttctgcttcagcgagatcccgtcgcgtccttcttgccaattcaagtccggccaatctgaggccgagaatgcggcgaccacggaggctcggaggcgggaatctgaccggcgagaagccgcggatcgcctacgggaagccgaggaggccgcccaggtggccgtccgaactcgccaagctgaagaagccgctcgggaggaggccagacttcgccaggccgaggcggcgacgacttccgaggcagctcgcgacgaggccgcgggcgcatcgcttgggcccactccctcgggcgacgctcaggacaagccaggtccgggggacatccctgaatccggcacgtccatcggcgggccgagccgcgcgacatcctcaccgaggcggctctcccccacgccttccgctgccccactgagcgcagagcctcttctgcaggccttggccgtcgctaacaccacggtgttggacgggttaagtgcccagatggaggccttgcaagcagagcgggtggagctcgacgccgcatgggcacgtgtcgaagaggggcgtcgctcggtggaggccatggtggaggtgggccgcaaggcacaccgccggcacgtctcagagctcgaagcccgtcggaagatgctgggggagatcgccagggaggtggaggaggagaggggggctgccctcatcgccactaccgtgatgaacgaggcgcaggacgacctccgccttcaatacgggagctgggaggcggagctagggaagaagctcgacgccgcccggggggtccttgacgctgccgctgcccgagaacggcgggcggcggagaccgaggtggcatcccggcggcgcgaagaaacccttgaggcccgtgccatggcgctggaatagcgtgcctgcgtcgtggagagggacctggcggaccgcgaggccgccgttgctattcgggaggtcacactggcggtgcacgaagccgcctgtgccgaagaagagtccgcactccgcctccgcgaggatacgctcaccgagcgggagcgagccctcgaggaggccgaggccgcagcacagaggctagcggagagcgcgtccctccgcgaagctgcgcaagaggaacaagcgcgtcgcaatctggaaagtgcccgcgccgagagggccgcactgaaccagcgggccgctgaactcgaggcgcaggcaaggaagctggatgcaagggcgcgtagcggcggggcggccacgggcgacagcgacttagccgcccgcctcgcagctgccgaacacaccatcgcggatctgcagggcgcgctggattcgtccaccggggaggtcgaggcccttcgcctggcaggcgagatagggcccagcatgcttcgcgacgccgtgtcccgtttagaccgcgccgggcggcaggcgagtctctggggcgggcggactgtgaagtacgccgccaaccaagggggcctcgcccagcgcctctcggagatggccgggactctccagcggctccccgaggagctcgaggggacgattaagtcatcctcgagggacctcgcccgaggagcggtggagctcgtactggcgagttaccaggccagggaccccgacttctccccatggacggcgctggacgagttccctcccgggaccgaggacggcgcgcgcgcgcaggtccgggatgccgccgaccatatcgtccacagcttcgagggttcggcccctcggctcgcgttcgccctcaactccgacgaggagggcgatgacggcggtgtgggcgacagtggcgacgaggctggcgacccgggtgcatcggagtgagcccccaggcccccgccaatcctcagttttttcttcttttctttcttccaaggccttcgggcctcctttttgtatagattaacttaatctgcaatcaaaataaagaaatttatgtgtcaatttcattttgctatgtgtatgagatgaggatgatctgtgccgtggtccttttatgtcttaacttgattaagggctcgtgcccaggtcccagtcctcaaaaggcgcgggtcggggctagtgcctggggagatccacgtgtcgagactggccaggccgggagcgtggtgaccgagggttatgggtgacccgattgtgggtttttgccgattcccccccggagttcaccacgccccggggcacggctcggttctgggccccttttgacgattttagccgacccgagcccccgagggcaggattgagcacaagtgacctatttcaagtcaagattcttcaaaaggaaacaacagcacagatacagcctttaggaaatcgaaaatgcttttattgaaatacagatagaagaaaaaatatgcatatgtggtagcccccggccaaccctgcacgcctgaagggggtgcggggttggcccgagcccgaaacctgacacccgaactccattaggggtagaagcgacgaaggtgttcgatgttccacgggttaggcagctctgtgccgtcgcccgtggccagccgaacggagcccggccgggggacgccgatcactcgatacggaccctcccacattggtgagagcttgctcaatccagcacgcgtttggacgcggcgtaggacgaggtcgtcgacgcagagtgatcgtgcccggacgtggcgctgatggtagcgccgcaggctctgctggtagcgtgcggctcggagggccgcgcgccgccttcgctcttccaagtagtcgaggtcatctctgcgaagctgatcttgatcaacctcgcagtacatggtggcccgaggggacttcagggtgagctcggatgggagaaccgcctccgcgccgtagacgaggaagaaaggcgtttccccggttgctcggcttggtgtggttcggtttgcccagagcactgctggcaactcctcgatccacgaatcgccgtgcttcttgaggatgttgaaggtcttggttttaaggcctttgaggatttccgcattggcgcgctccacttggccattgcttctggggtgggcgggtgaggcgaagcagagtttaatgcccatgtcttcgcagtagtcaccgaaaagctcactagtgaattgggtgccgttatccgtaataatacggttaggcaccccaaaccgggctgtgatgcccttaatgaatttaagtgcggagtgcttatcgatcttgacgaccggataagcctcgggccacttagtgaacttgtcgatcgcgacatacagatactcaaacccgcccggggcccgcctaaacggtcccaggatatcgagcccccagacagcaaacggccatgaaagtggtatgatctgcagtgcctgggccggctgatggatttgcttggcatggaactgacacgctctgcatcgccggaccaggtcgaccgcatcattgagagctgttggccaatagaaaccttgacgaaaggctttgccaaccaaggtgcgcgaggcggagtgggctccgcattcgccttcatggatatcagcaagaagctcgacgccttgttcccgaggaatgcacttcaggaggattccgttagccgcgcgccgatagagggtcccttctatcagcacgtagcgtttggagatgcgctggacgcgttcacttccttcgcggtcctcgggtagagtcttatctgtgaggtatgcttggatctcaacgatccaagcaatcaatctaagggagctgggagcgctcccctcgggtcccgaggcctggactccgacgggcctcgggggccggtcaggcgcgtccgtctcccctaaggggtcaggtcgcgccgacggctgggcaagcctttcttcaaaggcgcccggtggggtctgggctcgcgaggaagcgagccgtgagagttcgtcggcaatcgtgttatcccgtctgggcacgtgccgaagctctatcccgtcgaaatggcgctccatacgctgtacttggcgtacgtaagcatccatctgcgggtcagagcaccggtattccttacagacctggttaacctagctgggagtcgcctaacaccaggaggcggcggatccccagtccagctgccaccctgagtcccgcaaggagtccctcgtactctgccatattattggtcgcccgaaagtcaaggcgaaccaggtatctaaggacgtctccgctcggcgaggtcaatatgacccccgcaccggcgccctgaagagacagggagccgtcgaactgcttcacccagtgggcggtgtgaggcagctgcgaggggcccgagctggcctcggggactgagacgggctcgggagccggggtccactctgccacaaaatcggcgagggcctggctcttgatagcgtgacgtggttcaaagtgcaaatcgaactcagaaagttcaattgtccatttcaccacccgtcctgtaccctctcgattatgcaagatttgggcgagggggtaagacgtaaccaccgtgacccgatgcgcctggaaataatggcgcagtttcctcgaagccatcagaatagcgtaaagcatcttctgggcctgagggtatcgggtcttggcgtcccggagggcctcactaacaaagtagacgggccgctgcacctttcgatggggccgatcctcttcgccaggggccgcatccctggggcgctcttcgtccaagcggcctcgcggggcgcacttgtcttctgtgctgacgacctcggggtcggaggacgacaggtgcggccttcccacagtggcctcagggccgtcctgggggtcgggggctcctggcgtcgtcggacaagcgggcaaagggtcaaccccggtcatcgggagccttaggccaccgttcggctcgggggcctcttctccctgctctctcccgggtcgagtcggcacagggttaacctcggggtcagagggcgataggtgcggccttcccgcagtggcccccgggccatcctgggggtcgggggcacctggcaccgtctgacaagcgggcagagggccagctccggtcgtcgggggccttgggccaccgttcggctcgggagcctctcctccctgctctctcccgggccaagccaacacagggtggggattcgcggaatgagggttgtcctcatcgcgctccacaactaacgccgcactaactacctgcggggtcgccgctaagtagagtagcaagggttcacctggctccggggcgaccagaactaggggagagctaagatacgccttcaactgagcgagggcacgttcagcttcctccgtccaggtaaacggcccgaagcgtttgaggagcttaaataagggtagcgccttctctcccagcctcgatatgaaccgacttagggcggccatgcaaccggtgacgcattgcacatccctaagcttgctgggggggcgcatccgttctatagctcgtatcttctcggggttggcctcaatgcctcgggcagagaccaagaacccgagaagcttgcccgcaggtacaccgaacacgcacttatcggggttcagctttatgcaggtggagcggagactctcgaaagtttccgccagatctgaaagtaaagtttctcggtcgcgggtcttcacaaccaagtcatcgacataagcctcaacattacgtcctatttggctacccaaagaaattcgagtagtacgttgaaaagtaggacctgcattctttaacccgaatggcattgtcgtataacaataagttcctatgggggtaatgaacgtagttttttcctcatcctccctagccatgcgaatctgatggtaaccagagtatgcatctagaaaacacaaaaggtcgcaccccgctgtggagtcgacaatctgatctatgcgaggaagggggtaagggtccttaggacatgccttgttaaggtcggtgtagtcgatgcacatccgaagcttgccgttcgccttgggaacgaccaccgggttcgccagccactccggatggatgacctcgcggatgaatccggcctccagaagtcgcgccacctcctcgcggatgaaagcttgacgttccggggcctgccggcgcactttctgccggaccggctttgcgcccggccgcacggcgagacggtgctcaatcacctccctggggaccccgggcatatccgccggtctccatgcgaagacgtcagcgtttgctcgcaggaaggagacgagcgcgtcttcctatttgccatccagaagaccaccgattcgtgtggtcttggacgggccgtcgcccagggcaacctccttgaccgggacctcgtcgcacgtgactatccgctgcctcggggcggcggggacggaggtgccaagcctctcgtcgccaccctcgggcttggacgcagcggcgaggtggtccgcgcgctgctccatacaagcgagcgcgactttgaggtcgctatggacagagatggggccaccggggcccggcatcttcatctggaggtagacgtaatggaccgccgccatgaacttcaccaacgcgggcctccctaggaccgcgttgtagggcagactgaggtccgccacatcaaagttcacccgttccgtgcggaagttggcgcatccaccgaaggtgaccgggaggtcgatatgacctagcggccaagtgtgccccggcgtcacaccgataatcggctgggacggccggagcaccatccccgaggccttgatggcgtcaaaggctgcgggggaaaggatgttgagggctgctcccccatcaatgaggacacgccccagcttcacgttgcaaacagtgggggaaaccaccattgcgacctgtcctccccgggcaatgcacggtgggtggtcggtctggtcgaaggtgagggcaacctccgaccaccgcgcccggcgcatcgcctcatgagtaggggccgcggccagaagctctcgcttcatcgccttgaggctccggcgagaaacgtgagcacacgctcccccatcgacagtggcaatggtggccccaggctcttggaaacccaggtcatcatcgccgtcatcgatgtcctcggcgggggccttctgtttggcctctcttcgccgattgccggaaggaaccgccggggacttgccctctcggcgctcctgcctcctctcctcctcccacttcctcgtccgctcagccaaacttttgactgcacggcagtccgcgaggtcgtgaagggaggtgttgtggacggtgcaccacttgccggttgggcgctccctgctgggagcgctggcctcctttttgtcgctcgcaggcctcccctttcgggtggcccgtgaagcaccctcgacggcgaggacatgaccctcgtcgtcggaatgggctgaccttttcttcctcctcctgtcacgccgccctgtccgagcagcggatccgggggcggccgaagctgccacaccggaaccggaggggttccaggtccatgactcctccttacgagccactcggtccgcgagctgaaaaagctccgcggtagtctggggctccttggaggcgatcttttcgagcatgcggttgtgccgcacaccccccctaaacgcgtagatcaccgcgtgtgcagggatgcatggtatggtgttgcggacttgacagaaccgctgaatgtatgagcgaagtgactcatcatcccttcgctgtactgcgtgcaagtccgcttcctcacctggacgcggatatgtgccttgaaagttcatggtgaactgttggcacaagtcctcccaagagtggacggacgcgggtggcaagttcattagccaaccccgcgcctgtcccttcagggccatgggaaagaaattcgccatgaccctgtcgtcacccccggcggcctcgatcccggtcgtgtagacctggagaaactcggcggggttgacgctcccgtcatatttttcggcgatggtgggccggaaccttgggggccaacggacgttccgaaggctcaccacaaaggctctacagccgacaccaccaaccgggggcacggagggctgatccccgcgtccgtgttgaggtgacactccggacgaggaggcgccctccgttgcgtgggcagcacgtcggccattacgccggcgctcgatactgatgcgggcatccggctccccacgcagatcttcccgggtcggaggcgctgacgaaggagtggcggccgaatggcgaacagcggccgccgctcgccgcgccctccgtcttgacgacgcggagccggtggtagcagtaccagaggtcttggtggcggaggaccgcccaccagcatttaggcgctgccgcgccgtcatgaccaagttggccacgtcgtccagccaacgttgggctggagactccgggtcagggacaatgggcgggtgacgtaggagcgcgcccgcagcttggagcgcgccctggggcgtgctgccgtcgccgtagacgaggaggcgacgctccccatctcgccgcccttccccatcacccgtggatgtcgaagtcgcggatccttcgaccctctcgagcgcctcctcccgcctaggactttggcgtggaggggcggtggagtacgagctcgacggcgtgggttcggctccccgtcgtcaccgctaacactcggagagaggttgtgcgcctttgcttgttcggccattgggctgaacaggaaaagcttggcgcacacgaaagaatgcgagagcttagaaaaacacacgcagacccccctacctggcgcgccagatgacggagcgtggggctcctcaccgggagaccacgcaggcccccctttgccggttcggccgggggccctgggtgagattctaagctcctagtctgtggaaagttcgcgagaatggaaaaagcacaagacacgggcgatgtatacaggttcgggccgctgagaagcgtaatagcctactcctgtgttctggtggatctgtgtatgaagaagctacaaagagctggagagccagagagctcttattctaaaaaccctcttctcttttttttttctctcgtgggatctcctctctagatcctccccccttccaaccccccctcttaagtgggcaaggtcctccttttatatctcaaggggataccacatgcaccacttctccctctctctctttttgggtgggggcccatcctatctatagtaaaacttggcttgccttctcttggaagctgaaacactgcctgtttttgagtgtggccacgcgtcctcgttcgtctgacctcggagatcaccctgtcatctcttcataaatgggcggagatttgcaacggctgctgcccgagtgacccttctgatgggacggcccatatctacctccactccgccggaagcaggtgcaacgtgggaacacggttgtcttccggcgacataaccagtgtcagaccagtcacagaccggtcacctttgtccaccacgtgtcagtttagcaatctgcatgttcgcccttcttcatacaacgttttgcttataatggttgggataaagcctggcatatatctgaccaggaccaacgtgccatctccaggagctagcacgctggctccggctagggacgagtgcctagagactctcatcctgacgggacggggcgaggcgtgtgtcagatcgcctgttgcctcctaacccgcaatctgaccgatctgtgaccggtcacagaccggataaacgagcgtgccatactgcgctacatgtggcgtgacgcgctcgtccaaaccgcaataaatgcggttaggtgagccccgctatgctcacctaccccatatacgcggcgcaaaacccacaaggggtcggggcgcctcggccctcggggccgagacgggagcggtccgacccctcggggagacaaagagaagggcggccgtatcaccctcgggcccgaccctcccgagggggttaggccacgtgggtgatcgtgtctgcctcaagtctctaagtcatgatactcccggtcccatgttaccgacaccgcccctgactaaattagtgtcatcaaatcaataattgaatgtattttcataataaatttatcttgggttgaaaatgttactttttttctataaacttaatcaaacttaaagctgtttgattttgatcaaagttaaaacgtcttataacttgaaacgaatgaagtatttcataagcttctctacgtgcaccatgtttttttttagggagtgcatcatgtttactctaattttgtagatcatatactatttcatctcaaaataataggataagtctccgaaatctcaaatcccaccgcattatatatttattactcgcgttcatcctcatgagcgcaaaaccctaattatccccccccccccccacctttcaaatttgttcgcagtcttaattaacatgttctctctaaccactggaagagaactcgatcggtcaggtaccagagccgcaatctgttcttttaatgacgctagaggtgcaccttttcagcaatatttcgtaacgtcactgaccgtgatgtttaacccaactatacatgtgctaattattggaattacgaaaatgagtaattggtgtgacgaataatcagcgttgactggtctatttaattaatgctctggctctacaaattgaattagacttagcgctcatatagtcgtatggagtactccctctttttgtaaaaagaaataatctaattccaaatatataatctgaacatgttcagatttatctttagaattaattttttttatagagggagtatgttatttttggatttgcttaattaaagcacaagctactattattttcgacaaaatcccagctcaaattatatttttcatatcattaattttacggttgagcctatagtttgttcgtgttaaattaactcatttttcaagtattttaacatcgtgtgtgactgtacaattaatcaactattaatgcacatgtacagaagtggcatactggcatatgtagatctcgatccctccccacgcccttgtatatcatgcattaattaattatatcatgcaaaagcattaaaattctagatctgacagaggttcaataataattttttaatgctttgtatggttttatggaaaacaaatactagccggtggataggacattaatatgcatgggtaaataaagatggaggaaaaaatcaaagtatagttccctagctactcggatcctactataatgatatggaattttaattaagaatattaattattagctgagtaatatataccactcgtcctaatatttaatggttgccaagctaattgaattgctggagctgaattgattagctggtaatattttctatagataggacgttgttaaattctgccatttgggctaagacatagtacattcaagcacaattaatggtttagccagaaaacacaacagaattgtaaacatctgtaaaattatatatacgtgatgggtttaccggcctgtcggaaaccattgttaatttgttagtaaataaatccctttatctcctcaaaagtatcatttcagtactagtaaatttattcatgaaattacttactaattcctaatgtgcacgatatacgaattctgctatagttaattaattaggtcgatcgatccaacatgaaatctcctttttgcttcattaatagaaatagtatatttatttatggtatcattgttttcttataattttcagatattatttcgcgtttatttatatttaggctagaagggctaaattttcagatattttctctaccaaaataaaaaaaaactgtatttcaataagtctagtacttccctgcaaataatggacatcattttagagtgtcttataatccaggattttgattgagtaaccccaagcgaataatgccaatactttatagtgttgacaatcttgttaccaaaataatcatgttagctccaacccagtagtggtcttgccgtggtgactggtaattgcctcgctagaagatgggctagctagcaacataatgcccatacctgtacggcgtctacaaatacatttacgtactctattcgtccaaataattttatcttttatatagaaatagactattcccagatataatattaatttataagttacggagagagtgcatttgttggcatatggtctacactctctctgcattgccatacaagctatgccaggcaagcactgaacaattaactcatggtgttgttcggcagacggacgcgcgctgcggccgcaacggtactgttcaagctgactgtggtgcagccatgcacaaacttaggctgtgttcgggaggcgaggttgggaaccttgcctcctgacacggaaaacgaagcacgtgattatagtgagactaattaagtattagcctaaaaaacttgaaaaatggatcaatatgatttttttaaagcaactttcatatagaaaactttttaaaaaaatgcatcgtttagcagtttgaaaagcgtgcatgcggaaaacgagagaagtgagctgggaaagaggggtaaagaacacagccttaatagcccttatgggtgtctttaggccatgttcaccctcaactttcaactttccatcacatcacatcacatctaaaactttcctacacacataaacttttaacttttttttcaaactaccaactttccctaaacttttaactttttttcaggaattaaacacatccaatatactaaaactctatatttaaataatactactatatgatattattgagtttattggatcttgatatactttagtgattatctttctataagaatgtgatgatagtatctaacacaattatgttattgtaaaaatacttataaagaaaatatagattttatgttttcaaactaaatattttgagagttaggatggtcagagttttaaaattttacttatctaaaattaacagtggcatacatttatcaataggcggagtaccgataatataattactttgagagaacagaatgtacattaattaagtagcattagtaataaccattttaatttgccggcaccaacctcttaattactgtaaagtgagagtagtttaattggttaggtttcttgtggtggaatcagcccattcgagttaggacctggacttagacatcgatgctcgtatttatggctaaacctgttagccgtcgacgataagacaccatatggtgatttcatcaatctgaagatataccgatccaatctcttaaaggtgttcatagatataagatatgcaattgttcattaatagagatgaatgagcatctgctttatattctctccgtcccattataagtgaagctataagttttcgtgcccaactttgatcgtctgtcttgtttgaaatttttttataattagtatttttgttgttattagatgataaaatatgaatagtattttatacgtgacttatgtttttaatttttttttaaaaaaaataaataagacggacgattaatgttggacacggaaaatcatggatgcacttaaaatgagagggatatagtactatatttttttaaaaaaaaactcttaattaccaacgcacgactttctcgcaccaggccaattgacccttccttacccacatatacatgcagatgcggtcatatctcatagactcatactacgtaccctctcagtaacggaaaggtgtttgtcttctggctaactgctacagtgttacttatatacgtatctctcaacttgtgaaagtctgaagctgtcgctgtgccgtcgctgctagttaaaaaaggcttgccttggactttttccccctcctcccatgatcccatccacaccacacgcagcaacgcatccacacgctggatgctgctgctgctgctactcctgctgccgtgatcgatgatgacgcggacgccacgcgcgcgaggcgcgatcgatcgaattcgccgtcgactttgaccgccgacgtggcggcgacgcgcgcgttcatctagccacatagctaagctagcttacttcatttcatttcaagatataagacgttttgactttaaatttaattaaatttgtaaaaaaaaaatagcaatatttttaactaaagataaatttattgtgaaaatatatttaattattgatttgataaaactaatttagtattataaatattattatatttgtctataaattttatcaaacttaaaataatttgactttaactaaaatcaaaatatcttataatctgaaacaggggagaactacctagcaaccttgccttacttccaatggcgcgcgacacgcgcacgtcgacaaaaacctaccccttctggtgggtgtacccgatcattccaatgcatattaatacctctcttgctcagcgccgcgagaccagtaaaccctagcaaggttatttcttcattttttgtactttggattatttctgctttgcttgccatggccgatgatgatggctaccgatgccagcagcggcggcggcggcggctggtgcagaggatggtggcgtgcttcgggatgttgtcgcggcggcggcggacggtgaggctggtgctgtggggaggcgaggtgcgggcggcgaggcacgggaagatggccgggcaggtgatgctcgacttcacggacagcgtcgtgtgccgcgccgacgggttctgcatcggccgcccggcgccggtgctggcgatcgaggaccgcctcgtcgccgggaggacctacctcgtgctccccgtcgaccgcctcccgcagggctacgacgccgtcacggccgcctcgctggccgcgctctcctacgacaggggcggcgccggcgccggcgccgccggggcgacgtccatcgccggcggcgccaagagccccttcgagtacgtcaagggcgacgacggccggacggtcatcaaggtcacgccggagttcatcgtgagatccatcacctcctcgagaccaataggcgcctgcgccgccgccggcgacgaggtggtggagggcggcggcggcggcggcggggcgcagctgtgcagcacgccggagctgaggaagcactacgagcagctggtgggcgcggcgaggtgccgcgcgtggtcgccgaggctggagacgatcaaggagcgcaagggcgccaggaggatcgtcgtggcggcggtgagccccgggcggctgtcgccggtggcggcgaggctgctcggcctggaccgaggagcaagctagctaagctgatcgatcgatcagaaagccttgtaattaattaagctcaaaatttccgttcttgattgccgcttgatttgttcatttgatcagattgctagctgctcctcttgtttaatttggcagcaactaattcattttgatctgaacaaatttagcgatgaatttgaattcggttattattggagagtacaggtatagttttaggagtttgcttgggatcgatgtatgatccgtgtaattgaattgaaaaaaaatataaatgtgaattaatatgcaccgtcaattaattgtcacattatcaggaattcatctatgtgcaattaagctaggtacatcgatcaccgacgcgcttggcgttgttacgtcataccaggtactccgtagtccgtacgtgcgtaattagttagcagatttgcattattgtactgacccgatctatctacattacgattttgttcgaaacagcaaaatttaatgagaactgcgtgctgtccatttcaagttttcaactcgaatttttttttaaaaaaaaaagagagagagagaaaaactgttacgctgcttggattattggaccggtcaatgtaatctccattggggagttaggagatgtgggttggtggtttttatgttgttccctcagttttaattgctaatttatgcatatcaccacgtgatcggttcgattaattcggcgtggacataagtttggttaagttgttttttcgcacgtgattgaattaattcagttgcccaaaatagtacggctagctagatggactggtagagtcgtagagaccgaggggagctgtcaattggtgtttgattaattagccggtggttgctaaatagctaattgtttactcaatcagcatgtagctaagtcatgcaggacgttctgatctagttatatttgttggttaatttataagttctccttcatttagaaatgaagctactagtgcacatgcggttcatgcacatgtgtgtgaatcatgaatccgcttcaatgtaacacgtgccacaaagcccccgtgcagctatgaagagagcatatattatcatatactccttccatccctaaatatttagcgccgttaacttttttaaacatgtttgaccgttcgtattattcaaaaaatttaagtatttattaattttttttcctatcatttgattcattgttaaatatacttttatgtatatatatatatatatttacatatttcataaaagttttttttaataaaataaacggttaaacatgtttaaaaaagtcaatggcgtcaaacatttagggacggagggagtatatacgtgctaaaacccatgtccctgtgtgtgtgaatcagcgaagcgtatagagtattaattttcatatacttctaaaaacaaataacaacatcgcactattgtttcctcgaacttttcttcttttgataccaagtcaacgtaaggtagtaattaacgcgggattattcgtgtgtgtgaacggtgtcacagacgatgaaccaggacacgcagatcaaaggacaggataaaccgccgatcgcgggccgcagccttgggtttgtgaaaggaaaaagtataatttgactcccttaactatggcacgagtatgattcataacctccaaccacaaaaccgggtatatcgactcctccaactatcaaaaccggtgcaaaatatatctgagatggttttggaagcggttttggcttacgtggcgcttacgtggcagtgttgacccggtctccgtcctacgtgtcgttgacatgtcacatatgtggcattttagaataaaaaaaacaaaaatacgtgggaccaacatgtgattcacacttaaaaaaaatagtgggacccaccgacatgtgggccccacatgtcatcatcttcatcctttcttcttcctctctcctcttctctctccttttccccttcctcttcctttttctacggcctcctaactcccttcgttctcctttctctcggcccaagcgcgccgccgcacacctgctgcgccgcaccggtttatgcctgaccgccgagcttcggagctgcccgcctcacctcctatccacgacgccgccgaaaaccacttcggtcctgacgcagccgcctgtcctagagcaccgccatgcacagggttcgacttcccactgtcgtcgcatccgggaccccgccggtaacgacccctcccaaatctcagcttgaggaggaagatgctaaccgtccaaccaccttaagaccaaacgattaaacaaaaacagattaatttaggagaacttttatggtacaatgtactaccagtatatacttgtagtataaacaatctaacggtatagattgccttgtgatgatgtgcaagcaaacggtaaaaaaaaatcgcagggataagaaaattcccaggagccgaatcaaaaggggagggaagaacaagaactgaacagatggaagaacatgtatacttggcagggtaaaccaatgaaactaatctcaaagaaaaaaagcaacagatgcgctcagaaagccaataaaagagagagaaacacatttttaataaaaggaaatgcttgcttaattgttctgaaccaaaaaaatcaaaggaacaaagaagaagaggaaggacacaccaagatcagcatgaaaagaaggggagggggccgccgtgtccgccctagccgccgttgtccgccgcctcctcctggagccggcgccgccgagcttctcactcgccaccgcctcaaccatggccatggccgtcaaggccaacacagccggcgtcgtctctttctcgctcgtcctcaagccgttgcggggcg

SEQ ID NO: 10438 - DNA, 1954 bp, Oryza sativa
gacgtcaggttagatgatgatattgctagagattatgtaagacatatgataactcgacgaattacataaacaagattagagtgtcataaagatggaagcactaatcccgagaacgcaagccaccataacaagtttacctcttgttgaagatcgaaaccgatgcaactcaacccgaaagcaagaactcgtcgaaataaaacgaaagtaaaaagggtggcgatgcgccaagattgtattgaacgtgtgtgttttattacatagggctcggggtctatttatacccgaggattgcaagatatgcccataccggacacaaccattatctctaacaaactctaagataccataagtctttgcggcagtcttttgcccacacttatctataaggaattcacataaaatatcctagttaatagatacaattgccttcccaggactctatccatgggtggcaatcatcttgaagtacattaacttgaacccgatgtcgcgcacaacgcgtattgtcggaatcggctatatcgacttatttagctcgactcagactcagccgatcttgtcgtagccgatctggactttagccgattcctgccctgttttcaaactcgatctccgcttccgactttgcttcgatctaatcttctctccgatgctgatgttaccaaatttggttgttaacagaagcctgcgaccacttagcaaacgaggtcaagctcccatgagcctgcgccccaacgctacacattttgttcgctctttcctttcggtggcctccttccaatctctcttccttcttcatggacgattacttccgcacgagtgtgagagccgaaaaattctagagccagcaatccctgtccacagttgagccgggttgggcaccgtagccagccggcgggtccaaagccagccgctatggaagagccagcacagggggtcccgggcttcgacggcacctggagctcaacttaaggctaggataaggctagaagacttagcccccacacttagcaaagaatcgttcatatagatgggagagaggttgggctcttaccacccaggggccaaacaaatgcgcaacacgcgagcgtcgcagggtcatgagaatagaatgggggaaattaaatataagattttaagctaatgaattggaaaattgaaaaaaacttgaagcttgaaaggacgatcagttgagccaggccaggcaccgtagccagccgtcgggaccaaagccagccgctacagaagagccagcacagggggtcccaggcttcgacggcacccgaagctcaaaactgcaagagtcctcctaggagtgaaccgaggcggcagcaggttcatgggataaccccgcgcttggcccctgagggccatggggaagacgtttgccatgacccggtcgccaccccccgccgcctctatgatcgtcgtgcagatctggagggactcggaggggtcggcgccatcgtcgtacttctcggtgaggcagggctagatctttgggggccctcagacattccgaaaactcgccacaaagacctggtagccaagcttacctagtggggacgtggggggccttgccccctgcctggggtggcgcgacactcctgaggatgctgcgccttccctcgtagcggcgacgcgacaatcaccacgccggcgatcgaaagaacctcaaaaatcacgaacgcgcctcctacctggcgcgccagctgtcgagaggtgaccctctctagcaggcggctgtgaggcccccctttgagagttcggccgggggcagcgggtgagattcgaggatttggtgagcgaaactgtgtgtgatcttgatctcggaggctcctccaagacgatgagacaaaagaggtttatacaggttcgggccgctatgaagcgtaataccctactcctgtgtgtatgattcttctgggcttagaaagtccctgaatccctgata

SEQ ID NO: 10439 - DNA, 17845 bp, Oryza sativa
tcaactaaatgactacgaaaaattttcaaaaaaatcggcaagatagatcaatatgtaatatatcactccacaaatatgcaagttaaaattcaacttctacaagttgtaacaaaaataacaaatttaactgtaaatatacatatagtaatttgagttttgtttgttatttttgttacaatctgtagaagttgaattttaacttgtatgtttgtggattgatacattacatattgatctatcttatccatattttttcaattccttttataattatttagatgacatgcaataaatgggtggacattcactcaagcggttaaaatagtttctcgattgcaacagggaattcgctgcggttcagtaaagtatttgtggctggattgttggagttatcgcgaacagtggcaccacaggctgaagctgcctgcccactacgtaatattattttaagcgagacttgattagttttcacgcatgcactcctgatgtcgtccaccaccggcatttcgatccaaccggggcaacattcgctctgatccaacattcgctctgatcctgaagaagagcatgctcgcagtagcagcaacttgcaagctagtagctagcaacaaagtcgaccagtgatatgttgatggaattgtgggtgtataatactcacgaatgttacgcatatataaatagactataaatataattttagtaagactagagatataccgttggttttcgtctttgagattagcgtgtgttagagggtgcagttgtgaaggtgtgagtgtgatattttttgcgtttgtttaccgtgtaatgaaaagaaagaagtcgaccggagatattctcctgccgaaaagtgatcgatcgacataagaaaattcaacaggtgctgtatcctttcttttctgttccatagtgcagcggttcaattttaaattcagtttaaaggggagagattaatttgaaagggagacacgacaggattggggttatcgctaatgaaatcatcatcatggcccggtggtctaccaggtgcaacaaggttagccactggcccggtgcttttgatcatttttgatgaaccagtgcagcacaagtagctgatgctgacggccggcgcctgtcctttccgcgagcaagaggtggctttattactctttccgttactaaatatttaacaccattaactttttagcacatgtttgatcgtaagtcttatttaaatttttttataaaatatgtaaaactatatgtatacataaaagtatatttggcaatgaatcaaatgatagaaaaaaattaataattatttaatttttttatataagatgaacggtcaaacatatttaaaaaagtcaatggcgtcaaataaaatatatttaaaaaaatcaacgccgtcaaatatttagatacggggagaacttcgtaagcggggttgttgattgcaaacttgggactactggagacatgggcccggaggatcgattgggcgcgactccctcggcaattcgccatgttcctgtatggtcttctgccggcgccattgtagcgtaatctattggatgagcggcggcgaagctgagctgccgtcttaattttgcttgagttatatatatatatatatatgaaacgaaatcgtgctgttccggtagccggcgctgctgattttatgagtttgttagtaaattaggtacatgaatttgtgagacaattaactagcgcagcaaccaaaaaggaaatacgtacaatttggtattcggagagaactcgagagctcaatggaaccatgtcagactatgatccaaaaatgcacttctcttttgctttttagccctagcggacaactttagatgcaattattgcagcaacgtgcagataaattcgacgattgtacgaagtgagcataactcaactgattaaattcattatgatggaaccaactaacccggattaattgaagttctagactttaacggctaaatatttttcagtggtaggcgacgtacctgtcgtgagcgaaacgtctgtgatgacattgttaatctcaagatatgtctaacaagtcttccagagatgctcataggagtagagtgtgcgtgtgtgttcgtaggggtgagtgtgcgtgtgtgttcgtaggggtgagtgtgcgcgcgttactagcgtctttttttcacgaattgtatattatataataagttgtacctgtccttctactgatattgtcgaggggtgaccctctctagcgggaggctgtgaggcccccctttgagagttcggtcgggggcagcgggtgagattcgaggatttggtgagcaaaactgtgtgtgatcttgatctcggaagctcctccaagacgatgagacaaaagaggtttatacaggttcgggccgctatgaagcgtaataccctactcctgtgtgtatgattcttctgtgcttagaaagtccctgaatccctggtatgcaagctagggttagacaagctttggctcagggatcctcagtccaatcccccttcctcgctaggtatggtcctccttttatacttctaaggggatatcacatgtgctgcgagtgctacctagggagaagggaaaatattctctatattaattacatgtcttgtgccttagcccagaagctatctgcacgtcggttgctgcgcggggcccatcaaatcatgcagggcgcccttgtcatttgccatttaatggatgaggacttccgggttctcgttcacaccagaaaacgggaacccgggtcagttcagagtggttggaccagctctgaccggggtaagaggctgtgaaacccctcatcattatgatgggacgggacggagcacgccgctcgccgcctgacacactgacagggcgggggtacacagtcgccgtcccatcggtcattcaaccggtcacagaccggtcagatgcgcagcacgccacattaaatacggcatggcgcggttgcatagaccgctttaaatgcagttaggtgggcgttaggcgcgcccacctaaccctgtacacgtgggctgatacgtggagggggtcggggcagctcgaccccaagcaagggcggcctcctccctctagcttggagggggcagccgccgtgccaccccgggctcgacccccctcggggggaaccacgtgggtttgggggcggcccaaccccaagctgggagggggcagccgccgcaacaccccgggctcgacccccctcggggagagccacgtgagtttgagggcggcctgctccctctagctgggagggggtagccgccgcgccaccccgggctcgaccccccctcggggggagccacgtgggtttgggggcagcccgaccccaagctgggagggggcagccgccgcaacacccgggctcgacccccctcggggagagccacgtgggtttgagggcggcctcctccctctagctgggagggggtagccaccgctccaccccgggcttgatcccccctcacggggagctacgtgggttgggggctgcccgaccccaagctgggagggggcagccgccgcaacaccccgggctcgacccccctcggggagagccatgtgggtttgagggcggcctcctccctctagctgggagggggtagccaccgctccaccccgggcttgatccccctcgcagggagccacgtgggtttgagggcggccccctctctctagacgtgatacccccgggcccatatcaccgatagtagcccccggcattagccctgaccaaaaccttcccccagtggccagggttgacgccactctcctagtctaacgatgtgggcccggtctcttctccattctttgctggcactagggcccatgcgcctttttcgccccaacttgagggcgactcgccagcccgtaccttgggttgtgaatttattttctgtatatattcagcaaacgttgttagattctctcgggcccgcggcgcaccttgcttgcccctgccttttgttaacctctgttcatgttctacttcatctattcaaacgattattttcgtgtgagtgtgaggactgaactttccatagccagcaatcctcacccgcgatcaagccaagctgggtgccatagccagccggcggggccaaagccagttgctacgggagagccagcacagggggctccgggcgtcaacggcgtccagagctcgacgcaggtctaggatagagctaggaatcgtagcccccacacttttagcaaagaatcattttaatgggtgaagtgaatacaaactttttgttaccaaggggggcaaatgagcgtgtgacacgtgggaatcatgggaccgcgaggaagagatgggtgagagataaatataagccatgataattttgctgataagcatgaataaagaagatatatacttaaaggaagtattacaaatgctatgctcaaaaagagtccccggccaacgctgagctttcccagagaggtctgctttggtccgggtattgtaacacctcctttgttacctttgtttatccttgtttacacgttgcgacctttcaaacctttggctcgaagagggctccccaccctgggctccgaaccctttagggaagctgttgacagaaacacgtggcttgggagatccgcttaactccagtgtaggtccaaaactcgccttcggatgtgttagcgtgccagttgatttaatcctgtaatcaacaagaaatagaagcgaagaaatcgtagttaaatttataaatgatagccgatcagctagatgccgatgacatatcatttatctttgagccgatgtcatctgtgtatcgatcggcagttataaataagtaaagaagaactaaatctacttgatcggctgtagatattaacaatatatactccttatatcgatatatacttaaatcaagtgattaggatagatcggtcatcatgccaagacagtataaatcacttagatcaaaatatatgtcaataacaagattatatatgcttatagcatagctgatcagatagatatagcatgtatcggctaatactccgatactactctatatcaagatgttaaagcaagtataatatattgagcaaaagcctaatatacttaaatacggcaagatcttaacgcaaagggcagatttaacatgtcaatcaagcgtataggataaaaagtagttaaatcagatacgatcggctgaaaccccgatgctattctaatcggcaactagaaggcatgctagggattgatattctaagcacgacttaatagatcaaacttaactgatgcagcattaagtatgaaaagaagaacgatatctagacaatcaagccgctagaagtctcatagaatggtagatgtctcatataatctagaccaatatcaatatttaacctaatcggctaccctctattgacagatattaaccgacgtcaggttagatgatgatattgctagagattatgtaagacatatgataactcgacgaattacataaacaagattagagtgtcataaagatggaagcactaatcccgagaacgcaagccaccataacaagtttacctcttgttgaagatcaaaaccgatgcagctcaacccgaaagcaacaactcgtcgaaataaaacgaaagtaaaaagggtggcgatgcgccgagattgtattgaacgtgtgtgttttattacatagggctcggggtctatttatacccgaggattacaagatatgcccataccggacacaaccattatctctaacaaactctaagataccacaagtctttgcggcagacttttgcccacacttatctataaggaattcacataaaatatcctagttaatagatacaattgccttcccaggactctatccatgcgtggcaatcatcttgaagtacattaacttgaacccgatgtcgcgcacaagccgtattgtcggaatcgtctatatcgacttatttagctcgactcagactcagccgatcttgtcgtagctgatccggactttagccgattcctgccctgttttcaaactcgatctccgcttctgactttgcttcgatctaatcttctctccgatgctgatgttaccaaatttggttgttaacacatgccccacaagtccggcatatttgataatgttctggatttgccataagccgactccgagcaagtctcacactccgccacttttaaccgttattccagcgctttaaatactacctgttacccccgagaaatctcacgccgtgacttcctttttcaccgctcaagcgaaaccttttctctctcttcttggcgattcccccggcgcaaaggcaattcctaggcgacttccttcccagcgagatctccgcccgcaccaatgtcgtcttccgccagcccacttcgtgcaccatcggccgaatacgctgaggtaatttctcattggctaaatccccttctttagcagcaaatcgatcttcttcaatctgatatcactctctccctctgaattgctttggatttgcagcacctttccaacctagttgtcattcccagcctggcgcatgaaaatcactactttcttggcccaatcggcaatccagaccccaccgagtttattattggtgaaaccaataggatccccttcagattaaccaacccagatctaggtcactggaagaataccttcaaatcctggccatccctagagaaagttccaccagaaaagagctggaccacatggttcaaacgtgtatcagccagcaagagggttcactgggatgaaattggaatcggccaagcacttgaccttactatagcgaattcggccaaagatgaacccctgatggcaactgcttcttacttttggtcaaacactaccaatgcctttctgttcaatcaagggctgatgactctaactctcatagatatcattatgatcacaggtctggatgttacctcatctggcagcatacatgggccagggctcggtcacccctcgagaacatgtggctttcctattaatgtggctagaaaaatttcttttttgtggatcaagttgtggccccacaaccaactggcaatttctggctgaagctctagaaacaaagagacaattccccttgggcaaaattctcctcggctatctataccagatgctgagcaatgcatcagctaagatagcagtcggctcagtagttggagcaggtggacattggtggctactgcaaacctggttaaacctgatagtcatgaaggttgtcaattggccatccgtatcagaaactgaattcccaagactagagccgattgtagatgatgatggagaagagcgtactcatcggagatgcacatcctatggagaatacgcttctacaccaactgatgccggagcaaaactatcggctgaactgctcaaggattggttttgtagcttctatgaatgctttcagaaagatgctagaatctggttcctttatgaagactctgcacaacttgagcacccagtggacttcagattcgaagacatcaaccatgaagtataccaatcatccagggaaatcttctcggctgcaatcagcccatgtgtcctccctgttggcattcatcaaggaagaaacatccaagcttcttataaattctatcatccaatgagctcaactagataactcggaatgggccaactcccaatcggcttgttctttgccgacaagatccaatgccgaggaggaatttcatgaaccctgatgatggatcggctgcttagccttcaaggaccccctctgggcagtattggcaacatagaactggcaacattcagaagcaaaagcttcgataggtggtggggtgaatggaaactgcatttacttcactaaccagctttgatgtatatgacagacctctttccagatgttgtccctcaagtaagcctccaacttcgctcaattttagttaaataattgtttggccgattaatcttaaccaatcatccttttggtttgcagacaacagaatcttcccctcctcaccaaagcaacagcggcaaagacatccagtatgccccaggtttgattcctaacggaggtgggctatctcctccagttatcggctatgatgcccccaagacctcagctcttcttcaagggctcgttagagaaccagccgatgccggcaaaaagaggaaaaccagatcgtcggctgtaagcatcatagccccaattaaggagaagaagacaaagaaaaccaagccagctgatgatctgcctaccctggatccatccatcgaacaagctctggatgaagaggccattggagacgaggttgatcaggccgcagccgaggtaagtgacactgaaagaacaccatcggcttcgcctaaacaaacctctccaactccttctgctccagttcatttctcaagggtaagtgtttctcgttaatctctttcgtgattattttgtcttatagccgatcattcccaagtcttataattgcagaaaaagaagactgcagtgaagaagaaatcggctgcaacaacatctaaaccagcttcaccagtaagatagttttaactttcattagttaattttttagccgattctatcttacacttgcttcctttcagccttcacctcctccttctcctcctgttcaacaatcatcaagtgatcagacctcttcagctacgggaagttatcacatcgaggaagaagaacaaccagctgctcctactatcccagtacatttcttttatcataacaagcattcagatcggctacacttgtttaacctctaactgcttctaaattgtccctacatgtcacgcccggatttttgtttcaggatttataaattatttaataaattattaatagaatttatattaaatgttcattaatttacaagtgaagttaaatgtgggaaataaaatttcctaaatataaagcatggatggatttaaattttattaaattctccatggttaattatactctctggaattttctcggatttttcggagctcaattcctaattttaatcatacaaagagcatttcagtaattacccacatattaaattaatcattaaatggtctaattataattttgttaagtactttgagtgtccaagtatgttcaagatttttcttggaattatttgagcattggaagtatttttaacaattcaaagatcatttcattgattaatttaattgggaaagtaataaaatccttctcctcagcttgggccattttcagcccattccttcctttccttcctctctcttccgccggcccaacctgagccgcctcctctcctctcagctcagccggaaaagtctactttacctccctagcactgttcatcttctacctctagcagccgaactgagaccgagtgggctcggtttttcccctccaaatccgaccttttctcttgtgttttcctaaaattagttgaggggaaatattcctcttatcctcatctatctttacccccaaaaatcggagtaaatcgttgagtattttatccgaatcgaactcgtttttgagtttatctccaaaaccgagtttttgatttcccggatcgatttcttgcgggaggagtccgatctcttcaatccaaggctataaataggaccccctagtcctcctctttcgtttgccccctctcccgtggtctcccgtgcctcgtagcgctgccgccacgtgctccaccccgccgtcgtcgccggccgagctccatccgcgtcgcgccgccgcctccgtcgtcgccgccggtcgccgtcaccgccgtaaggtgcgccgaggtgtgggctagcccggccgccccttccccgtcgtcgccggccaccggagcccctccgccgccggtcaaccgagccgccgccgtcgcccctctcgtcgccggccgtcgtcggtcgtcgttcggcacttcggtgagcaccatcgggttcgtctcgtcgttctctacgtgtaggtgtcctccaaatccgcagccggtcgccctagctccggcgaggtcgccatccgagccggccgcctttgatgatgtcatcatgacatcatcggtttttctttttcccgtttttctaatagattaaatcttcggaaattcataactaaatcatcgtaactcggttttgagtggttcaagttgctaaattcatctaaaatcatgatctacatgtttgtttactttatatgtattgtttatttggtttttattagtctttttcttcgttttgcgtgttagcttgtcgtttccgtcgttgcgaaggttcgtgagtgcgtcaggagtgttcagaagattaattgaagaccgattattgcaaggcaagtcacacagatcctaaacacaatcctttgagcatgttgatcctatatttaaattctctatttatttcaactgtgcatttattttcgaatgtcaccgggtggtgtgaacttattcctttgttatggccaatttgcattgattactttattccttgataccttgggttattataacttgactagttaggctttatatattggttcagctagatattagttatgattgcttagccatgcttagaaacattagcacactattgggataacttatgactcactattatttaaggatggcttaatgatagttcacgatggttaatcgtgattggttaattaattacttgccaactaaaacttgataatggtgggttgtgagcacatggttttgagagtcgtgctcatgacaattaaggaccggttcgcgagctactgttgtgagacatttaccgtgccaaccacaagccagcgtgggcaacggctttatcttttgtatagcgtgattcattatagtgcgccagactgagaagtagcgagaagtccacgggggtcgctggggagtccatgccttgtttataagggggtgattatgatccaggaaaggtgcgctgtaatgggttatgttgtgcaaggggtattgtcacaactcctttccgaggtaccgtggtggtattgaggcacatggcgacatgatgtggggttgtgtcttgtgggtacagtggtacacctctggccagagtaaaactattcgaatagccgtgcccgcggttatgggcgggttgagcaatgtttttcgtgattagtctcacacctctcacaataattatggatgttataactggtaataatttgcttagctcctggtttggagttagatctgtacagccgggtatggttgttcaggatggttaggcctgtgcagcatgggtgtgctgttcagtgttgattaaaattgatgattaattactctactattttaattatcttaaatgttttgctaaatgctgctttttgcaaatgggcctatattatgccatcctttggtatccttgtgcacttgcatatttgctgtgtggcttgttgagtatgtcatatgctcattcttgcaataatcaatcaacctcagttgaagaaaaaggatccagaaggagaagacgtttggcttataccccagttgagctgcctgtgggagtggagccggagcttcgctagaccgtaattccgctgctgttttcttttcttttgtaagtgtgtaacgttattattatgatggatttgtatattaaattgtcagtttgtgtacctcggctgattcctggacgaggattttatgcacaaataagttcggaaattactagtgaatttccgggcgtgacactgcaggtcttagctgatcttttctctttcgatatcagagactatcttgatgaaggagaagaagatactacaagcaaagcattggctcctttatctgatgatgtgaagaaaactctaggaagtattttggatcggctagaggcatcatcactagatagtttggtagttgactgtggctcaatcagggctcggctgcatgagattcaagccttaattccagatgaattagccgatatccttactccagctgtttaccttgagcaacaccaattcaaactggagaaagccaagttaagactagccgaacggcgagaacgtaaggacattgaagccactatccaagccaaccgacaacttgtgcatgaagagaagtccaagcttgatcaattatctgaaggcccaatcaaatctaacattgatcggcttgaggctcccaaaattgaactcttagcacaacttgaagaatgtaatgctgagctagatatggaacacaagaaactggccgatctcccaaaatctattgaagaacaaaaaacaagactcaaatcggctattaagcatgttgctgaactgaccaagtccctgaaagttatccctggaaccgatgctcacgatgcccaagccatagaagaagtagagcagattaggcagaaagctatatcggttatacagcgatacttatcactgtaatcttagtgcaataggacttagaattcttgtaatcggctaaaacattctgactcttccaaatcatcggccgacataaaaccttagaatttcctttgaaatttgcacagaaaattttatgaatctgaaatgaatctgaaaattttatgaatctgatatatatatgcccccctagttttataatggcgagagcattgataaaattatgcaccaactaagggcgatataacaatatcggccattgtacatcggcaaaccacaaccgatgacattataaaaacaactaagggcgatataacaatatcagctatctcaaggcgatgtaaacacatcggctgtcgtgtatcggcaatagtagccaatcatgcgtgaacccacacacttgggtaatatttcttcaagtatttaccattaagcgctcgcccatagacttccccgtcaagcccttgcaacatatatgctcccttagaaacaaccttatgaattaggaacggtccttcccaattcggcgaccatttgccgaatttactatcacgagtaccaatcggcaaaatcagcttccatacaagttctccctccaaaaatctttagacacaactttcttattacaatgccgagcaacacgttccttatctttagtaaccttcgcaagggctcgcaatcgtgactgaaccaaatcttccctctcatcagccataagattgtaatactcatcacgatgttctacaataaaatcggctatagcctgtcccttaatcgctttcggtgattcataccgaagatcaaactcagtcaaggaaaatatccacttcccaactcgtccctttaatattggagccgacagcatatacttgactacatcggctttgcatataacagtgcacttgttagataacagataatgcctcaacctcgtacacgaaaaatacaggcacaagcataacttctccacaggagaataccgagtctcagcatccaagagccgtcgactgagataaaacacaactcgctccttcccttccaattcttgaatcagaaccgagccgattgacttctcaccagccgataaatataacctaaacggtatccctttctgtggaggaatcaaaacaggaggagagctgagatactccttgatattatccaaagccttttgctgctctgccccccaagtgaattgctgattggcttttaatttcaataagggtgtaaaaggttccaacctcctggacaaatttgaaataaaccttctaacaaaatttatcttgccgatcatctcttgtagctctgtcttattttctgggggctgaattttcttgatcgcattaacgctcctttgagtcacctcaatccccctctcatgaacaagaaatcccaaacgatcatctcttgtagctctgtcgaagggatgcaacaattggcatgaatctaatcccttccaagcaataagctgtacgaaccctttccaccgatgacaaaaaaaggtggtaggaatagtcttgctgccgactgtcaactccacatttagaacacctttggtctccgatggattaccaccaaagtctttgagcaccatatttgtcttgatgagatcctcggcgttcctacccagcttcctgaacgtagcataaggcatcaaattcaccgcggccccaccatcgaccatcatcttagacatcggcttcccattgacgtagccgtttatatataatggtttaagatgccgattttctgtcccctcaggtttctcgaatactgcttgttctggcaacaggaccaacttagccgactcctcttccacttcgtcaacatcggcctggtcaatcccgaattcagctggcaatgtaaagaccatgttaatcggtgccgctataacactctttccttttcccaacctcttcacctcatcagctgcagcatcatcggctacgggaacctaattcttgacacgccactcctgtcatggctttggtttcctcagccgatggttgatttccttctcaacctcctgaaaacgctccctgctcctcaatctctggaccctcctcttctgattcttcgtgaaaatatcagaaggacaccattgattcttcctgatcgcttcttcctcttggccacaatcctgattcatcggacccaatctctgatgaacagggagtcttgcctgtttcagccgattatccctattatatgatcggctcgagccctcgatgatatcactgcatccagggcaattttcaatagatggcaacctcatcctttcgttccagcagaatctgaagaattcacaaccccgatgaggatcaaaaccatcgtcgtattcttcgtaatgcctttcctgctgcttatcatatttcctctgatacttgttgataatcttagccgaatttactcgaaaaccctttgcatgggctctattggctgcttgaccagctgtatgcaccatattcacgggaaaaggattcccatcgaccttcatcggcttcttggaatcatcaaacctaatctttcccccttcaatggcaacctggatttgctgtctaaagaccttacaatcattagtagaatgggaaccagaattgtgccatttgcaatatcttctcttgcctaattcctcagccgatgggatcgtatgaccagcaggaagctgaatctgcttttctcggagtagcaaatcaaaaatcttgtcagctttggtgatatcaaagtcatacttctcctctttcccatgacttttcccccattggcatggtataactttcttactcctcacccattcggctgcagctatctcagaatcatcttcttcgtcatccgaccaatacatatatggacaaacgtgattaactttcttagagcttttcctgacttccgccgacctatgctcgtgcaaggttaccttctgtattagatgcgataagctatcgaagtcttcggatgagaatttctccctgattggaggaatcataccctggaaggccaaatcggctaactgagcatcagttaaactcaagctaaagtacttgttcctcatctctctgaacctctgaatatactcgtgcacggtttcatcatgccgctgcttgatcactgtcaagtcggacaacttcatctcatggaccccactgtagaaatagctgtggaattgcttctccaaattggcccaactattgatcgacccatatggcaaagaggaaaaccaagtaaaagctgatccggacagaaataaccggaacaacctaactctcaaggcgtctacagccgatgcttcaccgcactgagcaagaaatcggctgatgtgctcataagtcgacacgccctcttgtcccgaaaacttggagaaatctggaactttaaaccgattgggaagaggaactctttcaaaccactcagggtaaggctgccgatacaaacttctagtttcttttggtttaagcccaaattgctccctcattacatcggcaatcacatcggcccacggtcgttgctgagctgctccttgtggttgttgctgcatgggctcgaattgaccaaactgagatgcaaactggggctgagccaatccccctggccgatattgggcttgcggggaaggaggctgatattgatagctcaagtttcccccttggtagttatgaagattcggctgggtattgcgtaccaagtgctcaggaaccatctgaggcaccatcgtgccatccggttgtgcatggtgaaccaaatgctctgagacgacttggtttacaaattgctgtgcaggttgcccaccaggtgctgtgaacccagccgatgcatttgctgaccccgggtgctgaatcggctggacgatctactgtcgtaccggagtctgttggatcggctgaagccgctgccttgatggcgtttgctgaatcggttgcagaggctgctgtcttgatggtgtttgctgagctggttgtacgacctgttgttggatcggctgtacaactggctggattggtggtgtctgctgaatcggctactgctgcactggatcaacaataagtggaggtggcaaaaacatggcagcaacttgatcttgggtcggctgattcgtgatctgcccagtagactgtggatgttccctcattaacaaccgagggttcatcggctggcctgacgccatagctgatgtagcaagtaggggagttgacgctggcgccgttgactgaattgtgggtgcaatagagggaatcacttggacagatggttgaacatcagtgatcaaagatcgataattcgggaagacacctccttgcaaataaactgggcctgtagcctgatgctcggctatcgaaccatcggctattttcttcatcatgtttgacaatgtatttactaaaaccccggactgattgatcagagcatgatgcacagcgtaatcaacccgatcttggaagttgttgaaaaagtcctgtgatagctcattattctgattaagatttcctccttgcggcccttgagcaccattaccttgagccccatacgctccatcaccttgtactccatggactccttgagggttgtcgccttgatttcccagagaatcaccagtatcacctttgttgcttggctgagccgagcctcctggagcttgtttcacctctccatctttagaagaaccggttccaggactatcagcaaccacttttatcttatacttctgaacaaacgttcccttgcgagtctgcatgaatgaattcaggaactggtcacgtgcttgctgcatcgttgcttcaaactcctgcttttgctcaggcgtgaatttctctggatcgatcggcatgacgttgtcatcaatgatgtcggtcaatcccggcttcggcgccttgcctttaacgaaacctgggcttgatggtggcggtggctgtttctcggccatcaggagggactgacgtctgacttctaatcaggtcccaccaggcgtgccaaaagcgtgttgacagaaaacacatggcctgggagatccgcttaactccagtgcaggtccaaaactcgccttcggatgtgttagcgtgccagttgatttgatcctgtaatcaacaagaaatagaagcaaagaaatcgtagttaaatttataaatgataggcgatcggctagatgccgatgacatatcatttatctttgagccgatgtcatctatgtatcgatcggcagttataaataagtaaagaagaactaaatctacttgatcggctgtagatattaacaatatatactccttatatcgatatatacttaaatcaagtgattgggatagatcagtcatcatgccaagacagtataaatcacttagatcaaaatatatgtcaataacaagattatatatgattatagcatagccgatcagatagatctagcatgtatcggctaatacttcgatactactctatatcaagatgttaaagcaagtataatatattgagcaaaagcctaatatacttaaatgcggc

SEQ ID NO: 10440 - DNA, 1345 bp, Oryza sativa
tattgttcctcctgttactccctcttccccagtgactagtactcctcatgatacatcatctatgcctgcccatttctgtctcaccgtatcctttgcatgacactcgtcgtcctcaaatcactgtaggtgatcagtcgccctctcgtttgactaaatccagcgagctatcaattgatgattctaatgagctacctgttgatgatatgcctataccatcatcaccatcttctcctgcagcacgatatggtcttcgagatcgcagtaaaattatgccacatcctcgttacagttgtgcaatagctgatggtgttcaggagcctcgcacatatcaagaggctgttacaattaatgaatggaaattggctatgaatgaggaactttctgccttagagcacacgggtacatgggatgttgttcctcttccccatcatgctgttccaattacttgcaagtgggtgtttaaggtgaaaactcgctctaatggatctattgaacggtataaggcccgcttggttgctcgtggttttcagcaggaatatggtcgagattatgatgagacttttgccccagttgctcacataactactgtccgtacccttatagctgtagctgcaactcgtcaatgggagatctcacagatggacgtgaagaatgcatttcttcatggtgatttgcaagaggaagtctacatgcagcctccaccaggtttgacatgtccatctggtcatgtgttgcgcctacgccgtgctttatatggtcttaagcaatctccacgagcttggtttgagcgctttagctcagttgttctaaaagctggatttgttgctagtgagcatgattctgccctatttatccacacttcttctcgaggtcgtacaattctcttgctctatgttgatgatatgatcataacgggtgatgacgcttctcatgttgccttcgtgaagcaacgtctaagtgagcaattcatgatgactgatcttggaccactaaagtattttctgggcattgaggttgcttcaacaccgaatggttttcatttgtctcagcatcgatatactctcgacttactatctcgctctggtctaagtgatgataaaactgctgccactcctatggagcttcatctcaagattcgtcctactgatgggaatccactttcagatccttctcgataccgacatattgttggaagtcttgtatatcttgctgttactcgaccggatatctcacatgctgttcatgttctcagtcaatttactagtgcccctacatctgtccattatgctcacctattacgagtgctccgctatctacgtgggacaccatctcgtgggatattttt

SEQ ID NO: 10441 - DNA, 26765 bp, Oryza sativa
  unsure (1)..(26765): unsure at all n locations
agtctagtcagcctcccccggggtagatgggccgagagggaatcggcccatcgaccccgggggaggcaaaatagacttttgcggagggatttgatttggaaggatttggattcggatttggactcgacgatagatcggggattgagatccgggatggcacggacactagacaacaagcaaggaaacaaatttcgcaattagggtttttaagagataattttcccgctaggcgccacgacggaatgggcgctacacaatgacacatacgcctgctggagctagcttaaaaaaaatctcaagttctgtcaggatggtgatggttgaattttttagagataatattattttaataaaaaattgcaaaaaatagatgtcagttaactaaaatcacaaaaataacatcatttcgaacctctctgacaagtcacatatcgtactaccatgatacagttaggtaggagatatctaaggccctcatcagtaagccaatagctttggctgatcagccaaagttggctttttcccttaagctaaagaaaaaccattgattggcttgattggcttatttggcttatttgatgaagattttttgtggccggtgctcatcagcccaataagcaattcaatgggctttggctgaaaagcctcagcccaaacatctatccgatgaggccttaaatcggatggcttatcaaacaatgaaagttcgacatgcgccgaagatctacaattgtaatacaacatatagtttgaagctagacgtacaacttacgaaacaaatagacatgtttgatttaccccttacagttttgccctaaatatgatacttcttccgtttcatattataaatcgtttgatttttttgttaaaattttttaagattgaccatgtttgtaaaaaaatatactaacgtctttaatacaaaacaaacatattatcaaaatatattcaatgctaaaattaatgaaaataatttggtattattgtcggtgatataggcccgggggtatcaggtttagagggaggaggctgccccccgatgccacgtagccctcccccgaggggagtcaagcccaaggtggggtggcggccactccttccccaaagactagtcggaggaggctgccccccgatgccacgtggccctctcccgaggggagtcaggcccgaggtagggcggcggccactccttcccaaagactggatggaggaggctgccctccaatgccacgtggccctcccccgaggggggtcgggcccgaggtagggcggcggccactccctggccgagactagagggagaaggccgccccaggcgccatgtggctcccccccaagggggggatcgggcccgaggtcgggcggcggccgccccctcccgtgactaggggtcgggctcccccgacctcctctctaggtcaccacgtacggtgggttaggtgtccgcctccaggtgcccacctacccgcatttatggcgtcccgagcggtcgcgccacgccgcatttaatgcggtgtgcagtgcactcaaccggtctgtgaccggtcgaatgactgatgggacccaagatgtcaggcgcaccatcgcgtgtgtcaggcgacgtgcagcccgacatatcccatcaaataatgatggtgagaggttctcatcctcttatcccagccggaatcggtcctcccgctctggtcaaggcaaggctcccgttttccggtgtaataggagcccagaagtcttcacccattaaatggtgactgacaggggcaccccccgtgtcaggcggcaagatttgacaggccccatcatcaagacgacgtgtgcttggcttcccaagtcaagagacaagacatgcatttaatgcaaagattataatacttctccaccggagctaggttaggttgttgggcccatgtggtaacccattgaggtataaaaggagatccaggcctagtggtggaggaggggacttcggggcgaactggcgcttgggtctcgcaaccccaagcacttgtgttctacattcaatcaatcatgcacaggagtagggtattacgcttcatagcggcccgaacctgtacaaacctcttttgtctcatcgtcttgaaggggcctaaccccctcaagatcacacagctccgctcaccaaaccctcgaatctcacccgctgcccccggccgaactcacaaagcggggcctcacggttccctggtggaggagttcattctctgacatctggcgcgctaggtagggggcgcgttcgtgatttttgaggttctttcgagcgccggcgtggtgagtgtcgcgccgccgctacgggggaaggcacagcatcctcaggagtgtcgcgccaccccaggcaggaggcaaggcccccacatccccaccaggtaagcttggctaccaggtctttgtggcgagtcttcggaatgtccgagggcccccaaagctccagccctgcctcaccgagaagtacgatgatggcgtcgacccctccgagtccctccagatctgcacagcgatcatagaggcggcgaggggtggcgaccgggtcatggcgaacgtcttccccatggccctcaggggccaagcgctgggttggcccatgaacctgcagccgcctcggttcactcctgggaggactcttgcagttttgagctccgggtgccttcaaagcccgggaccccctgtgctggctcttctgtagcggctggctttggtcccgccggctggctacggtgctcggcctggctcaactgatcgtcctttcaaacttcaagtattttcaattttgcaattcattagcttgaaatcttatatttatttcccccattctattctcatggccctgcgacgcccgcgtgttgcgcatttgtttgctccctcggtggtaagagcccaacctctctcccatctacatgaatgattcttcgctaagtgtgggggctaagttttctagccttatcctagccttaagttgagccccgggtgccgtcgacgcccgggaccccctgtgctagctcttccgtagcggctggctttggtcccaccggctggctatggtacccggcctagctcaactgtggacggggattgctggctctagagttttcggctctcacactcatgcgaaagtaatcgtccatgtagaaggaaaagagattggaaggaggccaccgaaaggaaagagcaaacagaatgtgtagcgtggggacacaggctcgtgggaacctgacctcgtttgctaagtggtcacaggcttcccaagatggttcggaacccatggtggggggccctcttcgagctaaaggtttgtgtttgcttcattcatacaagcaattctttgctataagtgtgggggctacgattcctagctctatcctagccctgcgtcgagctctgggtaccgtcgacgcctggggccccctgtgctagctcttccgtagctgctggctttggcctcgtcggctggttacgatgctcagcttcgcttgatcgcaggcgaagattgctagctatagaaagttcagtcctcacactcacgcgaagataatcgtttgcataaaattattattgcttatatttatctctcgcctatctctttgttgacgaaaaaatcgaatacaccggcctgggagatctgcttaactccagtgcaggtccaaagattggtgagatgcgagcgtaccagtcagtttgatcctacaactgacaagatatacaaatagtagatcaaaacagtcgatcggctgacaagccgatggagtagttccagccaatagcgataatagccgatgccgataccagccgatagcgatagggtttaagaaatcggctatatgtccaatgtaaataatgatatgaaggcaatcggctgatgatgatgtaataaaataacaatataatccagtagaaaccaatcggctagaaacaaaatacaataagcactgatccgaaggttaaagcatacatcggctggaggtccgatgtcatgaaatccacaagattggattaaacagtgaaacctttgtcgtcatcggctaaatccaacttatatgtatatgcaatccttatgagccgatgcaacgtccagataactcaccggctgaaaccccgatgaaacccttattggcagtcaaaaagccggctagagattatggttctaagcatgacttagtagatcaaacttaactgatgtagcactaagtatgaaaagaaacataatatctagacaatcaagccgttgactgagttttcagggtggtagatgtctaagctaatctaatctagcaacacgatttagccgataccggtagaaaccctaaaacgagatgcagccgatagagctaaattgatatgctaagactagattaacagagacatatgataaataggtaggcaaatatatcatccaaaccggagcaatccaagaggtcgaatgtactgatgcagccttgaatgacgccgacgtagacgatacaattgcctgggccgacggaacattggacttaccccttcgccggagatcgaacaccggtgcagccccgcgtcaggtgccaagtcccgctagacgataaaataaagtacaaaaggtaaaaggtggcgatgcaccgaattgtattgatcgtagagattgattacatagaccccggtttacatatttatacccatgggttgatacaagtccttgtcggacaagaaagaaactaacctaaagataaaaggaaaatataaagtccttatcgaacactaaacacactttcctaaagataaaaggaaactaacaaactattcctaattaatagataaactgccatgccgcatcctcattaaactcggtcacttagggataagcttcctttagtagattgatttccttaaccgaatatagcaggaatccgactattggcgacttgataactcccatcggctgattccgagatgttgcagccgataatgattctaagccgatgatgactttggccttaccaaatttcactatcaacaccgccgccctacctcgggcccgacccccctcgggggagggccacgtggcattggagggtagcctcctccatccagtctctgggaaggagtggccgccgtcctacctcaggcctgactcccctcgggagagggccacgtggcatcggggggcagcctcctccctctaaacctgataccccgggcccatatcaccgacaattataaatgttgctgttttttctataaatttgatcaaatttaaagaactttgattaaaaaaaatttaaatgacttataatatgaaacggatagagtattaatgtatagtagctatatccaccaaatatgatacgacatcagtccaatatggatagatcgaacacgtcccctgaaatataaaagtccaaacgtgggagcacttcattccaacatttccatcagcatgcactctagttagctcaatgtaaacaaacaaaaactgtcggccggtttggtgaactatcagtgtacttaacaacccctctttaaaaaccaaagcgcacgcaccacgcccgcaacaaactccccaccctcaacctctatacaaaagtaatccaccttcaagtctaaacaaagactaccaaccccaatatttactcatcagttgacccctgtcaatttagtgtgactatgtgagctgtaactagcatttaggcagcacttgaatagcagtttggctgagctagctagtgacatggaaactaacatgttaattagcacataagtaattaagtattacaaattttataaattgatctttttataaaaacttatatattgtttctttaaatacaatatttagcaactggaaacacatattcatgataaatgagtaaagcccataaaaccgtaggtacggctgtgttcgttatgtatggttgagaactttttttctcccacgaaaaacgagataactcattaccatttgatcaattaagtattaacttacaaaaaattaaaaatagattaatatgattttttaccacaacttttctatgaaaattttttaccccattacaccggcagtttcttaaatcaaaagagaaaaatattagagaagcaagcagtaaatgcagcaacgcgtagcgtcagccagacgaaccagagtctactgtaggagatcaagcgagatagccatagcccaaccgcagcgcagaaaaacacggggtggcgcaccgcgcgcgacactgcgctcccgtgcacgccgcacggaggagatcggggatctcggtctccctctctctctctctcggcgcgtcggtcgcggaggacacaggtcacacgagtcacggagccccgtactactcgccttcctcctcctcaacccaaaccccatcccgtcctcctcgcgtgtcaggcaacgcagagacgaaacccacgagacgtgttcgttcctgctcggtctctgatcagtttgctttgggcgtggtcttcctcgagtcccccacatttcttcctcccctccgtacggatacacacactctttctctctcgtgactgatccgactccgccgccgccgccgccgccgccgccgccgccgccgtctgctgctgctgcggggggtgggaggagatgaagccgaagagcctcccgttcatcgccttcgagcacaagcggtgcgtttcctctctcgcccggggtggggggggggggggggcgtgtttcgagttttgccgtctccttcctcgttgcgccgcgtgggtttcggccggttgctgtacgtcgcgtcggtttctcctcggcgagccgcgacgaggggatctcactttttttttcttgctgaggttttcgggtaatgcggcgagggattggctgtgcgcgggagcggcgagggctggatctcctccgcgcgaaggagtgtagggttgaagcataggatggatttgccggtggaattgcacgagttgagagctccgtgatgtttgctttttttttttttttgaagagatctgggtttcgacgtccgcatcctgctgcacgacagtaggagcaagcagtttccactgttgattcaggcattgagttgataggattaaacctgacgaaatttgatctctggtttgaatctaggagagggcacaaccgcacaagtctagaatcatcgaagttctatgcggtagttagttgccgttttggagaaatgttccctttctgatgctgtgtgattgaagcagggatgcctatggcttcgcagttcggccccaacacttgcagcgttacaaggagtatgcaggcatctacaaggtagaagacacgcgccccctgactttttttaatctgcattgtctggtgtggacaagctacatgccttctggtgctgtgtttgcaggaggaggaagaggagagatccgatagatggaagaattttctggagaggcagtcagaaccatcgggacaggaagagaagggtgaagctgccgggcgtgttgtggatagcagtggaattggcggttcttcgttgctgcaggagaagattgtgcaaggaccacacaagatcgagatatggaagccaatcagaccatccctgggcaacatagagcagatcatgagtgtacgtgtcgaggagaagcaatcacctgcttctggcaatcaggacacgaaggatgtcatccatccggtgaaggttcaagagggcaagttatctgaggattcagatgatgagttctatgatgtagacaaggttgagactagtcaagaaatgcattcaagtgatagtgcgaatactggcattgacaacaggggtcaagaggaaaattttccttcgatggaagagttggagtgtctagtccatggtggactgccaatggctttgagaggagaggtgcagcttgtttcatggaacctttttgctttgtttccttttctaactttagaattcttcagttcattcagcagactcttgcttttgtggtgacagctatggcaagcttttgttggcattggagtgcgtagggtaaaagggtactatgatagtctccttgtggcagaaggtgaactagaagataccagtggttcgcgttcttcaacctcggatgttgccggggaaaatactgaagtatcttctgaaaagtggaaagggcaaatagagaaggtaggtcactgagtccaaatttccttttttttttaatataaaaagctagttttattggaggctaggatttttcttatttagcgtttttatctggaaaatctgacaagaagccgtatctgccatttctgggctccttacaggacttgcctagaacttttccaggtcatcctgctttagacgaggatggaagaaatgctttgagacgtttgcttctagcttatgctagacacaatccagcagttggttactgccaggtaaatgtgccgttactggtgatccgcattgtgtcctttatcttgatggaagtcagcttctttgtaactctgtagcaacaattgattccaagtgttatgataaaatagtttgagtaacaattgtacttggatattggtgaactgtaggcaatgaacttctttgctggtctcttacttctattgatgccagaagagaatgcattttggtacaccctcatgccaagtgttgtactatttgtgtgttttcactgatataaaatattgtgatagttgaattaaataatattttaaagctgttgatggtgtaacaggacattggtaggaattatcgacgactattttgatggatacttttctgaagaaatgattgagtcgcaggtattgtgatgtttccatatccaggtttctgttggttgcatgtttgagtgcttggaagatggaactgcatgtttgattcaatcttatgtgaaatgaaccttgggttgtttccaggtggatcagcttgttttagaggagttggtacgagaaaaattcccaaaactaggttcgcaacttattgcaaatatgatatattggtgtggcgtgcctcatttagctagtaacttcaaaaatataataattaaaagctgatttccttttttgtgcagcaaatcacctggattaccttggtcttcaagttgcatgggttactggaccatggttcctatccattttcaccaatgtgcttccttgggagagtggttagatttttacctttgttgttctttcatgtttgtttcttgtaggaaaccccatttttaatttataccttagctaagccattggtggagatataacaactggatatgtgcaagttgaaattttgtgtttctcttaaatacttgtggaacttgttgtgtatctttccaaaatggtgtgaaactattgtaattgattgattgtggctttgtgtatcttagatgcggtggccagtttataattatctaagaaaagcctacatagttacctccacaaagcacattgatactacattatcttactagtatttattattccattctgacttgctggatatgtgaactagtctagtcaactataacccccttgggggtcagaggtagatgatgcagatccaagttatctttgtaagtagggagaagtagtaagacgagcccttggtccccacaaaaagttcgaaagtattaccatgttttccttttgtctcggatgatggctgtggcattgctcggaattgttgaaaatgtctacactactatcagttaaatttattatttgttacatctattatctatgtaagcataaccttgtttggtgtaacagcctcgtacatattctgcttggaagaaaaatgacaccatgtttatttctatatgttgtttgaacattttcagttctccgtgtctgggatgtccttctgtttgatgggaatcgtgtgatgctattccggacagctcttgcactacttgagttttatggtactgggaatgcttctgattctcatagtttcctaaaataaaacgacaataagtagtttcatctcgtgggctagctaggtactgatatttttcttgattgcaggtcctgcacttgtgaccacaaaagatgccggtgatgcagttacacttttgcagtctttagctggctccacttttgacagcagccagcttgtcttgacagctcgcatgggatatcagtctgtagatgaaacaggattgcaagagttaaggaataagcatcggccatctgttctatcttcaatggaagaaagagcaaaaggtctaggtgccttggacaccaacggtcttgcatcaaagctctataatttcaaacatgatcctgaaccactggtgtcaataagtgattcgcaagatcagatgagtgatgtgggagatgggaatgccaaccaaagtgattctggaaatatggatgatatgtatggcggtctgacagtcagttctgagattgaagctttaccggacccaaaggaccaggtagccatctcatcatagtaattagatttagtaaattgttctctatacctgaagtggctactgtagtttctagtttgaatccctgcagatcttctgatacgaaccagtttcattactgcatatcctttatctgaattatttttattacttcatatcttctatgggaatcagttttactacagcagatcttcttgtctgatttactcttcttacattagatctcttggctgaagtttgaattatgccgattgctagaggagagaaggtcagctgttctcaggtatgttttacatttcataatttgatattgtcataatttgctggaaagtcgtttttcattatttcaaaatgagaaatatacatgcattctgtcataggttgctggaaccatcttatgcgactttgcttttaaatagatttatggctaatttacccgtatcagtccttgagtcctgatctggttgtctaccagtctgaagtattaattccaattttcttctttttgatatccagagctgatgaactagagacggcattgatggaaatggtcaagcaagataataggcggcaattaagtgcaaaggtatagccagataactaaacttttgtataaggaggtgttcctttgtgccaatagtcagattgcaagttcagagatggcgtttacaatgcaactatgccacagaaataaatttcaccatgttctttatttcaagtatatataacagtgttttagaaataatcattctaccaaattataaatggtgcaagatttatctagtagaggcactttattttgaaatatccaaatcataaccaacaccagtatatcataattcatcctatgagctaaagatatctaattttctaacataagtgtgtttgaatgtccctcttctcttttaggttgagcagtcggaacaagaattgtctgaactaagacaaaccctattggataagcaggaacaagagcaagcaatgtgtcaggtacagttgacccattagtttttatagatgtatctttctaccatggcatgtccactcaccagaaattatattgaaggtactgttgcgagtggaacaagaactgaaaattgcagaggaagcacgcatctctgctgagcaggatgccgcagctcagagatacgctgttaatgtgctgcaggttagtcagtcaacaagctcggtccatccttctgagatcatattttctctcttaaaatcacttactccttccggtcctaaatatttgacactcaggacaaggttcagtcaaacttataaattccaacaatcaattttatattagaataagtttataaaatccaataagcttatgatattatgatagtactttttgaagcaaatatacgtgtatcatttttttgttttaaaactaagtatttaagaaatttcatggtcggaattttaaaagtttgatcaaaatcttgtcctaagcatcaaatatctataactggagggagtatttttatctgaactaaccaaaacggtagtcacgtacatttacatgcacacatgcaaatactgtgacatatacatatgttgtgcccttaaaacatatttgtatacttattttctatatttttgtatattgggctctcatcggatcctgacacatatgcaggaaaagtatgaggaagctatggcttcactcgcgaaaatggagaacagggctgtaatggcagagacaatgttggaggccacactgcagtatcaaactagccagcagaaagctcttctttcccccttgccttctccaaggtatcccaatttgcatcttggaatgttattagtaccaactgtgtgctactcaactgcttgagagttcagatcgcaactctcatttgcttatgaatttctgtactgttagaattttgaaaatatttttggctagcttttagagcatgtctaagtttctaatgagcaactgtcagttcggattgctcaattattcgtgaaaattagtaggctttcatgacaatgcattcatgttaaattatgttccaagttattcatgttatttagtgttccaacattgacatttgcttgactctgtttcccctccagaacatccatgatagacgcatcccctggtcgagcaaaccatgattcatcacaggagttccagcccaaaaaaataaacttgctctcaccattttcactgagttggcgcgataagaacaaggttattcttctgacctaatagatacattactgacacacgaggcatcctgtatgtggccgcaccaattttggcttagttaaatgggctttcaattcggtagataatgttctgtctgatactctccatccttgagttagaagatgacaagatgttatattataaattatatccactgtttagtgttttacaaatcatacaaaatgacctgccaatctgggttcttcacagggaaagcagaacaatgttgatgacagtgccaagcttactgatgcacatgatcaaagggaagaaataaccaacaacaatgacgagaagcaggtagaaacaccaaaactggatgtgctagaagagtctatgggttcacccaaagaagataacaagtcgagagtagaggtgccaaaggaaacagcgatttggcaagcgtccaagtagtcgcaaatgatatgaatgggcagcatgaacagttgcaagaaataaaactggattgaacagttgcaagaaatcacaaaccaaccttttgcatatatcttcaccactatggtattcttttatctgatcttaccatggttgtcgagagagttaaacctggagggcttcaaggttcgaacacgatcattgctgtacctattttttgctctgtccccttctttttaattgtttccttttttttttttatcattgccactcttgtaggtctataggttactttttctctccattattactcgagaagagaaaaaaagggcgaaagttatctggttgtccattagttaactttcgatgtaaatgcatcaggggaaattaccaaatgtagaaacacactttgcaattatggtatgcttgtttgtgaatcgtcatttccgctagcgagggcttgcttacgttgtcaaatgcaggaatctgcctcatttttggagttcatttgaaaagtctgaaagttctgaatgtcaaaagctcgttttgacgaggaaaagagcgtgcttccacttttatggattcttctacgtcaacttttcattttattctatttactatcctctgttattatcacattattaacatggttaacagacctgaccagtattacggttgtggtcttcgcagtagctaaaatcatttgttgggttggactctgttttggtcaaagtcatctcctagagattattgcctgtgaagacaagaatcatacgcccttattctccttaagattattgtaaagactaatgtctttttgactggagcattaagctgtgattgctgaagtttgttggatagcttggacccagcttattcccatatctttccatttctttttttgtttgcttactagctataccccgcttgtcatattttcaagaacaagtgaaagatcagtttggagtagtagttataaaccaccttttagagagaaaaaacgggaacaatcacacgtatttttgtttaaaaaagtctctgatgttgggattttaaccttggtgtcctgactcccgaacatctgaccagttggcctacaacatggtcggttaattctgaatttgaaatccaaacctcttggcattacccaactaatctaatgtttgtagatgtggccctggctagtccagtcaaagaatccatctcatattcatagacaccccaattccaaccttgactatgatcttgtgagcagttaattagctgccgatgaacaggccagcaccatgccaaccaagagaatgttggaccagtagagctctttcctgcctctctcagatgtgacctcaaaccccggtaatcctagcattagggatactatatattgcacatttgcactccactgagtaagatggcaataaaaaagcctgaagacttgctggcttgctgcatggtcttgcatgacattcatatctctattgtttgcataattgactcacattcatctgtatatgcttgtatagcctagtagtagcctttgcactatgttcagttaaaacatccactgtgtcaacaccttttatttgccagggccagacagctcacagctgaggcaagtgacattgcagcaagtcactagccagccagtgtatatatatacacacacacatacacgtgcaaacgggaggaggagagtacgggggttcttgtgtcacctcccttctctgaaaactactgaattcctaaggtgatcacattcttcttggtccttcgaaaagaaaaaaaaaagaaaaggcattcttctctgaggtaatcaagagattcttgtcacaattcatggtgtacatctgcaatgtgtttacctgaggtgacccatttggttttcttgttcaggtttcatcaaatggcagatgattccaaggcgcattcggtgaagggaagcgggagaaagataccgaagagaggacaaataaaagctaagatctttaggtctattttcgcctccctcgtagcgctagttcacaagatcaaagacaagaagaaaggataggaaatgtacatttggacctgtagtaatatcttcatcttggtgtatcgagctgcatccagcaatcatctactactagtataatactagtagtatttacggtattaatatcaaagaaataaaatctgggtaaaagcttcatgctgcgtttgcatatggtcctatgttttttttttccaagagggaactacacaaatcttaatgaagtcgatggaagtgcatagatttaatagctagaatgaggattggcttagttcaaattggcatgtcccccagttctaacctactacctcctccgtcttaaaataaatttatttttcacacataataatatatataaaaaatactagaacactctctccatgttaccaaatcctaatggaattgtctcccccactttatctaatatcaatgcatttatcccttatttttaaaaactccaatacaaagattacttgaaaataaacttattttggaagttggaacaaacaagaagaaacaaagataaaactattttaagatggagggagtctccctccagtaatgaaatcatatcattttgaacgtcgatatggtttgcaagatacaaatttgatcggaaaatatttaaaagcattaataaaattgtattatgaaagcactttctgagatgagtccaatctaaatatttaaaaagatgttaatgttaaagaatattaaagttctatttgaaacagtatcaaatataacatcttcttttaatctttttaccggaagcagtatacagatcagtaaacctggaaacttcagtgagttatcgttgtcatccacatcaaatcaagaaagcagcagtgcaaacttagactggtctcccagtaaattgcaggacagccaattatatgagcaaagatagaaaaccaaaaggagatagcaacatccacaaaagtccatttagtttggcgagatggcaactaattaaacatgtgtgcgtcagtgcatgatgatagtaataagtgaagaagaagaagaaggcaatgagaaaaactttatttgaaaaggcatgagaaaattaagctactcgctgaaaaagccaaagaaccacacacaagccaaatagacttggatcttgacttcccagttttatcatcagcataagcaggcaaatcagatataatctacagtggatttgcagtggagggggccacatgccaggccataggccgacaggatgttggacaaaagatgcaaggacagagacacgtcgggccgttggggcatgctaaagactcgaggtgagcagacagaaggacacaaatgttacaaagagttgtgtttgcctttgaatggtgatgcagagaattttcctctaaaatactccctccgtccttaaaaaaactaaccttagtatgaatgagacattttctagaacaacgaatctggacataagcatgttcagattcgttgttctaggaagtatcccatacatgttaagattagctttttttttacggaacgagtatactccaccgtcccaaaatataatgatatagaagatgattgaatatattctaatataatatatttggatgttttgaaaaaaaagaatgtatagatacattatactatgatacattcaatcctctccttggttatggaggaagtactgcttataactctttgtttgttctaacacagaatttcctaaaattcttagacatccataagtataggtcttaagtgttcttttttttttgaaagactagcggattttcccgtgcattttttgtttctagatagattttagtgtactaaattggacttaatacaagtctcttcaactttctatgtaatagatttgaaatggaattaaatttgatatacaattgtcgtcttttttttccatggataaaattgcattttgcataataaaattatattgacaatatacaccattacaatctaaactagacacatcacaacgtaatgatgcaaatcatattgcttttctcttattaacatggtataatttctagtagacctttatagcaaattgaatgagggtagttttctttttctccttagtaatatactactattctttttagataatggatatatgatttggtatttgcttcaacaaaagctacttccacttattacaaagtccttacctcaaaaccaaagataaaaatatctaagcacggtaagacgagaagacaaatttgaatcccaccaacaaaaggaagaagatacgcatacctcttattcacatagtaaggccctgtttagatcccctaataaaattttacaccatgtcatatcgaatatttggacacatgcatggagtattaaatatgaacgaaaaaataactaattacacatattacgtgtaaattgcgagacgaatcttttaagcctaattgtgccatgatttgacaatgtggtgctacagtaaacatttgctaatgatagcttaattaggcttaatagattcgtctcgcagtttacaagcggattctgtaatttgttttgttattagactacgtttaatacttcaaatgtgtgtccgcatatccgatttgacacgccaaaactttacacccctggatctaaatacagcctaaacctatttaatcttcatctaaagttgtggtaaaaaaattcacgactgttggttctacatccggcatacaagactgttggttctacatccggcatacaagattgaaaaccttatcctcatcatacctttgtaatcgggactaaaactgaagctagtaccaacgtataagattaaattgaagttgcataacatatcattcctactatatcaaagagtgcaacatacaacagatagatagatagatagattgtgctacacttgtgatgacattttgactgcgaaaaagtgcaaaatctttagctatgtggaacacctcacaccccccacccccccnnnnnnnnnnnnnaaaaaanantnnnngngnnataccannacaaaaatgcccaaggataaatgttttgcacatttgtctttttgttgcgcgtgtgtctcctcaaggctagtgtgttctatcttcttcctgaaacaaatgacatagctcatgcatgtcaatttcatagtagaaaagatatcaaaccaaacatgcttttgggtctcatgtcatgtccctatatatttgtgaaatttgggctaggtcgtcgtttgtctttatgcaatccgatccaccgacggtttgttggatcatgatattgttttacccatgtccctggagatcagcacacatggggccatcatgtagtgcaatatatcggcaaagccatatgtgaagcttacgcgtaatttggccagcagcaacgacaacgagtcctagaagaagacgaagaaatgcaacgcgtgcgtgatgcgatgtacgcagacgtgaattcttggttatttagtcaagtcatgaaaccttttaatgacaacgcaaaataggtagagcgctaaagctaggctaccgctaccatcggtggccatacgctgattgtaagctttacagcttatagaaaagaaataatttgtcggtatttacatatgtgtaatttcttaactatgtaaaagctaatgctgaaaaataaataacaaaaaaaatcttaaaatcaacttaaaatttaaattttggcattcgtttataagctactacctccgtcccaacatgtaacaatttttggctatgaattagacacataattgtccagattcatagctaaaattgcttatattttaggacggatggagtacagggcataagatgagagcatttccctgtttttaaaggataatgcataaagcagccatcggcaattatgcacaaagtcctcttcttattttgataatttttaaggtggtttttattggtagcacaatcactctataattcatgatgaatcacgaagtggacgtagctcgattagttagatttttagtggtaaaacctgtctatgtaggttcaagttctagacttaatatggatatgaagatcgtatttatggttaagacgcctgtggtgacttaatttatttggtggtttgtgtatttgatcggaattcagaagtcttaattcttttggccgacgtacgatcgctgcctggatgctggtccagtgaaaataataagttggaattcagagtagtgaaaataataagttggaattcagagtagtgaaaataataagttggaattcagagtattagtgaaaaaaaaggttggaattcagaagtatttgtttgtgagctgaaatgtcaaatttgtcaaatttcaaataacttacgtggtggccttttgctttcccccccaaaaaaaattacactctgagtacctgtatcatcttggaagcatagatatggtgtaaattcaagtaacctctgcaattaagccaagaacagatctactgatgaagcacagcactattaactagcctttcaacaaaagaaaattgatcttcattactaatactccgaaaggtccgaacaaaattgagggaaagatgaacaaaagggcatctacaatctagcagcagcaacttttcctgtcaccatgtcaactacatcgatccatacacatctacgtacggaatactcctactgcacagcacacgtacacaagcaatatactacaagtaatatgcatatcaatctgagtatcagatgatgatgatgttgctgttcgattggatcgattcagttgtagctggcttctctcctgaagctgctgcgatccgctgccttcttcttggagtctgcagcagcagcagcgtcgccgctgctcctcgtcgccggcgccatgaggttgctgagcgtcctcacaatctgccgcttcagctgccccctcttcagcggcggcctcttctccttgccactgatgaaactgccgctgctcttgtactgctggtagtagctgtagcagccgtacccctgctccatggcttctctctctctattttcttcagttcttgctcagttgctcctttctctcttctgaaactgaaattgttttttctctctcgttgcagtagtagcagttgaacaggtagtagttgtgttgtgttgtgaagcaggttctagtttagtgtgtggagatgatttgagaaattgagaaggcaagaagtatttataggcggagtgatctgaagtgtcatgctgttctgttgccgcacatgttaattaatttaatctcggttgtaactttgcatcagccggggcgggtgtgtgtttttttactattctttgaaggaacaacttgaccacttctgggccgggaggtttgtgatgtgatcatggcactaataagggcatctatgccctgaaaacgacagaaatgacaattgattactactacctggagggcaaggttaacgtgcttaattatatcaggcaaaaatttctacctgatgtctaccactgtccgcacatatttgcttctttctgttcgtgctcatcatggacgtgaccaactgaccaaacagtctctccgagacattgctgtcaaaaataggagtcgatttgccatttcatttgctctatcatcgagtgacagatcgattaatcgattgacatcttgattaagctgggttaagaagaagaagaacacgtgctgatcaataactgacggctgcttcttctgacgaattaagagcggtagcagcagctagcttagcttcaaggttcagagaatgtggtcactgtttgacctgaggggggactctgacgatcgagcttgaggtgtcagtgtcactggctctctcgcagcatgcaacccgctcaacgatggacaccttgatcagcaatccgccggccgaaatagctttggctttgctttgattgctttgaccttatcgcatgcttcttctgacgagctagcttgtgcacctattatccatgtgatgcatgttgatcattatcggaaaagaattgtgattgataatcgttttgtcatgtaattaatgttttctgttttttttagagaaaagagctagttgcaaaggcattgtctgaagatgaacaaattaaagagagggattcaggaataacatgtttacttttacatgatgtcgatgtcactcaaaactctggatatctaggagaaagatcagatgccatagatgtttctggcgatctatccaccgttcaaagccttgagttaatgagttctgcctaatgaactagcttaattaattatctatgttatacttttgggaaagataggtatagcattttgttggttgaaaagacattctcagtaactaacaaaagtaaagcactgcgctctctctctatataataagactctaataagagagacatcacagcatctatacattctagcacactgtaatataatttgttagttttcacatatgcttttgctgagtgatacacagtaccctccctgatccacacgcccaacttgcctatatagctaatgatgctcgtattagtgaccaaactcattgcagccgtgagtttttgggcgtaaaattcccaggtttcacacccataaacatcatgggacccggtctttaagtactgaccttaaagcagtcaatttattctcctgcaaaggaaaaacaagaaaaaaattaacagcatgcatgcatcaaattaacctgcaggctatagctagtgaaacttgcactagactgcaagagccctcacctaaaaattccatcctactttccatcacaaagaacatatatactgatatagttatggcagagcaaatcataattaagagggagtttctggaaggaaaaaaaaagaagagctcttaattaaagatagtaattaagagaccatggtggagtgccaccaccagtacaccaacagcatgaaggagaagaggccgccaccgaggagaggtcagctcaagcggcagatcgcgaggaccttgagcaacctcatggtgccgggcggcggcaagcagatcgcagcaggttcagaggagggccaggctgcagcaaaagctcatggatgcttcaggcttagatgatgaattgatggggagagtatggctgattcaggttcaggcttagatgatgttagttgttaatctattttgtactatagtcgttagtttttgctttcagaacctctctttgatatcctatataatgctgtgtttgcaatcttgggttcccaacgtatataggagtagtgcgcacagaaaacggagtgttcattaacacgtgattaattaagtgctccctccgttccaaattagttgtctctttaggattcaaatattgtcccaaaatacttgtcacaatgaagtactgcttgtcccatcaatcacttctaattcaaaattttctcttttttacccccaaccatcctcccacatccaaccatacatcatttaataaaggccactatagtcttctttgtcaaacattaatccatactaaacaacctataaactaatatgggacaaaggttatattagctaattctttttaaaaaaatagatcaatatgatttttttaagtaactttcgtatagaaactttttatgaaaaatgcatcgtttagtagtttgaaaagcgtgcacacagaatacgatggagagggattgggaacccaggattgcaaacacagcatgcattcagcagcttcattatagcaggtataatagcaggctataagctagctataaacacattttgagaagataaaagatgagagagaagggcagtggtctacaaatttgtagccagctgcagtacagactccaaggtgcatgtgtgtataacaggtgggaccagatattaattatgtactatatatttataggtaactattgtataaattagttattaagttgactatagataatttagagccagcgattggctatactattaaacttgctcttaggagagttctgccaagtttagttagtaacatgtactgctgtgcatctctgaataaatgttaaggaggcttcatgtaagaattttttgatgatgatgatatacgatattagagtgaatttgattaactcatatgtgagtatttatggtgaattttgtgtactcaaccatgtttgaggtagcttctttacatcagtgcagctactttaagaaatacagaaatactacagcaggtattatcgttggaacggaatagtttatattaattgctaacgtcgtaataacgttacgaggacttcaacttggtacttctacctagatagagaatcatgattaccatggtacgtcaggacaacgctacgagatactacgctgacttcaaaatagtactactgatgtgtttagtttacacaaaaattagaagtttggttgaaattataacgatgtaatagaaacgttggaagtttatgtgtatagaaaagttttgatgtgatgaaaaagttaaaagtttaaaaaaaaatttagagctaagctcggcctaagtttgtaatacccttatacgggcataccaggtttggcagcatgggcattagatgtagtgccatgttgacgtcagcgatggtaggtgacatcaacacataaggtatcatgttagatcaacaagaacccatcctctagtcttcctcttataaagatatctaaccactacactggccaaggtcacctgtgacaggcccaaaccctcatctttgacggcttcgcgtatggtcagtgattagtggtcactggtgagtccagtcacctttgacgggtggccggccgtcacaggtgacacccacctctgacgggcaagttactataaagccgtcagaggtgttggtctccgctagcctaggacgagttgggacccgtcacaggtgactcatctctgacggccctttaaataaaggccgtcagaggtgatggtctccgtagttagaagctgtcacaggcgatctacctgtgacggccccaaaagtaaaggcccgtcacaggtaggtcacctttgacgggcctttatttgctagtccatacaggtgatgttacctttgacggatttttgttccgacccgtcactgatgagttaattccagaaaaaaaaagctaaatattggctagcctcaggatttgctagccatgccctctgaaacacagatacatcatagatatattccagtcaccccccaatataacatcacagatccatctcaaacatcacagatccccaacaacacagatccatatcaaaaattgacatcattcacatatgcagttcaaatgccacaattttgcacagcaaattcacaccccttgaaagccacaattttggtcgttgctcatataaccgcatatatacttaccaaatggattaaagccataatgtcctcgacctccacaacctgtcaataaggaaaaaaaaggagaaaacagatgaatagtacaacgtaaattgtagttgatcaaatttgatgacaatttagtaaactaccataaatattgcacatatgaaagtaaattacattgcactccataaaaacatattttttttacatcacaagaaattatgaaaacatctttttttacatcacaataaattatctagccaagttcatgagtctatttgacgtgaaaacgtcctttcttattcattatttctgccataatgaaggcgcacacttcgcctctgatagcgcggggaggaggggggagggagggttgatgggtgagatcttgaagccagctctacctttctgtttaataaataagatgttagcacgttttgaatagcaatgttggtattgaaatgagcttattcgccattagcaacaacctcagggtcgaaatctttcacctctcttagacgtgttgacatgttgtggcacacgtggaaaccatattggtctccgatctgttgtgcgcatgcgaacttggtgtcatggtaaagttcgtccttgccctccttgtgcctaccacccttttccacatatgggccccaagccatatttaagaccttggtgatttcagtgaaatcataatctttggacttattggagttaaggtagataaccctactccacttaggtacgatgactagaagaatccaatgtcacctgcgcagttgttatgtagcgttagtactaagaaccttaacttcaaaaataatatacacgaagggtattgtcctcttactcttggttgtgtgcgcacatgatgtactccttgtcttgataggcccataaacactggttgacatagtcaaccacctcagtgaagctctgtcgtaaattaacctcattcaccatggatggatcaaggaacccaacctgattaccaaggcgacgactctcgatccaacacaaccttaaaacatttatgtattagaactaatttaattaggagatatagtccaatcatatcacaagtatagaaggtatgcacttacaaggaatagcattttagaagaccagtgtccaactttcggatcctgaaaagatcgaagaggtcatcaaagcctatagttatataggcaggcgacaataggaactgctggtggtcgtgatgtccaattatggatgactccctcattttccgcttagcattgcttagctccatgtattgcttatgtagctctcggcaagcaatacccatcacggctaacacattgccctccaccaatggcatgcctagctcaaattgggctggcgccctcacgaccttccccgctttgctcaccggcatcgacgtcgtagccttgcccctttttggctccggcgccaactccccgaccttccccttgccgcgttcacgcttctggcccttgacaagtggtggggagctatcggcctttcttgtggtctttattggagccaagctttgagctatatctaccaagtccatatcagctccaccaggagaatgaggtactgacaatgccggtccacagggagcctcaattgatagcttagacttgggaggtgtaagctccgtcggtcgacttggacgaggagtcatcttcacaattatatcttctttgggccattgtatgaacgtcttgcgcgcatcgcccaaagtcatgatttcatcattggggggcacgggcagcggatagcctgaccaggtgtcctttactgtatcgatggacaccttggcatacccagctagcaggtctgtgccgtggaccttgtctgtaaccgagggcttgaaagccatgccctcagcaacttcgggagcgaaagttgggtggaccctcgccagtaggacacactgtgctacgccctgcatatgtgaaagtctgaatttaatattggaacgtgtaaaggtttttttattagatatggattggataacatcaattacctctatgtggtccactgcagctagtggtgtgaccgggagaccaggggacggcacctctgtggatgcacaactactcctatgctgtaacggactcgcgtcgtgttgtgcacgaggagttggatgcacagcaggtgttgtgcctcggggtatattcatgtcggcgaggaccttgttaaccctttcttccaccctagcattcatgctagcttctagttcttgaatgacctcaaccttaagttcggccttcaaacgagcgtccctctcttccttggtgacttttcgtttcctgtattgggagctgtactacgggagtccatgcttcaaggacacattgctaccaattcccctagtccggccaggatgttctttggttccgagcgcctttgtgaggatatcatcttcgcgcctcttcggcgcggactcaacctcgctttgtg

SEQ ID NO: 10442 - DNA, 53376 bp, Oryza sativa
ataccatttttttctctaactaacaaaaaaggatagcttttgaggcgtgattcaactatagaaagcataatgccccaattcattccaaaccaaaagaggagttaagtggtcaatctgcaccaaacaattaggataaaatggtgactcaatcttcagttgatagaaacattcagttttatctttggtccgatttgactttcttgcatatgtagaattcttatatgaagtcactaaattatttcaggtttcatgcccttgctacaaaaaaccaccaagctatactcagggagtttatgccaacatgaatagagtaaaacaactgctttcattataagcaatcgcgcaaatatgttatgaagcgcccatgcttgccactgtatcatttcttgacgtggatttttctttctttatgtggataccacagaaatcagcatgattttgatatatgtttggaaattaattatactttaagatagaaacataagcctaagtgcactagtaagaaccatgacccaaactgtacaagtacaaataaaatgcaacggtgcttatagatggaccagaagtctaaagtgaatttattggaaagcaagtacctacactcaaagcccagatgatccaagtatgacacagcttttttcaaatttagcaccattccgggtaaacagctagcatttttgcgcgaaccaacttcctctgctgcttgcagatcaacatatagtatatttgtatttgctggatagttagcctgcaaactaaattaagaaaagtatagatgataaaatgtcaatacctataaaaggaaaacagccttattcatatgcatcaaacataaagggtgaagcagataaagtatatgttgccatacagcatcaatattttaatattcaggtaggtttgcatacttgcattgcatttactatttccaaaagtcaaagtaacacaaactattggtattgttctggaatcttgattttttttccccttgatacttttaccaacagaaagtatcactctcgaagactgcttcataaacctttctgttacagttttgatactaagaacctaagtttataactcgcatttattaagatattaaaattagccatcaaatttcttcctaatcatatgaacattccagtatgattaacaatttaatatataggaaaattaaaacaggaggaagggtaaagcatcacgagcagaaaaataagtacgcggttggataaaattgaaagaaatatttacctgccatttgttactgttggttctgggatgccatatttttcaaactcagtgtattcaatgcaagtgataccatatgcccattgtccatcctggttttctttttcgattagtacatttaccccttcagtagcactggtcttcgttcacaagacgcaaaacctaatttctggagtatgatatgtcagaatatggaaagagaacacaatagttgaattcaaaggtgcaaagttaacatggcagccaggatttgcatcagtagctaatatggaacactcaaaaggtaaaatgaaaaagagtttcatattacccctgggaaaacttttaccttatcgtgacgcaggcctattcctgccaatgccatcagtgttaaatcagttgcagccacaacattgctgaaaattacaagacatgcacagttacttcctttccaaataatatgttttgacaatgattaacaaacatttgattcttaggataacctgacttgacgtacagttgcgccttttctgccattttggtaaagccattggaatatacctctatcacatgcaagtttccaaatagcaccatgaccaccaggcttaccaacaggaaaaagtgctccgctggttaaccatttaccatccttagcatttactacaggtaccaaaggctataaaagtcatgatgagatttagttagcactgtaccatagttttggacagaatgagtaccgattttacagactagaaagacacacaccaataaataaataaataaataaataaatactagaaatcttgattatatacctgttcaaataagcggaaattctcacggcctctgccaaaccattcaagtctttcacatattgcagttatatgctcatggttatccttcacagagcttgtcatgatcgcgacaggagttatacattgtttcccaaaaatcttgaaatgcaaaaattccctagcctgccaaatatggtgccattcacacaattatattactggtcatagttctttgaacctttttaaatttctcatgacagagtgctacaaaggaaaagttatgcaagtaatacatatgtaaccatagacactttacacccttttcaatccttgtgaaagaacattacataaatgtggtttgctagaatatttttcatatagaagttagtgtcacctaatgaggtgtactgcataaatagaatgcggaaggagcaaaccaggtggtttctacttcctccatttcatattataagactttctagcattgcccacattcacatatatgttaatgaatcgagacatatacgtgtgcctagatttattaacatctatatgaatatgggcaatgctagaaagtcttataacctgaaagctaagccagtcaatcccctattgttttcaactttcaagtgataccctcagtaaaaatattacaaataaacaaaagttccatatacttagcagaagtacctgcagatcacgtatgaggccttctaatagagatctcccacaataaggaagcaatgcagcagggagggattcaccagtatccgagtccactaaaccaagacgatcaccagcaccaccaatcggataaatctctcctagttctggcaaaccctagaaacggtcaaatttcagttcatctaaagagaatgtaatgtctttgacaaaatgtcccgcactaaaaaaatcagaccacaaatcgcacggactatgctattgatctctttggtcaattttaggtaatgtagactaggaagtaacctcaatcccccacagagcagcttgagatgcatattccgtatcttccaatagattaagtccacttggaacatggaagtcaatagacttgtgtttgctaggccggtgcttgtggtccttcgaggctgaaagcaactccaatgccataatctgatagctggaaccaataaaggaataccgatagtgtttcagatatcagggtgaaagcaaaacattgtttaaattttagtgatgttttaaagagcactgcactagagtacaaacaagctatggcaataaggttaccaactcccagattttggccaggagcacaggattgcttggcaactttagttaatccctcgttttactaagtctacaactaaagcaaagcagcaaacaagcaattctcagtttctcacccgatgatgcctccaatgcagtcatagaacacgtcgatgtcgccgaggaatttgagcagacgccggagaagctccgattccccgctctccgccacaccctccaccactccctccgagctccacttgccgaccaaagcagccaagctagacagcgcctgccgcagggcgctccgaccatcgctcccgccgttatggtggtgatggtgctcgtggccgcgaccgtcccagtcgagctccgcgccgagcacgtgttcctggccggcggcgactaggcatttgagcaggaacacctcccgcggctcgagcgcgcccagaaccccaccattcgacccctccccgaagaactcgaccacccgggtctcggcgtcgagcgcgcggagcttgtcggcgagggagcgagccccgcggaggcgcgcgcgcagggcggagaggcgcgcgagctccgccgcgagcgccaggtccccgccgccgcgcggctgctcgcgggaggtggccggcccgggcccaacccctcgctcgagtggcgcggtggagacgctctgcgagcgggaggccgaggacggggacggggatggggaggagagcgcggagaggacacgtccacggcggcggcggcggcggcagccgggggagcggagcggcgggaggcggggcgagcagaggtcgaggcggaggtggggtggaggcagcgtgcgagaggccatgcgaggagtggagagcacaggaggtggtggtggtggagagcgagcgggcgggaggaggggggggagaggtgagacttgagaacgagggagagaatggataagaggaggacggcgagaccgcgagagcgaaagcgaagggggcatatgctctcgggcggaatctcgggtacccctgcgtgcgcgcgggcgtcgcggaagacgcgcgcccggcgcgccggttgtcacttgtcaggtgatctttttgctgttttctggtggggccgtgggctgcttcttgaaacttcgttgctcgtagcccatttagggcctgtttggtaagaccaaaaatatgggtccattactgtgtatggatcagaaaaaaatggaaaattttgaggaaaaagtacaccgaaggtccctcaacttctcatcgagttaaaaaatatcctcaaaccgcaaaaccagatatccggcgtcccttaactaatcaaagctggtcacaatagatccttatgtggttttgacccttggttttggcctacgtggcggctgagtcagcgtgggccccacgtgtcaaggttatccacgtcagcctcctatccttctttccccttttctctcccgtcatcatctctctctctcacacacacttctctacaagctggccagggcgaggcaggagagaaggagcgcggtgccacgacggtggcggtcacagtggggaagcacgtagagatgacacaaacgtgtgcgggacgaagaggatgggcacgatgcggcgggcgtggacgctgggaggctggtgagctcctcccaagtacaaatccgatgtcggctttggcttggcggtggcggcaaggcgggaggaatgcagcgaggagggcgacgccatgagggcgcttgaggaccaatgctacgatggtggggaggcacggggaagactggtctcggcttcggcttggtggcggcggtgaggcgggaggcagggacaggcgcgacggcggtagctctccaggaccaagcgtcgtcgttgccaggagctaaagggcgtcgccgtcgctggaagctagaggggcgagcggctcattagggctcgacttggacgacaatggcgatgtcgagcaggcggtgtggcggcgtcggcaggcaagcgcggctacggagaggcgacggcgggtgagcagcggttccggacgcgggcggagcggcggcggtagcgggcgagaccgctcttggtgtgccgacgctcctcttgctagcgcatgccgaggcggcctccgaccaggcgtggcgccgcgactaccccaacccgtcatcgtcccccagcgcaggtgaacctcgtagagcccctcctgtcgctcacgtcatcttgccaagagcggtcttgatatctcgccggtcgccacgttgccccttttccgatgtcagacgtcgctggcaccatgctcccctctgtcctcttcgctcttcccctgtgctactgttgccgccgccctccccttctcccacgtagccgccggcgccgtgtcgctgtgtttccccgccgcaggccaccgttgcggcccgccgccatcttctctcccgcctcgcctaccggtctctgcacccaccgctttgcctcgcccagaaagagagaagaggagaaagagggagggtgatgatgtggatcaccctaacatgtggggcccatgtgggttccacgctgactcagccccacgtaggccaaagccggggtcaaaaccaccgaaagacgtattgtgaccagttttgactatttaagggacgccggatatctggttttgcggtttgaggatgttttttaactcgatgacaagttttttttttttttgagaaggtaactcgatgacaagttgagggaccttcggtgtactttttccaaattttgttctttgatcaatgtaagccagaaattgggcctccgaaacgagggctcaggccttctggtttgagtatttgacttgggctaagcaaggtggcccaaagagatatttttggggaggagaggcccaaagaaatttggatggaacgccatcgttacggtcccaggctcccagcaccagactcaaaaggtagtgtttaacatcaatacggtaaattgttaaagataagaatgccaaaaaaaatcattagtgttaacaaagtttagatgttggaagcattattacatctgcaatgtttcctgttgatagagtttaggtgtatcctcaaccgtgtacacagggcacacggaaagcaattcaatcaggccagagctgcagataaacccagcacttaattatcagctcctcaattcaaattccaaccgtatcacaaaaggaaaacatttgagttaaaacgactgatgaaacacacgtgcatgcaccggtcactttgatcgagcatgtcttaacgaacagcacgagagctttggctgttggagataaggcgggaacgaaaaagctcgatgtcttaacgaaacgattacaccttcgtttgaaaaatttaaatctcctgcacgcgtaaatctctcatcgccccgccactatataaggcgaccaggtacccgaccccatgaacacacaccaaaccacctcgagatcgcttcactctcgtagcaatggcgccgtcgctagccaccgtcgttgcgatcttcctcgccgccatcctcctctcgtcgccaccaccctgcgccgccgcttcgtccgcgccagcgccggctgcggccgggcatggcgtcccggcggtgttcgcgttcggcgactcgacgctggacccgggcaacaacaaccgcctcgccacgctggtgcgcgccgaccacgcgccctacggccgcgacttccccggcggcgcggccacgggccggttcaccgacggcaagctcatcaccgactacatcgtctcgtcgctcggcatcaaggacctcctcccggcgtaccactccagcggcctcgccgtcgccgacgcctccaccggcgtcagcttcgcgtcgggcggctccggcctcgacgacctgaccgcgaacaacgccctggtgtccacgttcggctcgcagctcaacgacttccaggagctcctcggacacattggctcgcccaagtccgacgagatcgccggcaagtccctgtacgtgatctccgccggcaccaacgacgtcaccatgtactacctcctgccgttccgcgccacgaacttccccaccgtcgaccagtacggcgactacctcatcggccttctccagtccaacctcaacgtcagatcaatctacacatcacaactctctctctttgatctgatcttctttcaatcttacataggtcactttagatcttagattcacggtagagttgaaatttgtgtgttaaattatagtggtttagaattttaaatttcatctaaaatagaaacaaaatgatttatccaaatattatcaacgtaatcgtagatctaatattatagacttgtagagctaaaattatccatctctaaaaaaaaaaaatcttgaatccgcagctatgccaaagaggatgacatactcatcttcatgatcaaaagttaaaactcacaatgcctttgtgtgttattattgaccgtgcagagcctgtacaagatgggggctcggaagatgatggtggccgggttgccgccgttgggctgcctcccggtgcagaagagcctccgcggggcgggttccggaggctgcgtcacggagcagaacgaggcggcggagcggtacaacgccgcgctccagaaggcactctccaagctggaggccgactcacccggcgccaagatcgcctacgtcgacatctacacccctctcaaggacatggccgagaaccccaagaaatacggtgagcaatgctcctcatctgatctccttccgtccaaaaaaaaactaaccttaaataacgatgggacataacctaacctagtacaacgaatcgagttttttttttggagaataagggagtactcatgcacaagatcacgttgcatccggtgaacttttgatttatttgatcatggtgtgtgtgtgtgtgatattgcaggtttcacccaggcgagcctcggctgctgcgggacggggatgatggagatgggggcgctctgcaccagcgcgctgccgcagtgccagtcgccgtcgcagtacatgttcttcgactccgtgcacccgacgcaggccacctacaaggctctcgccgatgagatcgtcaagtcgcacgtgccgcagctcatgcagtaattagatggtccgtagcatagtttagtgtccagtgtgttaaactaattattaagaataatagatatgcatggttcagtagctatagagtttttgcatagagtaaagtccatcaccggtccctaaacttgtaccgctgtgtcatcccggtccctaaactcgcaaatctcggtccctaaacttgcagatcactcgtttaggtcctccaacttgttcagttgtgtcaccccggtctctaaacttggatttgaatatcatctgggtcaaataggacggtctaaagactttatatttaaaaataattcataactttttcatgtgaactctaatgaagacaaactttatatcaaacttgtagcccttgacgcgatacacaacttggaagtgaattttttttaattttaagtcattttttgtcccaaaatgtaatttcaaaattaaaatttcaaaatctataaacatgcaacaatattttgggaccctaaacagttttaattcaaaaacttttaaactacaaagttgtaggtcacgtcaagggcaacaattttaatataaagtttgtcttcattagagttcacatgaaaaagttatgaattattttttgatataaagtttttagaccgtactgtttagggaccggggtgacacaactgaacaagttggaggacctaaatgagtaatctgcaagtttagagaccgggatgacacagtcgaacaagtttgaggacctgaacggtcgatttgcgagtttagggaccggaatgacacaacagtacaatttagggaccggtgatggactttactcttttgcatacatatgttattagttggtccatccgtatagggttaggggcaaccacaatgtatgaaaaaggtaaccttaagtcaatgattgcacttgtaaagtgagccatatacattgtgaaaagtagcattagtttagggtgcaccttatgcttaaggtctaccacaagcaaaaagaaaatattttctctttcattcacttcatgaacaagagatgaaacaattatttttccattctatgtgggcccatcttatggctaaattctaaccataatattgttagtatggctttaacaatggcttattaaggttacactacaccacaaacattgatgatgcccgtagagtgggcagatattcagtgcaggatgtgtacacagggttaattttaattcagtttggtttattcaaaggaattgtgagccatctcatagtcgcagtcacagacaacagattgatttgccatttacattgtctactagtatatctagattagaaatcaagcgcatggatattttcttcacatttggccctgcatatactgaattactgatatgttcaaacagtcaaacagtacaatcacagactcctaaatcttactgaacaggaagaataaggaggccctaattgatctgtcacgatctaaagaacatgcagagacctatccatagaaagtgtgttactgaactgtgacggttatgactcgctgatagaatcgccattctactacgaataacaggtctgcaggcaaaccccaaaataactgacgaaactcccataattttcccaaaaaataaaatagtttatcatcaagcccctaaaagcaaacttctccttgtctccaaattttcccccaaaaaagtgagtttggcaactaccactataagcttcctaatccatcaaaattcctgtcttaatattaataacctgaaaaagcaaacaggaaacattatggacacatgaatagtcatatgaaaatttgtttggaaaatgacaattattctgtgttaatttggaaaaaactaaaaaaaaagtgagttatcatctgcaattctggataaatatatttttttaagacaagaaagaaggtcaggcacgcttaagcccagtattatgacactcacaatttcacaattttcagtttttaagcagtcaatcatacttgctatagaaaacaaggactattgggacaaataacgtacttaccctaataaacatcatctttacttgcctctgtctgaacggaccagaatgtcagccagcgtctcatttttcatattgttcttgcctgaaaggttgatctttgaatgtaagcacaaaacttgagcaatggccaacagttgcaatcaacacaaatgagttataacatgtcgatttgtgtgcagttctgcactacatacagtcatatagtaataattgagctagtcaatgatactgacagaggcttatgagtatttgtctcagcatatcaatatgttgccattaacacaagaaaatataaatattttaacataactgataacttatatctgagaaactcaaataaacacataaagaggcctagagtatgaatcatcttaacatgtgccttttaagcttgactttacataaacatgtaagcataatttagaagaaggttcaaatttaaatttcacaaacagcagataaaaaaaatttacaccggaactttatactccttccagtcatgtttacatgacgtttaggacaacagaatatacttcataatagcacaactaagctgtcctaaatgtctagtatacttaactggagggagcagttgttacttggtagcaaattcctaaatgtgcctactgttatattgtagcgcagttctccttttttaagggaagaacacagtctgactcactgactgtaatcagtagtgtagcccagagccaagatggatccggtgaaatttcatacacattttgtaaagaacagagagtgatattatgaagacacaaaagtatcaacaggttcatgagaactgagaaacataatgtagactacaataggattattctaataaacccacttatgacagcaagaaaaacactttaattccacaagctaagctagtagtttttttttagataatgagctaagctagtagtaacatgttaaacatcttcaaaaaactttctttatagggcaattttatggtacttgaggagataccatgaagtaccattttttctattgtaaatttggtacctcatgatacctaggtactatgaggtaccaaaatttacactaaaattttggtacctcatggtacctcctaaagtaccgtagaattactcttctttataactaaggctttggtcgatatcgaaaatgttcagacgcttcaagaaacgtgtacataaacaaattccagggccgccaaacaaaatgcacaatgcagcaaaattgactaaaaaacgtacacgcattcattgagttacctgcattagggatcgggaaagaatcgagccacggtgggagcacacatggaagcaagacacctgacgagctcactgtcgggaaaacgtcgctgcatagctcagagcactgaatcaccttcttcaagcgcatgtccacgctaacactaaccctctcaatcgcgaggtacaggacatccgcgttaaacggatcaatggcaccgatgtacggtatccccttaggagatccccctttggccccgagcgtagacagcgccacctggtgatccagcgtccagtggccactctcgtcgtccagcgtgaacgacatgacaacgaacggctcctgatcggagacctcgacgtagcgcagcttgccgttgctgacccccattcgccggtgcttgacgattcgttccatccctctcgagcacggtttctcagagaggatgctacctggcggcaacttgatggaacgggctcaggccggtggctgaacgggtcgacagcgacggcgccccagctcacgtccacccaccacagccggccaccgaatgccaccacctcgtggttcattcccattgcccgcccgggcggcagcggagacggcatgaccagcttgctccattcccttgtctccgaggagtacctgcgcagcaggaatcgccggccctcgtcgtcgccgtcgacgttgctgagctgcgctgcggcgtacctcttcggcggcccgtcctcgccgccgccgtcgcgttgggtgaggatgccggtgtggtggacgtccacggtgttctccgtgccgtcgaagtccggcagccggaagagctcgccggtgagcgggttgcagacgaagctcgcgaagtgctcgtaggtggtctcgacggtggtcctggcgagctctgggatgatgacgtcaagcggaagctccgggacggggtgagccgggccacggaagcaggccttgaaggtgtagacgaggaggaggccgtcgccgctcgcggcgaggacgccgcggccgcggagggcgacgcggctctcgtcggcgctgatcgggcggtcgttgagcgctatggccttcgccgggatggtgacgcgggaggcgcgcgggggcggcgcgagggcgagcgacacgccggctccggtggacccgtccgctgtcgagatccggtggatcagcgcccacggaggacgcgaggcggcggtggtgagggcgcggcggagacggccggaggcgacggcggagaggccacggtggcagagcattttggagtagagagacagagagagaaaggaggccgagagggttctgcacttgtgcttttcgaggacaagaggagagatgtgagggactgtgggtgtttgtggactcggtgcacggagttttctgcgtagtggtgatgtcatggcctcacggcagtcacgggcagagaaggcgtgctccatctcagattctcagtcagtagttcagtacagtatgtagatgattcactaggaaatgggaatggtggagaagaaatcggtcggaaacgttttttttacttaaggaaatggttgaaaacaggagagaatttttcatatttatgaatttgacatttagtgttaacttcaatgcgacgttgacagaaattagaaaaactaaaatttaatacagtaataatcgataaagatattattattattattattattattattattattaaaatttactctctctgtctcattttaagtgcaattataaatttctatgttcaacttaatcgtcttatttaaaaatgtttagtcaaattatttatgttttatcatctaataacaataaaaatattgattatgaaaaaattaaataaaatggacgattaaagttaaacatggaaatggagggagtacatgttttgcacccaaaaacataagaaaataaacgtccaccacaaaaccaatattttctatttgtttctattttctactccaaagttcaattatcgatcgaatcaagtcatttcactgtattaataaaacagtgtcacgcactgcaaggagaagttgcaaatcgttcccgttagtatttctcaaaaccagggccacaaagttaatcaataccacagtataaagcccaacaaactcgcatttctaacagcattctctcgaagattgtttcagtttggattgttcaaacaagtcatctcatagattgatttgtcatacatacactgcctactagtaacaaattagtgtaatacattggaacgtaagagcatagatatttcgtcttccatattcgaccaatgcatatactgttctgttgatgaaacaatacaatcacagttaacttgcagaacaggacgaataagggctccctaattagatttgtcacaaggtacaaaacatgcataggcctatccatagaaaggacgttactgacttgcagttaaacatatatgctgtcctgtgacggttatcacacgctgattgaattgccattctaatacaaataacaggtctgcagaaaaagctcccaaaaactgaagaaacagtcagaattttcccccaaaagagagttcatatcttcccaaaaactgaagaaactcctgtctccaaatcttcccaaaaagagagttcgacaactaccaaaatcagtttcctaatccatcaaaacgcctgtctcttaatcttaaaaacctgaaaaagggggaaattatggacacttgaataatcatacaaggatttaaaaccctgaaaaaaggggaaactatggacacatgaataatcatacgaggataatttgtttggataatgacaattattctgtattacttcggaaaaactaaaatatcatttgcaattatggccaataatatttttaggataattgaaaaaaaatagaataaagaaagacataggcacccttaagcccctccttagtatcatgaagagtaatacttttgataatactcttcatgcacttaaccatgatgctatgtctttccttgccctactttgtttcatgatactcttcatgaaaaacccttgaaagttttcatggtattgttcctgcacttaaccatgcttgctagttgagaaaataacaatgcaccttattgagatacatctaataatgaaataaactaggactgctggggaagtaaagtactaaacctggaaaactttgtatctacttggctctgtctgaacgaaccagaatttcagccaacgcctcatttttcacattgttcttgcctgaaaggttatccattgaatttaagcgcaaagaaataagcaatagccaaaagttgcaatatcaagacaaatgagttataacaagtcgatttgtgtaagatcgtttggtttgaagtaatatattcatccaggtgggcatttcacctccctgtgatctgtctaaaaaaacaagccaatttgcctgctctgcacacgataatttagtcaatgaaactggcaggctttttagaagtcatctctatgttactattaacagaacacaaatataattgttttaacataaatgacaatcttatacctgagaaaatcaaagggcaatgaacttgtaagtgatattttgccaacattaacattgctaactataataaatacttgaggccaatcaaacaccccaacctttttaagcttgactttacatagagatggaagaaaattttggacaagtaaatttaaaaatcacaaatagcaggtaaggtaacagattttacattgaaaccctcaagttggtagcaaattaccattcacaaacaacagataactaattttagacaggaacattttagttggtacttggtagcaaattcccaaatgaagctagcgaagaactggattatgcggaggtgtaggcatactggcataggtggctcgatccagtcggatcaacagaacttgtatgtgtattcatctatatccagttaaattgtagtaagaattcattagtggtatcgctagtggtatctaacaaataactctaataggattggattaaattgtagtgagaacttgtatgtgagaattcgttagtggtatggtatctaacaaataactccaataagcttaagtcatggaacgttaatgagctacaatctctaataaattcccatgggagactcggaggcagtgaccaaggcccaatatgccttccttgagaaacacacgccttagcaaacaggaagaatctctatgatatccattttaacaaaattaaaacaattaacatgtggatgtactaactcgggtaaacaagaacgagaagcgaactgcagagtacataatcacattatgaaagaaacattcaaacatgcaagtacaagtgattacctgaagaaggaatctggcatgatccaagccacggcgggagcaagcagggtgtcagccagttgagttggtctaacagagtggccccagtcaccaaccccgtctccatgtccacgccgataaccacctggttgcctggaccggccatgaggtacacgacgttgcctttaagcggatcgatgcaacagatgaacggcgcctccgcgaagatgtggcttccgtccgggcagagctgtctcccgtcagccaagggctccccgctggacaccagcgtccagcggttgcccgcttcgtcgagaacgaaggagtttagctcgaacggctcggccccggccgacgcgggcacctcgacgtagcgcagcctcccgtcgctgaccccgactcgccgatacctgctcagcctcagcttccgtcgcgtcgcgaagcccgacgcctcggcgggcagcacgctgccggtcggcagcgcgacgatgcggaagtccggctcgtcggcgaacgggtcgaatgagacggcgccccagcccaggtcgatccaccacatccgcccgccgaacgccaccggtgggtggtcgatgatagtggaacgcccgaacggcagcgaggagaagaagctcggcatcgcctcccacctccccgtctccgagaggaaacggtgcatgacgtggccgttgacgccgacctcgatcaccgcgtaccgatcaggcggcccgtgcccgtccccgcgatcggcctgggtgaggagccccgccgcgccgccgggcgaggcctcgcttctcgcgccgccgatgtccgggaggcggaacagctggccggtgagcgggttgcagacgacgcgggcgacgtcgttctcgtacaccccgcggaggaggaagccgtcgctggtcgctctgtcgatgaagccggcgaaggggggggacttgctttgcgtgagcgccggggccgtggcggccgcggggagagaggacgcccaaggggaagaagagttgggaggcgcacgggggctcggcgatgcgggaggtcgcgtgtagctccggcgggtcctgccgcgcgatgtctatcatggcccacgcagggcgcgagggagaggcgaccgtcgagtgggagcgccggaggcggccggagacctcaccggagagaccaaggaggcggcggagctgcatggtggcggcggtggggagtgaagagtgggggagaggggagctcggaggatcagaaattgggagaggatccgttgcttttgctatttcgacagagccggtgcatgtggactcggtgcgcgcagtgatgatccgttggttttgcctggaccgtgggagtgggactgttctactggggttgaacatggacccacttgttctacaggtggtgtatgcggagggtgaggatgcttaacattcactagtactcctacgtcctacgtggtctcacttttctattatctcgcgtatcagtgtttataataatgataatgttattatggtagagcatacgaaccgcatacggaaagtaccacggatctattctaccaaacatgacggaaaaaaattggatatgacaaatcctaatactacaaatttagagatatctctgtttagattagagtattatgtcttacaaccaattacttcctccgtcccaaaataagtgcagccatagttttccgcgcctaactttgaccgttcgtcttatttaaaaaaaattaaaaacatatgttacgagtaaagtactatttatgttttattatcttataacaacaaaaatgctaattataaattttttttaaataaaacgaatgatcaaatttgagagctgaaacttatgactgtacttattttaagatggaggtagtataattttttttaaaacgagcaagtatgtagtagtacaacggaagtaaaacagcgaggggaaagcatctttgtcttttagcggaaaggcgaagaggtgccgtgtttgaaggtttgaatgcccagtcatgtctaatggcggtgttgcgtgtttcccattggttgttcacaaggtctgactccaccggttttcccgccaaaactgtcttatgatgggctggttgggtctagtacaagcaagggtccatgggctggcacgaactcacttcacaggctcggacaacttgtcggaattacagaagaccataaagcgggtgtttagatgggactagggggtgtttagatggggctaaaactttttagcctatgtcacatcggatgtttggacgctaatttagagtattaaacctagactagtaaaaaacctaatttcataaatgaaagctaatccgcgagacgaattttttaagcctaattaatccataattatcaaaagttaactgtagcatcacattgtcaaaatcatggcgtaattagactcaaaagattcgtctcgcgaattagtccaaggttatggactggattttgtaattagtgtatgtttaatactctaaattagtgtccaaacatccgatgtgacagggacttggaataagtctctagaaaccaaacaggccctaaaactttttaatccatgtcacatcggatgtttggacgctaatttagagtattaaatatagactaataaaaaaactaatttcataaataagagctaatctgcgagacgaattttttaaacctaattaatccataattatgaaaagtttactttaccatcacattgtcaaattatggcgtaattagactcaaaagattcgtctcacgaattagtccaaggttatggaatgggttttataattagtgtatgtttaatactccaaattagtgtccaaacgttcgatgtgacagggacttattgtaagtacctgtttcccaaacaggcccaaaattcgctcaaaagaaaatacagaaggccataaaaaaaatttcaccaagtctatcaaataaaaattctggcaaatttgaaacaactgggatgtacaattccattttaaattcaagttctttgcgaggagtcataaaggatctaggataaaagaaaaaaaatattaaggccaagcatttgcacaagagatgcgaagccatccataatatgcttacaaagtaacagaactgatgccatgcaagctgtttgtactttatagtagccattacatgctgattgaaccgaatcattctgatggaacgaccaacaagtcggagcactgaaatggcgaaactcccacaacctcaccaaaataagacttaactgattttatcagcaaagacaaacaaaccaaacttcttcattccccagattttcacaaaaaaaaagagttcagcaattaccaccattaacatcttaattgatcatagcacttgcatttagattatgaaccctggaaagtaaacggaaaacattagggcatgtacaaaggtagagtcggatatgagctctacgttatttagagattagcatcctacaacagttagagacaatatggtctctaatcattaatgtatcaaaatattttttcttacttttatttcctttctttcaccaccatgcaacaaaatttgctctagtaaatgctaagagtcgactctgagccgttgtcatacataacaaccatactcctttctctttcctccatgtcatcaaatttacttgcatggcaatagagagagaccactaataaacaccgtatgcatgttatcgtgtgaacacaagtaaacatcgtcttttagagtttagtcagaataaaaaggaaacaaaatcaacaatttttgtacagatacaaggccttttttatgtgttcctttagaaagtatgaaataaaaaaaatgaattgtcaattattgttccctggaacatatgcattctctatatggataaattaaaagaaattagagcagatagtgatatatacatgttagcaagcagaatttctgacttcataagttggccacaatattgtaggacaaaaagaacatgattcatcctgatggtaatgccagctggccaggcaacctgtggcatttaagcttaagcagctattctcagcagcactaacatttgggaataaggatgtatgagcaaatcaagtactccacaacaatttgagtataagctctagaaatggtaacaccattataaggaggtagacaaatgtacctagtatcattcataaactccaacgaattcagaaaaaaaaagattaggaacatcgatagcatcgaagtattggtcaaccatgatagactcatccacacgatagcattggactgacgatgtaataactaacagattatgagcaagttgtttctcaaaagtaacctattgcattagctgcaagcctgcaactaatacccgtaaaaaaaaagcctgcaactaatatgagagatccggaaggagcaatgaaatatgacaaatagtggataaaacaagggtacacaaacacatgagttagaagagaaaataccaatagatgaattagccagtgtgcttcatttttaacagcatctatctacacgaaccagcatgtctgccaaagacttcctttcaacattggtcttcttgctcaaaagggtttctgcaatcatgtatacaagaatttgaacagtagtaacacagccatgatagtgacaagaaacaatatgcgtatatatccaataattgcaaaagacatggtaatgaacattgcatcaaaacacctgggcattaactatatgaacaaaataacaagtgttacacaacagacattcctctccaagaccacaatatgcgagattcttctgggaaataccaagttctggtgctgatatatgtcgatgattatcactggtatagtcaatttactagaagtgcaagccctatcagagaggattgactctgcttaacctagcggtggcaccactttgagggcagctatgcaggatcacttcaatggaacattttcaatagtactgcattagactagtagagaaagatagaaattaaggtaaactagatgcaaaatttggagttcacaaacaaaatctgaatagaattcaccagtcaatttagtaacctgaaaagcaaacagttagcatcaaacatcctttttattgcattagtccgaattacataaagatggaagcaattgtagaacactataaattagaaactcagtggataacagtaataagatttaagccagggaccctaatgagatataatctgtatcaaattgcaataggatgcttagaggaactacactgaccaacacctgtataagcccaaacgtgttacatgaaaattcaggcgcgttagcagcgaacaggaaaatcgttatggcatccatttttaataaaattcagacatttttagttagatgggaagtgcagaacagataaccacatgagaagaaaaaatgcttagttgatcaaacacctgtagaagaagggatccgggttgattcaagccacggcgggagcacgcagggtgtcggccaggcaggctcatccagcacagaaagcccaaaccccatccccctctccatatccactcccaaaacgagcccgctcccgaccatgatgtacacgacgtcggcgttaaccggatcgatgcaagcgatgcctggcatccccgggaagggcgccccttgcgcccgcagcgctgtgctctgctccatcgtccagctgctgccatcgtcgtcgagcacgtaggacctgaccacgaactgctccactccggacacctcgacgtagcgcagcgtcccctcgctgaccccgacgcgccggtgcgtgctcagcaccttcttccgtcgtcgcctctcgaagctcatctcgttggatgaaggcagcactctgcccctcggcagctcgacgaatcggaaatcgggctcgtcggcgaacgggtcgacggagacggcgccccaggcgaggtcgatccaccacagccggccgccgaaagccaccaccggctggtccacgacgatcgggcgcgcggccggcagcggggacaggaatcccggcatcgcgtcccacctccccgtctccgagaggaatcggtgcatgacgaagtcgtcgcagctgacctcggccaccgcgtacctgtcgggcggcccgtcgccgccgtcggcttgggtgagcaagccggcgtagcccatcagaccgggcgaaacctcgctgcttgcaccgtcgatgtccgggaggcggagcagctggccggtgagagggttgcagacgacgcgagcgacgctcctctggcccggaggccgagacgaagcggggaggttgggagccgtcgcgtgggcgcaggcgcaggcgccatgcgcaacaatggcgcggaggaggagcaggccgtcctcgctggtcgcttcctcggcggcggcacaaagggggccctggctaccgcggggacggatggcgtcgtaggggacgaggagttgggaggcacgcgggggctctgcgaggcggaaggtcgcgcgtagctccggcgcctcctcttgcggctcgctgaccaccatggcccacgcaggacgcgagggagaggcgaacgtcgagtgggagcggcggcggaggcggccggagacctcaccggagagagcaaggagtcgccggagctgcatcgtggcggcggtggggacttgggagaggagagggagaggacggaggattagaaattgagaggatgcttttgcaatttgtcagagccggtgcatgtggactcggtgcgcgcagcgatgatccgttggttgcgtggagaaaatgaccgtgcgattcttctacgaggaaatcttggggcccatttgtcagtgattaatctatgggtgcagtgcaggaagaccaatgtcaatatgtcatggattcttctagctttcgcaataaagcgtgtgtttagttcacgtcaaaattaaaagtttagttaaaattgaaacgatgtgacaaaaaagttgaaagtttgtgtgtgtaaaaaagttttgatgtgatgaaaaagttaaaagtttgacgaaaaagtttgaaactaaactcagccaaaaccaacttctgttataatgtggggttctatttttcgccatcagcaagcaatctgtcaagattgaagatgagaacacacagtagtactcataactaaggagcacatgcatgatgcaagctaccataattttacagagaagagaaccataatgtgttgcacgtaaacattctacagattttcttgactgccattcagacttcaattgtcaatcgaaccaagtctatcactgaataaagtaaacatggttcatagcacatacagcaaggagaagttgcaaaacgtttgccataatttgtcaaatgagggacacaaagttccatcagtaaagcccaacaaactcaaatttctcgcatcaaaaccctcaaaattcaacaggtagcaccagcaaagtccagatgcacagcaaaacccaaacttctcccagcatccccaaaatgagagttcaggtacttgaagaaactgctaccatcaaagggaatctctggatctctaccagtaaatttcaaggaacctgcaatcaatgagtaaacatcagtctccctatctcacaaacagagaatagcacagaacaagtgaaatgaacaatcgccagttttggtggttaaccaaaagtaacactgaaaccagaacatccatttggttttgtacctaagctatcagtcaagcgtgaagcattgcatgacttaagtcttgactacaggctacagcacaaattacagcctgataatatagtactagtaactagtaaagtagcatgcaagatgcaacatactttagtagttcagtctactcttgaatcttgatcgactagttacaaatatttcagcatagtaaaagacacatcaacatgaagattctgagaaacttttaggtttgagatagttcatgtctgcttgttctgataggagtgattgtcctttaccgaagcagcaattctcagcagcagcaacattcggcaataaagatgtatgagcagaacaagtactccgtgacaattcgagtataagctttagaaatggtaacaccatcataaggaggcagacagatgtaactagtatcattcataaacaccaaagaattcaaacaaaaaatacaagattagtaacatcaatagcatccaagtattagtcaaccacgagagacttatccacatggtagaattggactgaacagactatgagcgagttgtttcttaaaagtaacctattgaatgactgcaactaatatatgagagatccggaaggactgatgaaatatgacaagtagtggatataacaagggtacacaagcacatgagttaggaagagaaaaataccaaaagatgaattagcaagtacgcttcatttttaacagcctctatctacacgaaccagcatgtctcccaaactcttactttcagcattggtcttcttgctcgaaagggttcctgcaatcatgtatacaagaatttaatcaagagacaataatagcatagccatgatagtgacaagaacaatgtatgtatccaataattgaaaaaaacgtggcaatgaacattgcatcaaaacacttgggcattaactacatgaacaaataataactgttactacctaagttttcaggttataagactttctagcattgcccatattcatatatatgttaatgaatcaagacatatacgtgtgcctagtttcattaacatctatatgaatgtggacaatgctagaaagtcttataacctgaaacggaggaagtgctacataacaggcattcctctccaatgacagcaacatgtgagattcttctgggaaatactaagttctggtgctgatatttgtcgatgattatcactgctatagtcaatttactagaagtgtaagtcctatcagggaggatttactcagcttaacatagcagtggcaccactttgagggcagctacgcggcaccatttcaaagtaacatttcaatagtactgcattagactagtagagacatagaaattaaggaaaacttgatgcagaatatggagttcagaaacataatccgaattaagttagaaaactgcaaagcaaatattagacatcaaacatcatttttattgcattgcaactccgaattacaaaacgatggaagcaaatgtagaacattgtaaatctgaattcacaaaatatacctataataacatttaagcctatggatgaaaatgagctataacctgtagcaacttacaacaggaggcttagaagaactaaccaacccctgccaaagcccaaatgcattactcgaacattcacgcgagttagcagcaaacagcaaaaatagttacgacgcccatttttagcaaaaatcaggcagtgataaacatggatgcactaacatagtaacaagagccactgaaaaaaaaacacacacacacatacagagagaaggaaaaatgcttagtagatcaaacacctgtagaagggatccggcttgtttcaagccatggcgggagcacgcagggtgtcagcccgatgggatgctccagcagacagctcccgatcatcacccccttctccaagtccaccccgacaacgtgcctaccatcctcgccgatcatgaggtacaccacactagctttcagcggatcgagagcaccgatccgcggtgtctcctgcaatggctccgaccagagccggccgagcgccactctgtgctccagagtccagccgctgccgccttcgtcgtcgagcgtgaagcagctgagcacgaacggcgacgcctcggacacctcgacgtagcgcagcctcccctcgctgaccccgacgcgccggtacctgctcagcggcgcctcctgcagccgccgcctctcgaagcttatcgcgtcggcggcgggcagcacgctgccgctcggcagctcgacgaagcggaagtccggctcggccgcgaacgggtcgacggagacggcgccccaggccaggtcgatccaccacatccggcctccgaagctcaccaccggatggtccgcggtgatcgctggacgcgccgcggggatcgcggacgagaagcccggcgtcgcgtcccacctccccgtctccgagaggaatcggtgcatgatggaatcctcgcctctgatctccgccaccgcgtatcgatcaggcggcccgtcgccgcggtcggcttgggtgaggaagccgggcttgacaaagcgccaagtaccgcccgtgtcgccggtgtcagggtcctcctccgggagggggagcagctcgccgccggtgagagggttgcagacgacgcggacgactttggtgtcggacttgaggccagggagcggcggccaggtgtcatccttgggcctggggatgaagacggggtttccgccatgggcaggaacttggactagctcgagcgcggtgcggacgaggaagaggccgccgctgttcgccgcgcagatggtgccgcgggagatgacctcccccttgctgccgtcgtcgacggggacagcgagggacacgatgaagcggatggggacgacgagctgggagacgcgcggtggcgaggcgaggcagaaggtcgcggtcgtgattggctccggcggttcttgctccgtgtggaccaaccccatgtcggccatcatggcccacgcgggtcgcgaggcggccgtcgagtgggagcggcggaggcggccagagacctcgccggagagaccaaggaggtgccggagctgcatcatggccgccacggcgtcttgtcgtctagtggtgctgtggtgatggggaaaaattgcgagagagagagaaagagagagaaagggaggatgagaaattgagaggagacacggttcatgtggactcggtgcacgcagcgatggtcatctgttggttgcgtggtggacttgttgtacgggggtgcagtgagaacagcttttctgggtcccacttgtcagttatagtagtccatgggtggagttggttcacgaggtccgggctttcgaaaaaattcctctatttggaacgatcgtacgagtagagcgaaaagcgaagcgattgttttgaacgggaggggaaaccggtggaaagcgaagcgattgttttgaacgtttgaagttttttgagcgaacctgaacgtttgaagttgaactgactatcgcctgtgcctgcgctgccgacgagccgatcgtacgtcacaaagtttcccgccaaaaatattcttgggctccgcttggtcatatgggcctacagcccacaagttgccgtgggttcacggcccagctgaatagcttaaggcgtccacatcaaagatatcgggttggtttggtttgtggcctaaataggccttaccaaattttatcaatgccaaattttggcaagttttgatatggctaattttggtaaggtaaagttatgtttggattgaagtcaaaatagcctaagttcactattgaaataacctattttcttaggcatgtcaaaatttggcttcaaaccaaataaacactaagcactattgaaattgtcaaatattggtaagcctaatttaggcctcaaaccaaaccagcccatcatctctctctctctctctctctctcactcactgcccctaagctgattagacaagacgattacaaatcgggcgtctgatttttaaagaaaatcggacattgtttcaccataacaaatatttgaccactataatatttgtgaaacatagttgaaataccattgaaacatttcattttcatggatgaaacatcaaacttcaacccgttgaaacatcccaaatatgcaagaaatatgaaacaccatcaaagtatccattgcaatacttcgattcaacacgaagaaaaatccaaatatattggctggaacataaaaaaattgcgaaaatgtatcaatccagatctagtttattcctcctctccggtggtcgtcgactgttccaaatccacgccgggatggtgcaattcctttctactccaccaaggcgggtaactgctgctgcccaagccttcatcacccatagtcactgatgaacaggagtaacgccacttccagatccacgtaggggccattgcctttctgcaacttccacccgtgtcgatgttcacaatatcttgttaggagctacacaggaaggacgccccctccccccacccccaccggccaccaccgacccctgtcggccccatcccctctgcatggccataaactcagtcatcgactaggggatgaacctcctcttcatcgcttctccgctggccttttgcagggccgccgatgctagggggatggctccctacatccatcttcatcggtgctgcctctcctccaccgctgttcgccgccacgccggccctctatctccgtcgttaaggacgtgcgtgggagagagatgagagagggagggggcggggggtcatgggatatgtggaatgagcggttgggaggagcccaatattttcttatccatcggaggctcgataggtagcgttttcattaacttttattttatttttataaagcccattctattaaaaaaatgataagcattttcaaactgaggaattttgcacacaaattgacgcaggaacttgaaaaaggttcatcataaggccaccgattttgacacagctaatgaatttctcaagcaatttcctgacctgggtccttgtgagaccattgaaaggaacaacatgtacacagaagcacataagcaatctccaattactacttcagatctgagtcgagtataacacgtgcataaggatatccatttgctgatggtaattctgttgtttattccaagcaaataggcaattggcagctggcaatatactcccttctactccctccatgcatttttaagtgcagccatggttttccgcgtccaacttttattgtctgtcttatttaatttttttttaaaaaaattaaaaacataagtcacgaataaaatactatttatgttttatcatctcataacaacaaaaatactaattataaaatttttttaaataagacgaacgatcaaatttgggcgtgaaaacttatggttgcacttaaaatgggacggagggagtagtacttttttttgtttgccatcagaaagcaatcacgcatcaatctatcagatggcctgacaaaaaattacattgataatgagaccatataacagaggacaaagcttagataagtcataattaaggtctaaggagcacatgcatgagaaattttgcagcaaagagaagcaaaatgagttgaacgtagacattgtttctagactgccatttgtcgatcgaatcaagtcattatactgaataaaacagggttcacaacttcatgcacacagcacagcaaagagaggttgaaacatattccccatagttttcaaaatgagcgccacaatcagtgataaagcccaacaagctcaaatttctcatagcgttccccaaaaatgacgtgtagtcaccattcgcttcctaattctctcgaacatctgtcaatgtgagtaacctgcaatgcaaatagtaaacatcaaacttcgtaataacggatgatgaccaagaataaacagttaaacactagggtcatctgaacattcatttgaataaatgggtaatacagttaacattaagagtaatttgctgtagtttctttcaagtaaatgccggaatgaatttcattgtctaataaagaagtagtagaaagaacatcgttcagtttaatcaagatcactttctgacatatatagtccactatacactgtgaatcggtgattacatgaaagaagacaattgttgaattcacagcacagtacaacagttgtgtcaagtggtcaccttgtatccggcttgatgcaagccacggagggagcacgaaaggcgtaaacacggtgggctcgtcgagcagaaaactcgcaatcaccatgcgcctttccatgtcgacgccgatgacgtgcttgccgtcgtcgccgccaaccacgaggtacacgacgctggcgttgagcggatcgatggcgccgatctgcaagggccccgccggcgagagcgggccgagcgccacgcggtgcgccagcgtccagcggccgccgccgtcgtcgtcgagcacgaaggagctgagcacgaacggcttggcaccggacacctcgacgtaccgcagcctcccttcgctgaccccgatgcgccgccaccttctcagccccaccttcccccgccgcatctcgatgctcgccgcgtcggcgggcagcacgctgccgctaggcaggaggacgtagcggacgtccggctggtcggggaacgggtcgacggagacggcgccccaggccaggtcgatccaccacatcctgccgccgaaggacaccaccggctggtcgatgagaatctggcgcgtgaacgacagcgaggacaagctcatcgtcgcctcccacctccccttctccgagagaaaccggtgcatgacgcaatccgcgcctctgatttcggctaccgcgaacctgtcgggtggcccgtccgcgcggtcggcttgggtgaggaagccgtggagaagattgtgccaactcttgctctcgccgacggtgtccgggtcctccgggaggcggagcagctcggcggtgagagggttgcagacgacgcgggagacctccgtgtgggacttgaggccggggagcggaggccaggtggtgtcgtccttggagatggggatggggaacttgacatggtcgggcacctgggcgagatcgaacacggtgcggaggaggaggaggccgccgctgctcgccgtgcagatgttgatgcggcaggcgacgttgccttcggtgcccggtgtagcggggcacaggaggcagtggagggggacggtgaggcgggagacgcgcgggggctcggcgaggcggagcgtcgggcgccgctccggcggcactcgctcgtccaaccgcaccgcgtcgtccatcatggcccacgcgggggcggggcgcgaggcggccgtggagagggagcggcggaggcggccggagacctcaccggagaggccaaggaggcgccggagctgcatcgcggcggcgcggcgtgtaggtggtggtggtggtggtgtggctgagagagaggagaggaggagaaactgagaggaagcttttgcaattgtcacgcccggttcgtgtggactcggtgcacgcagtgatgttccgttggtttcctggagaaatcgggttgttctacgcctgcggggtgtagggaaaactgtcgggtccagttgtcagtgagtatttgggcccatttgtcagtgtcagtggcctactaccactactacattgctggcccgcctccgtgcgaagtagtattccctccgtcgaaaaaagcaaacccagaattagatgtgatatcaattttttgttcaaatttactgaacaaaaacggatgagtatttggaacgtagcagtgcagcagcgaaaaaggagatggctttgaacgtttgagctgcccccccgaccgtgcctgctgccctgatctgctattccacgtcactagtttcccgtaaaagtgttttgggcctgacgcctgagctgcttgggccgtagaagcatcagtgaccatgggcccacggtccacggcccagctgagaaaaccactagcctacatgaacacctcaaattaaagggaaaatcatctctcactcaaaaaaatgaggggctggtttgatttgaggcctaaattaggcttaccaatatttggcaatttcaatagtgtttagtgtctatttggtttgaagccaaattttggcatgcctaagaaaataggccatttcaatagtgaacttaggctattttggcttcaatctaaacacaactttaccttaccaaaattagtcatgccaaaacttgccaaaatttggcattgacaaaatttggtaaggcctatttaggccacaaaccaaaccaacccgaggctatcgaagtgctactccggcatttccctcttctgactcctcagccctgattatgcagtaagccctcatatcactttcgaactgaagaaatttcacatcaaacatcccacaattgaatttgcccccaaaaaattggctttgtcaaaatttggcaaggaaaacaaacaagagtctacaaatctaccagctcatactgttggaaacaacaatctcatttggaatacaacaacttcgcaaggaacaattcaattccataaaaaagagctggggaaaagtctcaaggtcaagtgtttgcacataaacatcacgctttccatagccataataataagatctctcacaaattcactagttacataactgaatttctgtacgcatgcattgacttgtgcataggagcactgcagacaagcatagcaagcaagttgtttttgtgataaccattagtacatgctgatggaatccaatcgttctactggaatgaccaacaagtctgcagcaaagccccaaaatgacaactcccagaatttcatcagtaaagaccaaccaacaaaacttctccaaaccccaccaaaaagagttcggcaattaccaccatcagcatcctaattcatcagaacacttgcatgtgttaggttaacaaaacctgaaaagtaaatgcgcaacattaaaaacctgaataaccataggaacaaaaatgagtgttttgggaaaatggcaagtttagcaaggttagtttgaacacaaacaaacatagagatgtattttattagagcttagtctggatgaaaagtgaacagaatctatgactactgtaacaagtacaaaacattttttctgcattcctttgggattgaaatggaaaaggagttatcgattattgtcctctggatgatatgcattgattaagaaggaaacaagagcaatactctctctgtcccataaaaaatcaacctagtactcaatacgacacatcctagtactatgaatctggacatacctcagtccagattcattgtactagaatgtatcacatccagtactaggttcattttttgtgggatggagggagtacttgctaagaagtaacaaccatcatttccggcttcatcagtttgtgacagtataaagtattgtaaggcaaaaagccaaaaatacataatgaatatattttatagtaaggctgggaaccataagctcttatgaataataacttaataagataggcccagtattaagtttgcactcaatcatgcttgttcagaaaacaatactgagcctgaatgacatacaagtagaagcaaatcaaaccagaatcaccagtaaatttataatacagttagtagtagctggttacctgataaattaactacttcttgtcactgcctgaacgaaccagaatgtcacccaacgtcttatttttcgcattgtccttgcctgaatgatttttcgttgaatttaatcacaagaacttgagcaacaaccatacattacaattctaagtaacacaatcttactacaatagctaaggaattaaattgacatgtattcgaacaatacaacacaacatacatatgttgatgttaatgagagaaaatagcagtatttggacatagataactcagaatagtatgttggtcagaaaagcaacaaaaacataacagtccctttaccaataagcttgtttgctaataattgattaatgattacattgttaacaactgatgtatgttcgagtagcaggtcaaataaacaggtcttaaggcacaattaaatggaaacaacatccctaatgctaacctttaaacactgtattgcacaaaaaggagacaaaaaaaaaagcagattacacagtgtacatttgagattcaacacgcagtataaatccagtgatgttctacacaagaacactaaattgcaaatgagctacattttgtactagcaaattcccagagaggctgctattagcttgtggctcactagtgtggtttagctgagagttactgaccaattcctttcaatgcccagatgcattccatgaacatcattacacacaagtgacttaaatttaaccaaccaaacaagtgactgaacttataaaacaagacaagtgaaatagtgctaataaagtgataattgcatcttgaaaagagacatgctaattaagcgatgaaatgataacctgaaggtgggatctggcatgacccaagccacgaagggagaacgcaaggcatgagctcggagggatcttccactagactactcccaatcaccacccctctctccatgtcgacgccgatgacgtgatcgccgaccgtgggataggcgacatgggcgttcagcgggtcgaggaaaccaacgcacggcttggtgccccggaatggcagccacgggtagcctccgtcgccccagatctggctgagctccacgcgatgctccagcgtccacttccagccgctgccctcgacggtgtcaccgtcgagcgcgaaggagctgagcacgaacggctcgtcccaggacagctcggtgtaacgcagccgcccctcactgacccccattctccggtagtcgcccagcctcagcttgtgtcgccactcggggtttgtcgcctcgggattgagcagcacgctgccgatcggcagctcgaggaagcggaagtctgggtcatggctgaacgggtcgacgtggacggcgccccaggtcatgtcgagccaccacagccggccgccggcggcgaccaccgggtggtcgactataaccttgcgcggcctcgtgagcccgcacccgaacaggtagtccggcagcgcgtcccatctccccgtctccgagaggaagcgatgaatggggaggtccttgccgatgaactcgaccacggcgaatcgatcaggcggcccgcccccgctgtccgattgggtgaggaagccggcgtacgcctgccgagccagaccgccgtcggggagacggagaacctcgccgctgagagggttgcacacgacgcgggcgacgaccttgtcgaagtcgtacctgatgccggactgcacaaaccaagaaggatcgccgcggttgtcgaacatgttcgtcgcggcttggccggtcagcttggctacctcgtcgacgacgcggagcaggaggaggccgtcgctgttcgcggtgtacctcgggccgtaccgccggatctctccctccaggccggctgcaggcccgctggggcggcgccagagggcgccgtaggggacgacgagctcggaggcgagcgggggctcggcgaggcggaacgtcgcgcgcgtctccagcggcacgttcggcttggggagcggcgtcacggtgttcaccatcgcccactgagggcgcgaggggcccgtggagagggagcggcggaggcggccggagacctcaccggagaggccaaggaggcggcgccggagctgcatcgcggcggcgcggcgcggcgcggcgtctcgtctcgccttgtcgaggggatgagaaaattgagaaaacgggaggaggcttttgcaattactactcctcagagaggcgcagaggcgcagagcctggtgcatgtggactcggcgcacgcggcgaggatacgtttggttgcgtggagaaatggccgtggggttggtcttcctgggagcggtgagagggagctctactcgggcccatttgtcagtcacaatggtctatgggtgttggttcacggagaggcttttcgccgttgctccatttggaacggccgtacgatacgagtacagtctactacggcctgtcggcgaaatgaaaaattttgggtcatatcacgtttgaccggatgtcggaagtggttttcgaacatgaatgaaaaaaataatttcataactcgcatgaaaaccgcgagacgaatcttttaaacctaattaatccgtcatcagcaaatgtgagttactatagcacttatggttaatcatggactaattaagctcaaaagattcgtctcgcaatttatatgcaaactgtgcaattagtttgtctttttatctatatttgatgctctatacatgtgtccaaagattcgatgtgatgtttttggaaaaaaaatttggggactaaacaggcccaaagtttgcttgcttttttggtgcgaaaagcgaagggatttttttttgaacgtttgaattgcctcgattggctgtggcgactgtggcaggtctgcacatgacccgatccacgtcacctgtttcccgccaaaaatattttaggtcttagtagctgattgggcctgcgggtcatatcatatcatagcccacaagtggccacggcccatgggctcacggctcagctggaggcatctactacatcgaaggcatcgacaagacgacaagcgaccggagataatagataatctctcttttgaacggaagaattttacccaaaaaattaacagagaaaattaaatcttgaaagattcatcataaggccagggatttctagagaagtactgaatagctcaagcaagttatggacttgggtccttgtgagtcttcaaaggaacaacctgtacagagaagcaatctccaattcctacttcatattgtacggggtagaacataacatgcacataaggatatgaatttgctgaactgatctttgaaagtctatcctacgccattggtacctcatctgttttataatacaatactttctaacattgcccatatttatatagatattaataaatctatatatatatatatattcattaacatttatattgatgtaggcaatgttagaaagtcttataatatgaaacggagggagtagtttggaatgtaatgttggggggttctattttttaccgtcagatagctagcaagcaaagcaccagtgtcagaattcaaaagaccccgaaaaaacatattccattgatgaatgatgaacacataacatcgaagaaaacttagatataaggagcatatgcatgatgcaaaaatgtaatcgttgtatgtgttgttctagactgcggttcaaagctcaactggcgatggaatcaagtcatttcactgaaataataataaacatggctcgtgcatagctaagagaagttgcaaaatgtttcccagaatttgtcaaaatgaggggccacaaagttcatcaggaaagccccaaaacccaaacttttcacagcattcccacaaggtgtgtcagaaaccatcaccattcgcctcctaattctccagaaaaacctcgtctgtcaattttgagaaaccctgcaaatcaaataataaacatgagactcccttgtctctactatctttgtaataattctgacaaagaagtaaacactaggggcatatgaacacacatgaagaagagctacatttatctgtttttaattcagtgaaaataaacaagtaaatagaaacgccactacataatgagatgccgtctagctttatagtttaaacactgaaataatgagctgcgtctcaacagcattgcgacataatttaatttgagggtttttagggtccatgggagtatgttctagtgttaatcatgactcatgggtttgtatactgaacctctccatagtcaatactcccaaggagtcaagggcactccaagaactcattcaatttatataacacagaattctaacatgatcaatagttaaggagcaacaacaacaacaacagcattcagtctaggcaagatcagttggtaataatatgtgccatatacttacagccccatgttttccaataagtcataatgaactagagggcagcaatagtccctattggcagtcagcacacttacagttgagcattatacatttatacttgtgtctgccaagtctcttattgcaaattaattcaaaatacacaactattctacatcttccgcaaaagaaaaatgacattgcaaatacatgtaaataaacaaaccatcctgaacttggaaagcaatcagataccgccactaattgataaaacagtgaaagttagttaacagaaagtaccatgagatcaaaagctgataaaattcacttcttcagttctatgtctacatgaaccgacatgtctgagtatgacggagtattgcttttcatcttggccttcttgctccaatggatccctttattcacaaagataagaaactaaacaatcagtatatgcttctctacaatgtatccaagatataaaacagcaaacgaaataagacactgaacaggggcatcacatagatatacgtttacacccaatttttagataatggaaatggattacatctccggcgtttacactaaattagatgaatggaatgcataataataaacatactatattcaaattagccgagagagagagagagagagagagagagagagagagagagagagagagagagagagagagagagaaatcagcatcctttggctttacatctactcctaaatgcttcctgtttcaaccttggctacaaaagtatccaagttccactctttctccccaaattcaccatttcgccacaactattcccgatttgccccaaaattctagtacaattggtaaaataaggattttaaagacatgttaaaacgaaatatactaactccaactaacatttacatagtgcacttcagcaattggataactcaaacaagcatcatagaagaagcgtgactacaaataaaagtatgaatcttgtttcaaaagtaaacaaataccttcaggaatctggcttgattcaagccacggtgggagtacacaaggcaggaggggaaagtcagcacaacccaaacgagaactgtcaatcgccctctccttaatcatgtctatgctgagcatctgatcaccaactatgaggtgcacgatgttggcgttcagtggatcaatggccccaatccttggcatgccacccaagggaaccgacgcgtggtgctcatccttccagatcgggccgaaggccacctcgtgctccagcgtccaggagtcgccgccctcgtcgtcgtcggcgagcgagaacgacctgatcaagaactgcttccccaaagacacctcgacatagcggagcttgccctcgctgacccccatgcgcctgtacttgccaagctcccttagcatcaccacgtcgtcaaggtcaggcagcacgctctccttgggcagctcgacgaaccggagctccggccggtcgctgaaggggtcgatggtgacggcgccccagctcgcatcgacccaccatagccggtcgccgaaggccaccacctcctggtcgatgtcgaccgtcctcctggctggcaatggggacggcatgcccaccagcttgtcccactccccggaatccgagagaaatcgccgcacgagccacccctggccgtcttcctcgcggttgccgtcgagctccgccaccgcgtaccgagcaggcggcccctgaccggcatcggactgggtgaggagcccgaagtggaggtacctcgaggtcttcttcgtgccgttgaggtcggggaggcggtacatctcgccgctgagcgggttgcagatgaaccgcgtcacctccgggtcgcggtcgacgccgtcgagggcccactcgcgcatcggctcgccgccgcggctgccgacggtggggaggtggttgcgggagtcgtagaagcggacggggacgaggccgtcgccgctcgtggcgcggacgtccgtggagaccgtgccgaacatctcggactcggcgtcgtggcggaggcgggggtcgacgaagctggcggcgaaggtgaggtaggagacgcacggcgggtagtcggcgtggagcgacgcgcccggctgcgacgacgccccggaccggtccatcttcgacagctggagcagcgcccacgggggccgcgccggcgacgcggcgcgcgtggagaggtagcgggcgaggccgccggagacggcgccggtgaggcggcggaggcggagcatcgcgcgcggaggcgtggaggtggaggtcgcggtgatttggtgtagtagtagtagtagtagtagcctgtagtgtactactggtagcagagaaggggagaagagggttttgtgtttgtgggagaaaccgagagaaggggatgcggaatgaacatgaactcgctctacggaccaaggaaaagcagcgtggtcaaaagaagaagggaagactcttcagactttactatcaagctgtactcggatatttttttttctttaattacaagctgcatttaattactttggatattttaactacaaagctgcatttaatggtatttcagtaggaattaatttttagaaatccaaataatttagaaattttctcaaactgaacgcgcccctaatgctttctcaggtgacaaaatcgaagggcctaataaaacctttatagttaagataactgttgggcctgtagcccatctacagtaatttatctatgagactccgactacaaaccttcccgagttgtagaattttttttttaaaaaggagaaaagcaaagttggagaaaaaaaatttcctttaaaaaaaaaagaaaagccggtctccttcatcttcccgtccgtaaaccctaactgacttatactcatcaatcgtcctcctcgattgctcctcccctgattccgatccactccgaggcctcatggcggcgaccgattctcgtcgccttgcagacctagatgtcgacgagctggaccgcctcctcccgttgatcaaggtcacccccttcgccgcgcaccgcacttctgcccccagaggatgtggttgtccttgtgcggcgccgaggcggatggaggagtctcagggtaaatagtttttttccccatatttctcttgtgttggttttaggactatctgcatgatttatctgatcatgcagcctcgtcggagaggactccaaatcccccccacaatcgctcagtcgcctttggacaattccaagaaagactccgagaaagctttacgcagtaagtacatgattttatcatacaagaaaagaaaagcaagcaaataataaagccaataattgtgggaagttaatttactcacttatgggggtggcatgtattacccgacccatcattaataaaatggttataaggtagagtatatctaccttccagcataaaaaaaaacttatgggggtgccattgtacaaagaatgagatatggggtagaagaattacgattgtttgtctgtttttttttctgtaaacaaatgtagtctgcttcctagattgctttgctggactcgtcatcttgccggcagagcaagaacaacttgtggtgctcaaagccatccttgattccttctccgaggccactgggctaaaaattaattttcacaagagcaccttcctccctatcaatgtcctgcatgatgaggcggttcggctggctgggactctcggttgcccgatagcttccttcccccaaccttatttaggcctccctctctctgttaccaagctatgcctcgcggacttccaaccgctcatcgctaggattgacgaacgtcttgccggttggcgcggtcaccttctgtcttctgatggacggctcactctcatcaattcggtgctctccgccctcccttcctatatgatgggagccatccttctccctaagggtgtgttgccgccattgacaaatgccgaagagctttcttctggacaggggatgaacactgccatggtgacaactgcaaaattgcgtgggacattgtttgttctccgaaggaaaaaaggtggtgctgggataaaaaatcttgaagtccagaacaatgacgaggattctgcgtcgtggattgactgttttcaaactgaacgggtctatagtgctttctcaggtgacaaaatcgaagggcctaatgaaacctttatagttaactgttgggcctgtagcccatctacagtaatttatctcagactacaaacctttccaagttggagatttttttttaaaaaaaggagaaaagcaaaagttgaagaaaaaaaatttccttaaaaaaaaaaagaatagccggtctccttcgtcttcccgaccgtaaacatcgagattctagagagacgaggcgcgggaccagtgaaaccctaaccgagctactcatctctcgtcctcctcgattgctcctccacccgattccgatccactccgaggcctcatggcggcgaccgattctcgtcgcctcgcagacctagatgacgacgagctagaccgcctcctcccgttgatcaaggtcacccacttcgccgcgcaccgcacttccgcccccggaggatgtggctgtccttgtgcggcgacgaggcggatggaagagggtcagggtaagttggtttttcccccttgtttctcttcgtatttgtttttccctccttcccgtgttactgggtaaccccctatctcacacaatatttatctgatcatgcagcctcatcggagaggactccaaatccccccacagtcgctcagtcgtcgttggacaattccaagaaagattcagagaaagctttacggagtaagcacatgattgattttattgtacaagaaaagaagagcaagcaaataatgaagtcttatttggggaagtttattcacttatgaagtcttatttggggaagtttattcacttatgggggtgccattgtacaaagaatgagatatggggtagaagaattagggtagcttctctgaggtagaagaattacggtagtttctctgattttttttaactgtaaaacaatgtagtctgcttcctaaattgctttgctggacccatgtcgcaagttcgcaacttgtgatattatttgagctacgggcattgtgtacagttagattttatttgccaatggtctgagcttacttctactttcagaacgcagtataaagatggcaatgaagattatcaattactctgaagactgtatgagaaagattgtagagttgaatgccactctccctctggatcagcatttcttccctgcctgcatctggccacgggaccttgaggacttgcgtttttccaagattgggttttacgttgactatcgcttgaatgacacttctccaagtaaatgcttctacagtttattattaaaacaagttgcttttcttagcttcttcattattgaaggttccagtatcagtggatttgaaataactctagatttttcatgtactgtctgtcccatgcaccccaagggatctcaaatagtttagcaaacaatcatggagtagtgtcagtgttatatgtttatatcagttctaactcatttgatctaggattataaggatcaacgttttatatatttaagggtgttattataatatctatatgtgattatgtcataaacattggagtctgaagtaaaatgtactcttgcctgacacgagtacaagctgcttctaatatcgatttcaaatcttttacagtcaaccatagcaggactctgcaacttatgtcctttcttagatctgcaatagttcaggggcactgtcgtattatctttgttgttttttgatttcttgttttcccagagtcgtaacgtttcattttgatctattgcttatgccactcacagccacttgggggtgtaagcgctttgcacatgaagacaagtatgttgcatcaactatgctgcggatcaatggactagtgtttactggagatttcccacatggccggtccatgcatgtttatggttttgtggctgtgagggatgataaagagccattgaggaactatatcttcaatgtcagcagggagaaggcttgtcaattgaacctggttagtacatctatactcaaagactttttctacagttgattgtattttgattggtatataatgagcgtccatagctagcgcttatttttttagtgtctataactttggaggatttattgattagtagcatattgcccatgcattgcaacaggattttaattaaagaaaattatcattaacccattattaccatcattttctgcacatattacctcttaattgctgtgtatatttgatactgccatatgacctctttggccctacactatccatttcctttctcgcaaaaagtagagagttggttttgggggggggggggggggttgatatgtggggcctctagcccaactgtctttttttcctccgaaaaaaggaaggtggctgaaccaccaccactattcccttttaaaggagtatagaatctcctaaatgcacaacattcccttccctcccattttccctcttaaatggccatatgccttttcctttcccatccatattgtagagcatgctttgtagaaaacacccacctgaaagtaggaggaataagtggtaggtccggcttaagacttctgtagcagaacaagcacttctacatattagtaaatatgtctaaagaatggcgccatgaatgtgctaggaatatatatgtgtgtgctaggaaaacgaagagaaagcacttctctttgttttttggcccaataaatcttatattcagtccaatactccagttgtacgctaaactctttggattgcactgtgttcagtaatatcatgatttggttcaattttgaagtgaaaagaacacacctgactgggttgtacagagggaactatatatatgactgaaaactttaaaaaacacggttgaatatgctatgagagtcctatatttaacatggaaaatgatgttattgcttcagactatttgcagcatttagcttgccgtagctaaatatagcattcctctaagcctcaatcagtcatttttgtcatttgacttagcatagaatgtagttctttgttcactgatatctatataatcatatcacaaaaactgcactaaattatatgtgtaggatgaatctcattgtaccaatctcatgtagtcaatcctttattttgatatattgatggtaaaagctgggaaaaattgagcatgaagtgctagctacttataatattggaagggagtgtctctagttcaaatgtgcaaattatacttgcatagaatcacatgaggtaggtctagcccattatttcttgttaagatcttggtaacatcttgacattggtagcggcttaccatgtttattttggaattcctaataatctgattcaaaccagtgatatgtgtggagtaacataaccatattttgaccttatccttttctctttggtcaaaatgcaggattcgccttcattggagattagtccccccatgcgtggcatctccgtatgggacagtgctttaatcgagtttcacttgaaggttaagggcagtgacagtgatagtagttcagatgatgacatactcattaacgcctgtatggagttcgactatgagaccattgagcatgacaaaaagttgatatcaagaattgatggcccgttcggtccacttgatatgcgttatatcttcttaaagaatgggattgaggccactatcgatattgatctgggcagcacatctgaagcttatgatattttgcttgtagcattttcaggcgaggattccatgacgctttacaaggaccgtgttggacagcataccaagtttacagccgttgtaattgttcctttagacgagttgttacatatcaaagcatttggcacgtatggttcgtctcattttgatggcaatattgctgtgcctgtattaaagcatggaagctgtaagaaaccgttttggtttcagttggcagagaagaagtcggggcataagaatctgcctagagcttgcctggaggtcacgttttctacgatgggttactataacacgggagagatgtagaacaaatgactgcaagaactgctattttgctctagagcatttcgttttcctgggctgtgaaatgtttaagagttgtgatttgatactgaaatccgtaagttgtattttaactgaaatcgataatgatgttttatcgatcgtcagtttctttcgctgtgatatggatgcttgtatgttttccaaagtttgagtcacccgttgaagtagggactgaccacagacgggcagtcaaatcttgtttgtcatgaattcacaactgagctgatctagcacttgctgccatggattttttatagtatgtaggttgatgatatcttcatagtacgtaggcaaattaattgcgtcgattaatcaatacaagcgtttttatgcaatcagaatacctactgtaattttttttaaaaaatacaaaatccatacagtgcttagaaatacatgttctcataacatgcgattaatactaaactatcatagcatcaccaaaagatatctacaccaactagtgaagagcaagaaggatagaaaagaggattctaattttaggaaggtaattaaagaatagaaaagaggattctggtttttataggaaggtaattagggaaactgttcgaggcaactttcaaaagaaaaagcctaaaattttgggattaggatccattcggtgatgctcttatatattttctttaaaaaaaatatcttcagtgagatttaaaggcatgaaaaatatcttaccctcaaacagatggcctaattaactttctaaaacaagaaaagtaggctacgacaaaaactatcaacagaattaatcctttcccctacacgctcaattccttatcccggtgcagcgcttcccgtgtacagggaagcttcgagtggcggatcgtgagcctcctaatttacaaggacatttacaatagtctctatatctctctattatcatgcaagtaaatttgataacatagatgaaagataaatgaggaaagaaaaatatggttgttatgcatggcaacggctcagagtcgactcttagcatttattagagcaaattttgttgcatggtggtgaaagaaaggaaagaatagtaaaaaaaaaatattttaatacattaatgattagagcttatattgtctctaactattgtaggatctctaaataacgtagagctcatacctgacacctttatacatgccctaagactgaaattaactctccaattcttaggtactctctccgtcttattttaagtgcagtcatggattttcgtgcctaacgtttgaccattcatcttatttgaaaaacttataaaattaaaaataagtcacacataaagtactatttatgttttatcatctaataacaataaaaatatgagtcatattttttaaaattaaaacggacggttaaacattagacattaaaaccataactgcatctaaaatgagacggataggtggttaagggatctgttggagtgatgcttttacctctaaaagtctctgattttgggcttgggaggagtttaggggaagtctccaatatgcttagcatgaaactgtgacaaatcccaataatatataaaccaatgtctctttataagttcataaatcatgggtctattgtctaaaataaggccagtaataatttactagaagaagccggtcaaatttggctggctcaaccttcatctttaattttcgttcaaaaaaaaaaaaccgtcatctttaaccggccggcaataaacacttcccgagtaggactgtagagtagtgctaattaaccatcaccatctcatcaaggaaatctttcaatgcaaccaatagcaaatttctatgtgagccactcatttaataaattaaaggtgcaattatgcgaattgagtatatgatctagtcaggagaaaaatcattagaaaggtaatacgcagttttgaatatcattatttgatattttgttgaagtcgggaagatcaatgatcctcgacacactacttgttcctctgttgctttgagtcatttcctgttactgttaaatggataataggttctattaccaaacagtattgttggaatttgcaaggcagtcatcaaaggaactggttaagctgcaacaaaacaaaggatttattcgccaatggaactgattaatatgcataaaagaaattgttaaccgtcattactgaattgcatatatacactttcaaatgctattttctttttctttttgatattggactttcagtagatattattattactctagagaaaacagttcggaattagacaaaagaaagggaacaatttttttgtcgggtcggccgaagaggtggctgaccaatttcattaagaattggaagaaaattaaagtgcacaagtgtgttacatcgataggaggatgtcgatcaggtccaatgcaagacgcctcagtcccgtgaacagaaaaagcctaaagactggacagaaactgtatactcaattaattacccgggcgaaaaattcatgcctctgtccagatgataatttcctctttgatgtcattcaccaagtgctctatcgtcctgagacattggtcgaaaattctcccgtttctttccttccaaatcagccagcataccagtatgaagaggcagtcaaaggacgctctgtagctcatccggcaacgtgctctgttctgcagccaccagtccgccagagcatatccttcatctcctggaactgcgaagaaaggtaacaattcggaattctttacttttgagtcttaaggtcataatattaccactatggcatagcttcttccttaaacacgaaaccacaatgggtaagtgagtgccatctggtaagtctaatatacctgcatttggttgtcattcttgatgtaaacatagaaaatcaacaattgacatacgtgaaaaaactacaaactattaatagaaactagattgtaagagaatatatgggatttaagttttggaaggaaattagcccactggcattataaagatcaaatgatagaaaataacatctcaactagatgaaagtatgagaccaggtagtagtaacatcctagagagagaaatctatctacacctaactagttacctcaggaaaattcccacataaaacttcagaattagtaaatattaaatataaatttcatttgtatataaataggtttcgaaaaagaaggttactaaacatctgtttacatataatttcaatttaataactagtatagttaggcagatatacttaatatcaatagcccatgcaaatgcgtggtttaacaactagtgcacctttgttaggttctgttatttaccagttcagtttagttgcagtggcatgttgctaaaatgcaatcttactgatacaacttacgtagttacctcagagttgtgggcagaccaataattgagacttcctgagttcaaaactccaatgtttgaggtacaacttctcccttcggcctaaatcaagagaaactcacagattcagtgttactttctgtttgtttatgaagagaaaataagtaatgcacttgactaaccccgtgccaacgccacacattcctttcatacagaaatcttgtgctggacaagtcttccaaaagtgctttagcaaatctgaacaacagaataccagcatgctgtgatgcctacatgggaacagacaaccgtgaaaacaaatatggaatgtgtaacccttcgctaaaaaaagaaactaaatgctgtgataggtgcaccccaaagatcataggtaccaccatttatccatctgtcacgcgaccatcaataatatagtaccatgatcatttgtatacacatcaggggcatttcaaaaaaaaatacaaacaccattttaaatttcaaattgttgagcagcaatgcaacaaagttacactagaacatgatgttgatatctggtcagcacataaagtgataagggaaacatgaagtatgggtcaatttatcaaataaatgtacctaaaactcacaaattcatggttgcatacatgctgcacagatttttttggaacacatcaatggccaattgctggttcatgtgaaaccaatttcccaaaaattccatatatagaattgaggacagtatgaaggaatgcagtgttaatgtatacaccatatatatatttctgttttggttcagttggcccacttagcccatttggcccatgtatatgtatataaccttcactaccatctagggtttactgctgaatatatttttcgtgatttcccccaaatgttgaacatggtatcagagcttgcctgggattcgccggagctgcgtcctggacgtcgcatcagcgatctgctctgctgctaataatctcttctcctccgccggcaagtttcccctgtcctcaatcttctttgctgctgcctaccgaatctgctaggaagcaataggtttcccttgtctctacacccacggctgctgctggttactgctgctacatggttggactgcctcttactacggggaagttaaagcgggtccatttgcagccggtaatggacaaaatcagagcaaggatggggggctaaaaaaacaagctagtttatcaaagcgggcggaaggttcttgtgcaattagttctcagtgccattccaacctacttgctgaccattcttaaaccaccaaaaggattcctaaatgatgttgacaaagcgcgacgaaaatttctttgggccagagaccaagaaagcttgggcggaaaatgtaaagtgaattggcagcaagtatgttctccgactatacatggtggattgggcataccttgtttggagaagttctcacaatcgctgaggctacgttggctctggtatgagtggacaagcccggaaaaaccatggataggaaccccgccgccctgtgatgacaccgatcgtgctttgtttgctgctgccaccaaagtatcggtcggagatggacgaaaggcaaaattttgggaatccaactagataggagatcagccgctgaaatacctagccccaaacctcttcaagcactccaaaaggaaaaacaggtcggttcttgaggcaataaccaatgatgcttggatcgaagacatccgcggaggggtgacaatacagctgcttcaggaatatatatgcgtatgggaagtgctccacaacgcaggagaggtgatccatgaaggggctgaggacacaatcctctggaggtggtcggccagtggcttgtatacggcaaaatcagcatatgtcatgcagttcatgggcaaaacgttttcggattctactgagcttgtatgggaaacttgggcaccggggaaacacaaattcttcgcgtggttgctggcgcaaaatagaatatggacggcagatcatttgcaatgcaggggctggccaaataactatttctgccaactctgtttcagaaatctcgaaacggtacaacacctcttcatggagtgccccttcacgcagcaggtatggcgggacattggtcgcaaattcagaccgcaacgtttcctacatgtgaccacagacaacactctcctcaattggtggcgcgagcaaacagatgaggcagaaaagttgcaacagaaagggctacgttcagcagtcttgaccacgctttgggagatttggatggaaaggaacgatcgcatcttcagagggaaagaatctacaccatcggcacttgctagcaagatcatagatgagcttcgtttgtgggaaatggtaggtgccaagggagtgaagtgtattatgttaagagattaggcttttgtttttttagggagtgcaggcaggaagaattcctccgggaacgtctcccctgccttctgttctgtacagtttctctcacttcttctataatataaaaccagcttgctgggttctttcaaaaaaaaactgctgctacatggtgtttgatttggtctgtagcttggttcatgtgtgttacagaggctgctagtactgaagtattattgtggatttgtcacttctgtccattatgatttcttcagtagggattcttcctttacccccagtgagctctatttctccacctacttggctgaaacaatgccattcctgtttgaactggggtcatattcaaagaaattgcaatcagtatcgttgtcatctccagtcaaataaaccacatattcatgataaggatgctaagtctgaatttgccacattcttgaaccagcttgcacacacccctttgaaaacagatccatcctcatgtattgctgatgttagtatggatattacgggctgttcactttcagcaaatgttacagactcttgttggatattggactcaggggcatcctttcacatgacaccggacatttcacagctccagtcatgctctttgacaaaagcatcaagtgttcagacagctgatggcaccattctaccggtttctcttcaaggcactctccaaactaaagaatacacaattccagatgtcttttatgtgcccaatctatctatgaaacttatatctgttggtcagcttaccgatatgaagtgccatgtggtttttgatgaggctgcttgttatgtactggatcgtgctacaggcaatcttgttggagctggtcatcgactcaatggtcctaggggactttatgtgcttgatcatttgcatcttcccacttctacttcctctggttttcctggaaactctgcttctgccacctctataacttccaattcctctgtttattcctctttgtcagcctcttttcctcagtggcatcatagacttggtcatttatgtggttctcgcttgtctactcttgttcaacagggtgtcctaggaaatgtctctattgagactgatttcgtgtgcaagggttgcaagctcggtaaacaagtacaacttccttatcgttctagcatgtctcggtctacctctccttttgcattagttcattcagatgtatggggtcctgccccatttcattctaaaggaggtcaccgatattatgtcatttttgtcgatgatttctctcgatacacttggatctatttcatgaaacatcgcagtgagctctatcaagtttacaaatcctttgcttccatggttcatacacagttttctacatctataaaaaattttcgttccgactccgggggagagtacttgtctaatgccttccgccagcttttaagtgaccatggaactcttccacaactttcatgtcccggtgctcatgcacaaaatggcgtcgctgaacgaaaacaccgccatatcatagagactgctcgtactcttctaattgcgtctcatgttccaccacatttttgggctgaggctgtatccacctctgtttatctaattaatcttcagccttcatcaatccttcaaggccgcagtgctggtgagtgtctttattcctctcctccaaggtatgaccatcttcgagtctttggttgtacatgctatgttcttcttccacaacatgaacgcaccaaattatctgctcaatcagttgaatgtgtttttctgggttatagtcttgagcataaaggatatcgttgttatgatccttctaatcgtagaatgcgtatttctagggatgtttcttttgtagagaaccgtcctttctattattcgccctcctctacacgctcttcttctcctactgaggatgtgtcttttctgtttcttccaccaattgagttgtctcctgttcaaacccctacagatcctactgttccatccactacttctgttcctcctacatctactactattgttcctcctgttactccctcttccccagtgactagtactcctcctgctacttcatctttgcctcccat

SEQ ID NO: 10443 - DNA, 66987 bp, Oryza sativa
cttctccttcttcttctccgcttctagtagacttctagtagtagtaaacttggcgtcgcgatctccgcgcgctccgggtgcttcgcttcggaggtttgggaggatggcggaggcgtgaggtgaggtgagggagtgtgagatcgcgggggggcaatgtcggtgctgggcgcggagggggcggcgatgggcttcctcccggccgcggagcacggcttcgcgcgctcggcggcgccgtcgccgctgcgggaggaggaggaggtgctcgacgacgacccgaagctgccgccgttgcggatgcccacctccttcgccgcgttccctgggtccagctccggctccgactccgactccttcctcagcatgagctccacgccatcaggtaaattttgcttcatcaatgcgtgcgaacagtacaaaatctcctccagagagaggaagcgtgtgcctggggcagtatgatctcgatctctccgcgcgtgattgggagacgcgccgcctcaaattgtctgttttttttttgctcgaattctggtccaaaatttgtcaatctgtttggtggtggtggttgctgtttttgggttgatgtcagggctgatgaatccgtacggcgtgtggtcgccgcgcgcgccgccgtcggaggcgtcgtcgtcggagatggagttcggcaccgcgcgcgagtacgacaccaccgatctcttcttcggcgagaattggctctacgacgaccacctcttccacaccaattcggacggcgacgagggcaatggagaggacaagttcatcgttggcgctgactctaccgcccagtggagcgaaacgcgtgagctcgacgattgcggcggccgccaccaagtgcacacgaaatccaaggccgacgctgaagcctgcgcggaagtgtatacctgctcttcagcgccctgcagctgctgctacggagggaggaagaatgatgatgggttgacgagggattcttgctctgctgtctatgggaggtacctgatcatggatgaccagacagaggtgctggatgagtgtggtgcagatgcattcctgttcacacgggatggagatgccatgctcaaaagtgaacagccaattgattccaaaggcggagatatcgagttgctggacatgagtacggtggagaaggagcttcagatgctcagtccgtatttggctgaggcagatgctcttgagagtgagtattttctgacttgtcctcttaattatgttcaatcttgcagttcacgaaatccttgaagctcattaattttgttgttgtactggatccagaatactcagttcatttctcagaatttatttcacttatccttgcaaagttttgttttcttgtggactagttggttttaattgtggttatctcttgcagaggctgagcttgaacacgatttcagcggcaatggggaactagatattaacgttgttacaaacgagaaaactgccgatgacaaagaacttctaaaaaatagttacagcatacattctttacctgagataggtgatcctctagatgtttatgagatggaggactttggacgaacagatacaagtgttcaaaattctacagccaataaaatcgctgaagatgcgagaacagatattgatcttgcactttctagatttcatgaggaatatgaggtatttgagctgagaattttccaccggaagaacaggttcgtcatcagatgctttcttttttttgtttattcttccgccatcatgtaaatatactttccatgctcatgtcataagtgttctttgcaggactggttttgaggaaaacaaagagttccctattgtcatgaattcagttgtaggtggaagatatcgcatcactgagtatcttggctcagctgcattcagcaaggttgtacgggcacaggatctttggacgggaatggatgtctgcctgaaaataataaaaaatgacaaggatttctttgaccagagcttggacgagataaagctccttaaatttgtaaacaaatacgatcctgatgatgaacatcatatattgcgcctttacgattttttctactatcaggtatgtgatgtaaagataaaatgaacacaatcttttggtgtgctttactcaatctcattttgtaccctgtggaatgctgtcatccaaaaaaatgacaggaacatcttttcattgtcactgaattgctacgggcgaatctgtatgaatttcaaaaatataaccaagagtctggtgatgaagtgtacttctcattgcgcagaatacaggtatgcctgactgttattcccttttccctgagagtatctccggttgtgttgttatgaaagcttgtaaccatcattttgtctgttaattttatgaagccttcattactaaagaaatcatggaacgatgcaaaagtgtttacttctgttgttgcaatacacttcagttgtaaagaaatttctcttaagaaaaacagttgtagagaaagatctcttcatccattgatcttccatgattaatatttctctgacattctgttttatggaaggttaaaataaatacttctagcatgattaagttatgctgtaaaaacataaaaaatcctgctgaaatatgatatgttgttgtttttcaggctatagctcgacaatgcttagaagctctggtgtatttgcatcatttaaatatcgttcactgtgaccttaaaccagagaatatcctcatgaagagttacagcagatgtgaaattaaggttattgatcttggaagtagttgcttcttgacagacaacttaagcttatatgtccagtcacgttcttacagagctcctgaagtcattctaggtcttccatatgatcagaagattgacatttggtctctcggatgcatcttggctgaactgtacactggtgaagtaagttttcaactattcatctttacttactaatgtccatttgtcggtactatattacattgtcacgacatgcttacattttgtctagggaaattgatgtatttactcagtcgaaggaaaagaaaagtacaaaccaggatttgtccatggttaaatgaattattgtgccttttaactcatcccgcaattgctgcagtcaaggttttgattgtgggcttgtggctaatgttctttcttgtataactattcagttcatcccaagaaaattaccacctcctcaattgtcatagtcttgaaatattggtagaaccttcattgttatcgcaacactgttattaattttaagaaactgtatgcagaaattggaagagtgattcaagtgcttatggcttatctgcagaacatttaccaaatttaagaaatgatctattagtaactgtaaatataccggggaatccccatcatgtttctttttatctagttccaattgaagatattgtatttagtatttaccacttttgttaaaagtacttgaaacataaaaattgttttgtaactgtaaaccaaataagccaatgctctcttttttttttctcacagagacaatgtgattgagatctttcttatacatgtggcaggtgctctttccaaatgaatcagtacaaataattcttgctcggatgatagggacaattggtccaattgacatggaaatgcttgcactgggacaagatacccagaagtactttacagaagactacgacctgttccacaagaatgaggtacatgctatttcttgtgtactttcttctgtgctggacgtattgtcaatacttaagattaagaaaccaatttaatttaacaaaaccaacgttttttgctactttatgatgcaactcttatttgaaccaataatcagtggatgatatgcaagatttgatctctctttttggatcctctttgtgctacatgctttaaatgttgaataccaccgacaatatcattgacaattaaatctctcttaggaactgcacttagctcatttggtgccatactgccatgttcctccttactactcagttttaaacggttgcattttttttttgtttctgtagaatcttatatcaagtgaagctttactctaaatcttgttatagaaaatattttgagtcgttaagaaatgatagctgacaactaaaactctagtatatgttatattggtggtagaaagtttagtcagaaactgagagccttatgttcctgtcatcttaatgtttctttgcccaaggtcttctgtgattgggcacccagattgtttctgtactttcgtgtggatctggttcccaactcaggcgttttggctgacactgttgtttgttagcgtgatctttagaacaagaatttcagttgttccccgtcactcagtttggtactgttgccagtgttgttcaagcgatgccattaatttcttgtccaacttgttttaggagacggatcagttggagtacttgatcccagagaagatttccttgcggcgtcgcttgcagtgccccgacaccaaatttgttaaatttctttcctacctgttacaaatcaaccccagaaagagaccaacagccagtgaagcattgcagcatccgtggctctcatatgcctatcagtgagatgtcaaccaaatgtgtttatacgggatggatcgtttttctgaagttccatttgcaccaggatttggcttttccgtttttttcagggcagtccttggttagcatcgaaaccctgttttccgagatgaatgcaaacttgctcgtgcatgtaaatatgagaagaagaaaaggttccttgttgcatatatgtatagctgtcactttgatgtacttcacccaactcatcaatagaaatgtgtttcaagtttcaacatacccgggtctatctttggcgtttgctctgaggcacttcacctaattcaagtttcaacggtcaagtgcgatgtcaatgatcttagtttatgatgttgccactaaatcattcattaacagaaaagcagtaacattgaaaatttgaaatccaaacatgtgaaaaaggatggggggcacaaactaactgaaatctgctggaagcctaaataaagaggggatcaaatacaaggcctgacatatgaaaccaaaaaaatgcacgatgtagctccaaaagaccatcttaaggtcacaggtgccactgaatcatcgctgtagaaccttgatcaaaatttacaagccttcaggaactcacagaccattataactgtcagttagattatcagaactgtcagcaacaaaaggtcactatacaacaataaatttacgctcaggatacaaatagtgatctgcgatctccgtgtcgaacaatggcttcgccatacggaagggcctggatgaataacattatatacaagtgttatctccaagagtataggtggcctttgagcctttgcctaataatccaatgccctggtggcaaaacttatgctgcttgatcaatttgtgggatcccatgtctttggaaccactctggcatgtgaaatgtttcatacaatgccggtctaacatcattttgcagagaaaggtgcttgagaagtggaaatataactcccataagctaaaatgtttgagaatgtcagtggatcagtacaccagaaattgtatgttcagaacaaaaaggagagttatctaaattgtaaccttacctgatcatcaacaggttgtccagccgagaatgtaagacaaggtattccattcaatggttgcagcaggaaactatatggattgttatcaacaaggacaattctgtggaaatctttcgacaaacaagaaagatcttttacatgctctctatattccctggaattcagcacacggcagcgtcaaataagtgaaaagctcagctaacgcagcaggtagcacaatttcttaaagaatatgtgtctttgactctttgtgaaatcaagctggtagcaaaaccaggaagacatgaataagttatgatcaacatgatatgtgaattaccaaaaacatcattacaataattcagtttcacataaaacagctatacattagagattccatgggcatgaatcggtgctacctatgggtgggcacttgcaatatttaagtttgtgcttgcaaaaagcctcccactaaaatcaattgaaatcacatctcaatatttcagtgagcaagacaataattcattaaggcactatggaagtcagaagcaaaataatccattatttacaatccacaaaaatgctaacagtaacttacgtggtaacagttgatggcctgtagagacggtgacagaatctgttgtgagcatctatcctgtcaactaatggttttgcatatcctggagagaaaagcacaggttactaaaatgaggtgaattcaattgagttctagttgaggatcaatatgactattcaggtaacagaccttctaaaccagcagtgaagagaataagatcagcaaattcgctagttctctgcaaaaattcgtgcaaaccaggacgctcaaatacagtaacacggttcaccctctgacttccctcagcatcctttatatcaaggaaaatacaaactctgataagcaacttcctggattttagcagaatatcaataagaaaaggatggcagcttacttgccttttcagcggatatgcactccatgtcaaagcaatgcagtcctgcttcaacagcctcggcacgaagagcagcaggaagacttgatgactcatatgcacaaactagagtttcatccaaatcaagcactacctggagtcgagcaatcccaattatatgattgtaagttacacaggtggatgataagtttattaaaaggggattagggaaatcagtcgatgtagaggataagttcattagaggggattatggaaatcagtcgagtaatcccaaatatacgattagggaaaagataggttcattatgtccttgttcggttaatccctcctcgaggccttgttcgtttaaggattaattccacactcccttaatcccctctaatcccttttctcctcaagaggatcgaattaataccgatattaaccgaacaagacctaaagggaatcgatatgaacacaacaaagatagatagaaactaggtctaatacgctgtcaatggcgactcaatatcagtataattaacctgctatgtgtgaaatgaccacaaattagcaatagtagtttgtacgatcactcaacagtcaacagcaagaaagtgaacacaatacacacagctcgctccaaagatgcaggaatgaactaacacacatctcggtccgtaccgtgagccgcctgagcggcggcggcggccccgtcgacgacgcgtcggcgggagcctcggaggggagccgcacgaaggcgaccgacggcgacggcgacggcgacggctggggcggcgcggcggagaggagagggtggcggagcccgaggaaggagaggaggtgcgcccaggaggaaggcgtgccgcggacgatctggagcaggatctggaggaggaacccgagccaccccaccaccgcccgccacgccgcctcccccggatgctgctgctgccgcaccggccccacccccgccgccgccgccgcctccggcgacaagaactcggccgccgccatctcccccccgcgccggaccacggggctgggcttgctggctcccggagtgcggctgcctgggcggctagggggagagctcggggaggaggagagcaatcatagggtagggagaaggagaggaagaggagggaggagtagggcaggtggccgacggagtgtgggagtggatgtcgtcggtctttgccctgcgtcgtcgtcggacacgagggagggcttcggcttccctcggataaacggtggaattcggtgacaggctgacatgacagcccagccgagattatacaaatcagctgttagacatgttcttttctgcaacgaaaacggtataaaaggacctctttttaaactgctaaacgatgtgtttcgtgtgaaaactttttatatgaaagttattctaaaatataagattaatctattttttaagtttataataattaaaatttaattaatcacgtattattatcatctcgttttacgttaaacacttaatctttattttcatcttcgttcttcaggagatatcaaacaccaccttagtctcaaatctgcattcgcaaaggaataatctttcttttctttaaaaaaacggaaggaataatcacctcataaactcacttcattgggaagtactccctaacagtgaatcaaattagtttcacagtatactttcatattatggcctattcactttgatgaaaaaaaccctaaccaaattttgccaaaattttggcaagttgtcaaggcagaattttttatatagttattaaaatttggcagcaaactaaatgttgccactttttttggtaattttaccaaaatttggtagggttgaaaatgaccctatatttgttttgcgataaaaatattactatattttttaaaaaataacttgattatatttatgtaagtttaacttagaaaaaaaaataaaacgatttataatataataaaacggagtactcaatcacccatatgcactcaatctagattaaacctcggatctcaatgcaaattatacggatgatgagctgtggtgttgccattttttttccagaaaactacctacacctgaactggtaatatactcactacatccatttcaacataaagaatttcttaatcatataattaattatacggacaaaattcattacattttggggacggagccgtgcacgtaaccactcgctccaatttatcttctcacgtccaggtcccagccctttggtcgcgcgagaaaacggaacaatgctgctgtgtgcagcctgcagccaaccaaccaggcacgacacgtggtgcggatcgcgaccgaagcctcacaaaacgcggttcatagccaccgtgccaccgcccaccgctgcccagcaccgtcccaagtacaatgaacgatttttttcaaagaaataatgcagctttaataaaaaaatgaaaatagatatcgatcatctaaaatcataaatttaatacctcgtcaaataaccattgtttaataagttttaaaaacttaaaaacttgagatgtgagtatggctgagtttagttccaaactttttcttcaaaattcgaatttttccatcacatcaaaactttcatacacacataaacttttaactttttcatcacatcattctaattttaaccaaactttcaattttggtgttaactaaacacaccctacatgcatatgagtaggtcgtgggacctatcgaactttggagcttcaatagaccacccatgcttgctactcctatttctttttcttaatcaagctagttaacctatggaatagcctgtcgaacaatgattatcgaacttcagttgtttgagagggtgttaaatttatgatttttatctatcaacatatatttatacattttttcactagagttctattattttttaaaaaattctcaacaaacactcggtctaaattatcccgtcacattacatcacaccacgtcacagtcaactcactaaaatgcagcagcaggagtagcagcgaccgatccaaaccccagccctcgcgccgacggtccgagccgtctcgatcaccacgcagctcatcatcccctgcgccgaagggaacagatcagagccagccgagccagcgcggcgcggtcgcctttgccctgccctgcactgaccgttggagagccaagcaacccaacccaagcgctcttctcttctcctcctcttcctcccaaatcgatcgggatccgatgcgcacggaggaggaaggagcatggtgaggacgcccgagaggagctactcctgctcctccgccaaggaagtcgcctacaggttggttcgcttcgatccccttcccccttctttttccgctgcttggatcaagaacacgggttctaggagaggctaggataggcgaaaccctgggttgaatcattcgtcttgattagtgtacttagaagagtgtttcttgggttgttcaagagtgcagttataaattcgatctgtttgcagctgctgggctcggatggatcttgaaatttcttttaattggttttgactgttagtgattggtgtgcttgctaatggctcaaactggactgatcagaaagcgcaccaacttcgatcagctggactgaaaactgaattagtggcacttttacttcttgtgacagatcatggtcttttgttcaatagaaggaattgaatgtgacattacgtttggcttgctgaaaagtgaaaattacatcctcatacctgaatcgacagtttgacactaacaactctcctatgaaacttaatttttaggattttgattgcgtattgaacacggaattgtcattttcgtgaaaattgtgaaaattttcttttcgtggaaagtggaaacggtagcatggtgatatcagttgtgagaaaggattcagggtcaattctcatggtgtgtgcaactgtatacacgtcttccatgtaatggaaaaaaattatctgatggtgtgtgctattctaacagctgtggttactgtggctatgcattgaacctgagctcctcaacacggaacacagcgaacattggatccaagtatggtaagcagatcaggaaaggtgtaatctcattctttgcgatcgacgagagtcggttcacacaaactgatgaggtgagctgcatgccatacttccattcaaggcgctcctggggtttgttcagaaagaggacaaggttgatctgccgcaaatgtggtggccgtatcggtaatgcttatgaggatgaggattccacattgtatgatggttcagatgatttgcacatgagctccgagggctacagcatgtcgagtggaaagaaatatgttatcaagattaatgcactgcagccttcaaccgatgactctggtgttcccttcaccctgtgatgctgttctgaacttctgcagtatgcacttttcgattcttgccttgcgctatactggactgtcaatcaagtaactgcagaaccaagagattacgtgctagtgtgtaactgtatattttgataggaatgctgaattttgcctacctgtatttataaaatggaagagtttgttgtctatttacatatacattcagagttcagtgggtgtgcaactgtgcatcatggacctggatttggcaatccatatttgggcaaatgtttagttagaaatcaggtttctgatgatgttcagtggtgtgtacttgtgtcttgtactgaaatattgtagtgtcttttgattttttgtgtatctaaagaatgatgtaaatcttcagctattctaaacggcagtttttttttgtttgtgttttgaagctatgccaattaatttctgccactaatgttgatatgatttgaagtgaattcctgtgactctgagcaatgctatgccattttcagaaattgcaattgtgagtaatgtgcaagagccaactgccaagtgcagaaactcattgttaaaattttcctgcggagaaatctattgaatctaaagctcagatgaattttcctgaaactatccagatttcaggctaattcagttgcaagaattaactgaaactaaagcacagatgaatttgctgagggaatacaaatgcaactgcagtaacagaaataactaaagcacagatgaatttggctactgcagtaacagaaatataaagtccaaaatattaaacgaattggatctatcgtcaaattaaagcaactcagacaccgcttgatattctgcaaatccgctgttcttagtattggtcagcgatggtcaaatcaatatatagcacatttcaagatgtatcagcccaatatgcaatgtagatttcaaccagaaacctatatcgaactcagcctaagttcaccaaatcgcactaaccaaaacaaaatttcatcccaaaacggacaaacacaaattgcacatcaacaagaggacagatccacaacattggctctgaaacatgtttcaattcaaatcccagttgcaaacatcatttgcttcacaatttcatgattcaggtaaacactagaaaaactaaacagcgaactgaacaaggtggattccacggctttccatcaaactttttttcttgaccgcaagacttgtgggcacggccagacgacatgggagagatggcggagggaggcaagatcgatcagccgccgaagccgtagagggtgcggccctggcgcttgagcgcgtagacgacgtccatggcggtgacggtcttgcggcgggcgtgctcggtgtaggtgacggcgtcgcggatgacgttctcgaggaagatcttgagcacgccgcgggtctcctcgtagatcagcccggagatgcgcttcacgccgcccctccttgccagcctccggatcgccggcttggtgatcccctggatgttgtcgcggagcaccttccggtgacgcttggcgccgcccttgccgagccccttgcctcccttgccgcgccccgacatggccgccgacgacgacgattccggtggctcgacgcacgagagagagagaaaagcgagtggaattggagaagaggtggtggtgattggagtgggatttggggaagaaaggggagggggttttaaaaggggacgagaggatggagtggggaggcggctgccgttggatgggggagggaatggacggtgaggatctggatcgcggggggaggagcggatcgttgacgtggcgtgaggcgcggatcggtgatttggcgggatagtgggaattttcgtggtctgagaggcggccagctcaaaattttgacctgcaggcgccgccaaatttggcctgcggcgcggccatgggactatgggagtagggacttggcgtttggcctttgagagatttttttcactgtttagtgtttacgaatttccaagggtcagtttttttcttaaaagtcaaagctgattttgaaatttgaaatttaatttttaaaagtgattttagatagatctgtacttgtgattttacagtcatttcaaaataaattgcgcaacaaatgtgacggagaaaccacccaaaattagccctagaaccaattatgagaattcaagatcaattgtagctctttcagtaacacactgggctgcgttctaaaataaggttgagttaggctaatccctcatttatcatgagcatattttccaaactactaaacatatattctataaaaaaatactatatatatataatatcaaataaaattatttttaattttataatagtttatgttagttccgtcctaaaatatacttcatccatttcatattataaaactttctaggattatcctgtctatctagattcgttaacatttatatgaatgtgggcaatgctagaaagtcttataacctgaaacggatgtagtatcatataatatcggatagtatatgtagtattgtatatatggatctcatccggtgttagattactatgttttataatggatgagctactttattaatcatgtgtaatgaataccttgggttccataccagtgactagctaagcccaacccaacagttgtaccaaactcaaccttagaaggttcaatatctacgattgttgacgaaaaatctgcactcgcccaatggtacaggaactgtgttggcgcgaactaagtcgacgaacacaatgacctaggagatctgcttagttctagtgcagacccaaaggttgatgagatgcaggcataccagtcagtttgatcctacagcaagtgataaaatatacaaatagcatatcaatgagccgatcggctgtcaagctgatggagtaatccagccaatgtcgataccagccgatgtcaatagtgtgttgagcaatcggctatatgtctaatgtagataatgatatagagacaatctgtcagggttacgggttaggcataccctttacccttcgatatacgttacatatcggtatggcatacccacgcgcatatggatacttcccgcgtacactaaggaaatccttcacgaagtctacggatgggaagagtcttactcggacaagactgggtcatcaatgtatcgtatagggtctgttatctccgagttctacttggaaaccgcctgacctgcgatataaaagggaccccccggggaggacctgaggcatcgaatctcagagccaacacaaccctcacagcctacgaagtcggagcctgcaaggagccaaatcgccggggatctagtcgaaccaactcgaccacgatctcgccggatccgtcaagttccattgttccctttgtaacctgtgttttctaccatataatcccacatcaactggattagggctattaactaccaaggggcctgaaccagtataatcctcgtcttttgtctgtttgatgtcgtattacgtagattattgtaccaacgtaccccaataccctctatatccggtctacgggtaccacccgtcgacagtggcgcgctaggtagggggccttggtactcaaggttctactactatgtcatccagcctcgtcgacaacagcgtcaacaccaacctcagccaagtattccctgcttcaacaatgctggtgtagactcaagtcggcgaaatcgtcttcccggtttacaccacgacgccgatctcaaccggtccgtcaatgactggaaacgagaacgcagtggctacaaaccaaggtgactccatgtcaaaaaatcctcccgccgaggcggagaacggagcatcgacgacatccgagctcgagaaggattctaatgcggccaaaccttgtcgttccgacatgaaccgcgagccgacgaagatgacttctgaagcgacaaggtcctggtgtcctatccacaaaaccaggaaacacactttgcaagcctgctgggttttcctcaacgtccgcgctgaaattcgcgcctgtaaagagcgtggaattcaacgtatttctccaactcgtgatgtctactgtcctattcacaagacaaagaatcacgacctctcaagctgcaaggtcttttccagcgccatggaagcgccatcccctaaggtccaacaggcacacatccccatcagggataaagacaaggaacgaggagcgatgccaacttcagatcgatttgttggggtaatcaatatcgatcctcacgaactatcagtcttgcaccttcttgaagactatgggtcatcgacaacaagcgcgccgcgggaggtattggctatcgatgatgtcggcatatcagcgtgcaccaatgcagaaacagagaatcaattgaccactccagctcagcacatcagagccgtcaacgctataatgagggaaaccccctacggtcccgttctaaacgacgatctcgcgcgttggacagaatgactacgggaatcagtgaccaacctcagcaacgcgttcgaagaggccgctgccgcagcgcacccagagcagccaccaactggcgatgccaacggtgaaaatcctgaatgaagggaatcgcctcagcgagctacccctcaacctcgcggcactggcgatctccgagatcacatcaacggccgccgagaggcacgacgcacacgagacaatgagaatcgttcccgacgtcatgtctcttcacggcgccatgataacgaagatcgaggagaccgctcaaacgaggaccgagaccgtgataaccgccacaaccaccacgatcacaacgatcacaaacggcgggtgctagacgatactggttgaggacgtcgccataacgacgactatgatggagaccggcaccaagacaacagcgggagacgacgacaggattctcgagatccaggccgacatcctcgtaatcgtacgccagaaccaagcgacccatcgtcatcgtcatcatcctcgtcttcctcatcatcagacagacatccacgaaggacacacgatcgccgacaacccaccgcccccagcgctgggtgtagggctttcagtcgttccctacatgatgtccgatggcctgagagattccgacccagagcaatagagaagtacgatgggagcaccgacccagaagagttccttcaagtctactccacagtactctacgctgccggagcagacgacaacgcattggcgaattatttgccaactgcgttaaaaggctccgcacgttcatggctgatgcatcttccgccctactcaatctcttcgtgggcagacctgtggtagcagttcgtcgccaacttccaaggaacctacaagcgccacgcgatcgaagacgacctacacgcgttgacacagaacccgggtgaatccttgaggaaatatattcggcgcttcaacgagtgcagaaatacaatccttgaaatcaccgacgcttttgtaattcgcgccttcaaatccggtgtcagagatcgctatactacccaggagttggcgacaagacgcatcacaaccactcggagattgttcgagattgttgagcgatgcgcccacgcagatgatgcgctaagacgcaagaacgataagccgaagaccgagggagaaaagaaaccagccacggacgcacctgagtcaagcaagaagaagaatcgcaaaaatgggaaaaggaaagctcaagcggaagtcctcgcagcagaatacgcgaaccctcccaagcgcccagacccacaaagtagcaacacaaagaaagcttggtgccccatacacaagacgaacagacattctttggaagattgccttgttttcaaaaaatcgctcgagaagcacattgcatctgaaaaaggcaaacgagtacgcgtggtcgaaaaggacgcggaggcggctccctaggaatcggactcagcatatccagactctgacctccacgtttcacacatcttcggaggttccacaacatactcctcgaagcgagagtacaagaaagtggaacgcgaagtctgttcgacatggcagggggctgcacccaagatgaagtggtctgaacagaagatagagttctcggaagaagaccaccccaagaccgccgtcattcctggacgatatccgatcgtggtcgaacccactattcggaacatcaaggtcgcacgggtcctcatcgacggtggcagctcaatcaaccttcttttcgccagcactctggacgcgatgggaattccacaaagcaagttgacaccaaccgatcaaccctttcatggaatcactccccaatcctcgtccagaccattgggcaagattacgttgcctgtgactttcggccaagccaacaacttccgaacagagcagatcacctttgatgtcgctgaattcgatacagcttacaacgccatcatcgggagaactgcacttgcaaagtttatggccgcatctcactacgcgtatcaagtgctcaagatgccgggaccgaagcgaataatcactattcaagggaacgcaaagctggaggtgcaatgcgacaaacggagcctcgacatggtcaagcaaacgcccagcccacccgccacaactgagccacccaagaaagtgagcaaaacaaacaagacgccgaaaccggacggcgcaatcaagattgttccactctccagtgccaaccccgacaagaccgtcaagattggggcgacactaaccgagaaataggaactcgcgctcatcaccttcctccgcgacaatgctgacgtgttcgcttggtagccgtccgacatgccaggggtccccagggaggtaattgagcacaaactcatggtgcaacccgatgccaagccagtaaagcaaagactgcggagatttgcaccagaccgaaaacaagccatacgagaagtacttcatccagaatggctagccaatccagtcatggtgcggaaggccaacggaaaatggagaatgtacgtcgacttcaccgacctcaataaggcgtgccccaaggatcacttccctcttcctcgaatagatcaactggtggactcaatagccgtctgtgagctgttgagctttctcgacgcttactctggctactaccaaatcagcatggcaaaagaggacgaagagaagacatcattcatcatgccgttcggggtattttgctatgttaagatgccgttcggattgataaccgcaggaaataccttccaacgcacggtccagggcgcacttagcgatcagctcggcaacaatgtcgaggcatacgtcgacgacatcgtcgtcaagaccaagacatgcgactcattgattgacgatctgtgggaaacgttcgacaacctccgacgatatcgcctcatgctaaatccagagaagtgcacgttcggagtaccatcgggaaagctgctcggtttcctcgtctctggcagaggaatagaagcaaatcccgagaagatcaaggcaatcgagaacatgaagtcacccacaagactcaaggaagtacagaagctaaccggatgcatggcagcattgagcaggttcgtcgctagtatgggagaacgagggcaacctttcttcgctctgctgaagaagcaagacaaatttgtatggacacaggaagccgaagaggcattcgttgcactcaagcgctacctatcaaccccctgtacttgttgccccccaacctaatgaagaattattcctctatattgccgccacgccatattccgttagcaccatcatcgttgtcgagagagagaaagtacaacgaccaatctactacatcagcgaagctctccacgacgcaaagacaagatatccacagatccaaaagcttatttacgcggtcatcatgacatcaaggaagctacgccactactttcaagcccacagagtcacagttgtctcctccttccctctcggtgaagtcgtgagaaacaaagacgttgtcggccgcattgcgaaatgggtgttcgagctgagccagtttgatgtccactttgcgccacgaacagccatcaagtcccaggtactcgccgactttgtagccgattggactatgcctgataacaaatcagacaaccaagtcgacaacgaaacgtggactatggcgttcgatggtgcactcaacagccaaggagcaggggcaggatttatcttgatgtctccctccggagatcaattcaagcacgcaatccacctcaacttcagggcgaccaataacacagccgaatacgagggactactcgccgggataagagctgcagccgcacttggggtcaagcgactaattgtgaaaggggactccgagctagtcgcgaaccaggtgcacaaagattataaatgctctaaccctgagttatccaagtatcttgcagaagtcaggaaactagagaaaaggtttgatgggatcgaagtcagacacgtctaccgcaaagacaacatcgagccagatgacctagcacgacgtgcatccagacgagaaccgctcaagcccggcacttttctggacatcctgacgaagccatcagtgaaagaggttagcggcgaagttagcccggacaccctgtcgcgaccgagaaaaatagattttcccgaatgctagtgtattaatccccgtcccagtaaaagccggggtacaccacacaaacatgatataaaagacacatctttattatatcgataatatttacattattacaaaggcacttaaggcctgacaataaaaaataaacagtagcggactagcgggcctacggctccatcttcacaggcgctcaactggggtataagccaggactccacctaagacttcttctccaaagcttctcttactgaaggggggagggaaagattgagctaagaatgagtataaccacagtactcagcaagccacaccggtagatgcatgattaatgcaagggggtacaaggggtaataatataggggttaagttttgcagtaaacagcatttaaaattcacttagttgcccaaagctattttataaagacgatcctagagctacacaatattattaatcaaggccgtgaaccctcacgaacctgccttaacccaaggcctacgatgattcagaccgaactggcaacccgaccctgggtcccagctcgtcccaagccaacccaggccaaccattccatattttagttgttaagtaggttttaagaattaaaacactaacttgggtacattgctaggcttgcccataatcgagggcgcggctattcgaataggttatactttgatcagaggtgtacatctttacccacaagacacatcttcctcacatgtaaccacgtgccacataccaccacggtatacggacggaagacgtgacatagttcccaacccatcctagccataaacaagagtaccgacccaaccccacctacggccggaacctccgggacaggcaggcaggattgagcccatagcagcaggacaccagccctgtgccatgacatctcgactaccgggccgcagctcgtgtagccttcatttgtcctagagatgtccatcgacccccgacttcgtccatctccatccgtgtacttttgtttataaccagactgagccacaaactaagccttacccactagacatgtggaagtacggtagtgctttgcaacagaggcccgagcttaatccttatagtacccgaggtacgactaacaaaacccaaccacgcaccttgagcccagcctaaaaccattttgggggttttgaatagaggtggaggtgtgtgtccaattccaacataagccaaccactccatagtgtccaaatgatatgagaattcccaaagtctaaagttataaaaccacctaatgttgcctaattaaccagcgaagcatctacctaagttcatactagtggaaccataaatagagtacccactagttggggttttattttcctagggtgaacaaggtaataataacaatagaaataataataaggtcataacaaaggtaaataggcatggctaaataaaacagtgataacgcaggaatttaaataaagcgataatgcattaatttaaatcaaaataattttataaactgggattcaatatgctcaaggatgatgtgactttccttgctcagagacaacggccttccgaaccttcggcgacgaccacgaaccatgcttcgggaacctccggaacgatagaagctacgcgaagcacacaagcaaagctacaagcctataaagaagcaataacaatacataaaaagaaagcacacagttctttaggttataacaaacattaggagacttgaacggatcgattcggagctcgtatgaccaagacatggtcatccgaagtttaatgctgttatatggagatttgcggattattataattaggttttacaactataaaacatgtgtaagcgctagcctggaaaagacaggaaggctgcgccgttgacatacggaccccacatgtcaacctaaaggaccgcggtagaccgagtatacagagacggtccacgggtcgatggaagcggaccccgtgtgtcaaccgaggcgagtagctgacaaacggactccactagacaccacgcgggccgcacacgtggaaacaacgcggctaccgagcgggcacactaacacggacaccacacacacaagcgaacgattaccaacaccagtacacgggtaccggcgtcgacaaccgcacaacgggtacggggcgacaccgaaaggacgaggacggggcagcgagaggagagatccttaccaccacgcgacgaggcgagggaacgacaacgacgaacgagcgcggcagagacggccgggaacgacggagacgaaaggcgaggggacgacttcggcggtgatccttggacgaaggcgagacgcggccggcgtaacgcttggcgatgcggaggcgaggacgaagacgacgacggggctgcagcggcacacttgacggacgcggacaacggacgagaacggcttgacggagggacgaacgccacgacgaccgggaacgacgagaggacgacgaccggaatcggcgaggaggcgacaagggcagccggcagcggctgcacggagacgaggacggcgtggaacgcgctgctgcgatgaggacgagggtggcggcgcagcgagacgacgtgccgggcgaccgacgggacgtcgacgttgaggacgaacggagacgacgacgacggacagcggaggggttcggatggaggggaggcgaggccgagggagaccttgccgctgcgaggccggaggagatgacgacgcgatcgaccggggaaattccggcgaggaggatggagaggtcggcgcggcacgacggtgttccggcgaaatacgggcgacgccgtggcctggccggggaagaggacggcgttccggtgccgggagaggcagcgacgacgaaagccgacgctccggcaatgcggcacaggcggctggaggtggtacagtggcggcaacgccactgtacaccagcgaggacgcgtctccgatggtccccgtgcgaaacggagggcaggccggcgtagaggggacacctgcgaggccgaggaaggtggtggcgacgtcagccgccgcacgggcgaggcggcacaggcggctggagggtggccggcgccgagggaagagaaggaggaggcggggagaggtggtgcggccacgggggagctcgggaaggggctaaaacgatagaacgcacggagggggttccattttataggtgaggggagggagccgggcatgggagagggcggaacggtgacgggaaacacggccggcggccatggaaggcggccgggaatggcgcggccgttccgggcgattgggagcgccattcaagggggaaaacgggggaaatcaaagaggaatcaatggggattaattccccctatttaattttggaatcccatgattaaatcgcacggatttgagggaggaaaggagctagggttcacgggagagggaggaggccgtgcgggaggaggaagacgaccggcgcgtgggccccacgcggtcagcgcgcgtgaggggtgggcggctcgggaggctggggcggctgggtggcgcggcttgtgccaggcggccggcccaggaggagaagagggagaggcggcctaggggagagagggaggaggagggagctgggccgaggggaaggagaggaggcccaagagaaggagggagaggaagagagggagagaaagagagggaggaagagaggactttggccgcgggccgagagagagagagaggggactttgggccagttggcccaaagggaggaaggagaattatttttagctttttctttttaataaactttgttaattgttgttgttgtttaataaatatttccggtgctctgaaaattcaagtaaaatttgagggctccttttagaccaaggagaatttaacaaaaaattctccgggctacattcgaaattttcttgtatgtattttagtgtttgccaatttcttttcgaattttaattaattctattattccttttagaaaatgatttttatttcgggatgaatttatcaggacgtgacaaatccaccccccttacaagaatctcgtccccgagattcgaggaggctagcaagaagataggttgggcggtcttctcttcttgtctgacttcttccatcgcgtcttttataacaaacttgcctagcaaaacttctccactctggactgcttggctcgatctcctgttgcagatggaatcttctcttcacccgacttgtccctggttgcacctttaactgactcagactaggctacggtagttgaggatggggcttcagttccagaacttcttataattcatatctttggcgtcaacctcatacaagttacccacttcacgttatgcgtcgacatcagcttgtcattactaggataccatgcttgtcatcatgagaatatcatgtttgtcatttacttctaacttaccactgaatgctttggactatgatatcacgcttatccagcataccatgtttgacaacttgccactaactgcatcatattagctttcctggtctccgggtgctagatactattgctattcgatgcaagggtcgataacttttgcctttgaattacatttctcaatagaaccgacttatcccattggtcatgcttcgacgacttctcaaatgactttacagctggacttgtaattgtctggttgttatcctgccaaatctgaagattcgttgttagatgtgattttaatctgacctctgtagattatcttcgaacatatcacttggttcataactgggaatagctctcatgaacaagcagctcggattcactttctttacattcagtttacttcccactattatcttcaggttgtcattatttagcattcaacgtattcctttacaccttcgaccttgatgagttccttcccattggatcatctcccaagacatggcattgcctggtaatcggtgcctgcacttttcactccgtgtagcatctgataccgagttgaagatttcactcctcgccttcatggaaacacttttacctaggtcatcttgcttactcatgatttttttttacctcaatgacaaggtgattgttgcggggcaattactatcaggggtcttccttgagcgatgcagagcatgtttttgtttatcctttatcaatcacctttcggcctacttctttcctgctagagaacatctttgccaatctcttttatcaatcatctttcggcctatctctaacaggtggtactctttaatgtgggttgcggacgcttctggggaggatgaggtcctttggcctgctgcctttcagtgaaaccttgaagtggtttgtcaaaaattagactaacggttgttgcctttgatccgaagaagacacatctgaaactcttagtccaaacaaaagtcccttttggctttttaatccaacacagtttaattggttttcttttccatcaacaggttggttattaactcgaggttagaatatgattcctctgaaatgagaccctaggtctcctttgacagtaaacaattatacacataatgccatatcagcatcttccaaaagaatcctcatagaacttgtttttattacacatttctcccttattacatgaatacaaggccctaccttaaacaaaaagggaaggtgcttaacatcggtacattgcatcctcaacatgaatcatccataaacatagcaaactcactgtttataaacatgaatatatttatttattacatgattgttgcaaactcccgattacagtgataggtagcgaagtgaaaatcacaaacatggctactcattctgattttggagagatatagctggcattgttctagtgactgcatcatccttgattggttccgtgatgatgtgataggactgcatattgctatcattcacaggagaagcttccttctgattgctggttgaagcggataacggtcttctgcttggtatcgccctcctgaggttgattgccctttgctcggcctggagtaggtcggggagagacacaacttcttccatcgacgacaattctttgctgaggctgtcggtgcagagaatggttggtgctgaaggtattattgctatgatttattgcagagtcaggtggagcaggaggagcattggtgctgtggatgatattgtcaatgttgctgttggagctgactagctgatgagacaatcgtagggttgttcgttggatttctgcggtcttggtcaacaacacactgagttggcaatccttgggcacatggtttgtaccttcgcatagaaaacatgtgaccttacaggtgggacattcccctggtggatggtcttcttcacaatgagggcagagtgtgagacacatgctagcaacgtgtccaatttctccacaacgggtgcatgcttttgattccatctcttcctcgccgagatgtcggggaggctcatcttcatcatccgaggagacttgatctgacccttcactatcagatactctgccaccatggcttaggaggtgctgggtcaactgtcgtgcacctcggaaggtatttcctctttgacgtctaggaatagttatccctgctggaggccattcggtgctggtaatagtcatcttacgtacttcttcttcagttcgcatcggtgcttttctcttctgagtcttactcttcttgcctttggcttgcttagtacgtgaccccacgtggtacgaaaggctaggaggaaagcattttctaggattcaatggattgtctccattgggctctccactttgcacactaggctgcaaacttgacttggtgcaaggtggctggtttagcgatgtctgccctgctgaaccaaaggaagtggcttctttggcatatacccatgggcaattcagggcatagtgtccttgttctctacaatcatgacaaaaggggacatcctcttctggcattggaagctcattgacctggggggcaaatgcttgatcaaacacatactgattttggttttgacttcgaatcaatggtagctgtgaactcagcagcatgcttggaatggaccaagggtgtgcccttgttaactctcttgaggctagtggtggattgagttgaaaacttgagttactggaggcatacccgctgagagggaggaggagggagctgggccgaggggaaggagaggaggcccaagagaaggagggagaggaggagagggagagaaagagagggaggaagagaggactttggccgcgggctgagagagagagagagagagaggactttgggccagttggcccaaagggaggaaggagaattatttttagctttttctttttaataaactttgttaattgttgttgttgtttaataaatatttccggtgctctgaaaattcaagtaaaatttgagggctccttttagaccaaggagaatttaacaaaaattctccgggctacattcgaaattttcttgtacgtattttagtgtttgccaatttcttttcgaattttaattaattctattattccttttagaaaatgatttttatttcgggatgaatttatcaggacgtgacacacccccgacattagctcggaggccacaaaggcagaacgcgccgttgccgatatcgagacccagacgactggcgcatcccactaatcaaattcatcaacagcgaggagctgcccgaggatgatacagaggccgagaaaataacccgtaaagcaaaaatctactgtatggttggcgacgatctatacaagaaagcgccaaacggggtacttctcaaatgcgtctcgtccaacgatggcagacacctcctccttgatatacatgaaggcatttgtgggtcacacgccgctggtcggacattggtcaggaaagcttttcgacaagggtttttctggccaaccgcccttaaagatgcatgtgacatggtccagcgatgtgaagcctgttaattccacagtaaacacacaaagctacccgcgcaagcgctccagactatccctcttacttggccgttctcgtgctgggggctagatatactcgggccattcccacgaggacagagcggctacaggttcctattcgtggcgatcgacaaattcaccaaatggatcgaagcagtacccacgggggaaatcaaggccgacaacgccatcaaattcattaaggggatattttgcagatacggactaccgcaccgcatcataaccgacaacggctcccagttcatcagcgctgatttccaggattattgcatcgggctgggagtcaagatatgcttcgcctcggtctcccaccctcaaagcaacggacaagtcgagagggcaaacggtatagtactacaagggatcaaaacccgcgtctacgacaggctcatgtcacatgacaaaaaatgggtcgaagaactcccatcagtactatgggccatatgcaccacaccgacaacgtccaaccaggaaacacccttcttcctcgtgtacggctcagaggccatgctccccagcgagctacgacatcagagtacacgagtacagaagcattccgatgaggaccaggaggagcagcgaaacatcgatgtaaatctactggaggaacatcgcgaacgagttgccattcgagcagccagctatcaataggccctccgccgttaccacgagaagcgcatccgagcacgcatactttcgatcggcgactacgtcctccgatgggttcaaagccaagcatggcgaaacaaactctcacccaaatgggaaggaccttacacgatcacacaagtcttgcggccaggcgcattcaaaattgtagacggcgagggtcgcgagttagcaaattcttggaacattgaccaactacgtaaattctgtgtatgagtcaataccatccgtacttgtaagacaccttacagtatcaataaagcctattcttaggcccatattacaatcaaagtgtccccgcccgatgatctcttaccctgatgacacctagcgttaaaacctatcctcatgtccctttacgccgtcttgacaaggcctccgaggaacctaagggatcttcggctggggacgcccagagccgataaggccttgttagatcctgtagagacgaaagacaatgtaagatctggtcgtgtaagagttctcgccgtgcgtattaaccaagccgcgaaatcggaaattaactttccaacttcacggctgggagctaggatcagagcttattcaaccaaggcaggtcaaaggtccaagagccttatcctccgagaaaattcctccgacgacaaggctgggggctagggagagtgtacgactcaaacgactgactaaagtcgtgaactgagaacacactcttacacacgacatccggagtaagaaagatctgttaaagatagatttcttttctatttcacaaaatacttcttacagtttttacacaaatccaaagctatattacacctttttcctgagatatctatcacagggtacgaagactaccaagaaggccaacgccaatccatagactggaatatcttctccgccaacggcgccatcgacctcgccaggtggtgtatctccgccggagtcctccgagaacgagcaaaaccctcacggaggaaatcgagatccaggcgcgggcgatgatctcgtagacaagccaacacgtgccctccggcatatcggctcgatcgacgacattcctgcttcaaggcctcgtcgatacgcttgccgacgctatcaagttgagcacaagctccgttcagccacgagatgtacccggccgcggactcctcgggatccccacgaggtactcgaagctctctacaaaccttggctatggatgtgcagcaactcttcaagtacgagttgaactacacctcgcaacctcggagcgtttccacagcctgctttttcttcactgcaagcatagttctcttgagttccgctacttcaaattttgtcttccaatattggatacgacgatcttggccagcaagagcgctctcgagatctgcttagtatgggaatgactaagtcaggctataggcctcttccgagaacataggtgatctagtcgaaggtgcaaaaagggatgaatggatcactaacctaaggaagtggtcgccatgtccgtccccgtggcaagggtttggtctacattgtcgggcgacgcatgtggttcaaacgtgagagccggaataatcgccggtgactcgggttgcccgcgctgctggacatcctcgtcatcaatatctctacaagggacaaaaaactttcaagatcaacatgcaagagtaagctagaataataactgctcgcacaaaggcggttaagatccagttttacacagcatatctagggagtacaagaggccctactcttcaaaaagggagagaacagattcccccaggtcaccgacttcttccatcacctccttacgcgtgttgctagctgccccctgatccaagatctcgcgcagatcgagttcaagatgcgccagctttacacacgcaaggacgtggcacgccccggtgtagatcccgttcgatgtctcctccccgatcctggccacatgcttggaggggatctcctccatcgccgacgccagctccgcaagagaagatgtcagcgagaactcgttgggattcgccgggatagtagacttaatgccacactccctggcgagctggtgcagaccagtataggtgacccgcaacgagccacggatttccgacatattgttcccgagctccgacatgcggtgctcgagcccctggtgttgtcgctcattgccagccaccaactccctcatcttcttgaggtcctcacgagcctccgacatctcgtgtgctagccggtcagcccgctcgtttgccgacgacgccgccgacctcgcctccgcaatctcgcgaccgatgccgcgagcaccagcctcgaggaggcgccccatctcgacctggagctcctcccaggtgaggacggtagccggtggaccacggccagccgcgggatcgctgactgggccgcttggtgtcacctcgcggcccccgggtgcgagcacgacattcgacgaggccgcagcgggcgacgcgccagaggtccctccggactcgttttgcgcagccttcacccgcgccgccctgtgagacggccatggttcagacaacactcgaataaaatcacgaaaacttaagttcgtctacttacttttcgccaaccgtcacaaggcgttgtcgtcgtggaggccggggagatgtgtccgaggcctgaaaaacggtcgatgcgaagtaaggcgaaattcttctggctgtacgatctgacgacaggatagcttaccgagggggttgatgccttgcgatgatgtccgctcacagaggagaacttcctcccctttgtcggaacattgccaccacttgtagtagcagcagcagcatcagacgcctccttggcgaccttctctttcagagacgccgccacctgatggtccgcgagcggcccgatgatgtcagtcagaggaagggcctacgcttaatcaagtcacaatgtgatatcgaaaggaaaatgcagaatgcctttggagtacacttacattgatggcaacatcacgttcggccgcccctttctcacaaaggggaacggggatggtactcgccgttgtcggaccactgatcatcacctggccaacacgacgttccacggcttcgctgttcagacctgtgaatcgagaccaaattttgataaatcaagaggaacgcgaacatgagcatgtcaggataaatgcgagaaagataccccgaggagaaacccgagtcgcgtcctacggtctggaataatcaaaggctggatgggcccgagcctggagcggctggatccgcctaccaacgaagtctgcagcgacttcataccccgacaagcctcgtactcggagatcgtcgataatgtcgataaacgactagagagagggggtcaaagggggctttgcggtccaagacgaaatcttgtccggttgttctttgggaacaacgaagacagggtccgaatctttgatctgaaggtagaaccacctagtccgccatttgctgcgagaagaagggcactggaaggggatataacgcgacttcaggccatctcgaagtcggaacccgacgcaaccagacaccctgttggactccatccaacgcagctcgtagtagaaccgaaagagatcaataaagggctctaccccaatgtaggcctcacaaagatgagaaaagatgctaagaaaggcgatagagttggggttcaaatggaaaagagaaagaccgtagaagttcaaaaccaagagaagaaattcagaaggcggggggagaaaaccgcagagaatatagtcttcgatcgcaaccatgcgacctaagatgggctggggattagtacctcctgcttccctttccatggttccgcgaccgggaagggcgctgtcttcctgaagcttcttcagcgacgcactggtggaggatgatttgccgagatccatcgctgatcagagatcgccggagaaagggctcagatcgatgaactagggtttcttgtggcaacggagaagacgaagagcgcttacaggtgggatgttttcttcacaataggcggacttcaaaatggatccccaaaattcctttaaatagacgcacttacgactgtgcgaattccaaggaaaggggagagatgcccgccggagatttctgggtccgttacgtgcggcagttttttggacttcagtttaaattcactcgtgaccgttgggcttcacacggtgttctcgactacgtcctgtctctatggtcctcacaccgggaatgacaacagtctcgacacgacaagtcgcgaatggttacacgagttcatttaagcagaagtcgggggctactgtcagggttacgggttaggcataccctttacccttcgatatacgttacatatcggtatggcatacccacgcgcatacggatactttccgcgtacactaaggaaatccttcacgaagtctacagatgggaagagtcttactcggacaagactgtgtcatcaatgtatcgtatagggtctgctatctccgagttctacttggaaaccgcctgacttgcgatataaaagggaccccccgaggaggacctgaggcatcgaatctcagagccaacacaaccctcacagcctacgaagtcggagcttgcaaggagccaaatcgccggggatctagtcgaaccaactcgaccacgatctcgccggatccgtcaagttccattgttccctttgtaacctgtgttttccaccatataatcccacatcaactggattagggctattacctaccaaggggcctgaaccagtataatcctcgtcttttgtctgtttgtgtcgtattacgtagatccttgtaccaacgtaccccaataccctctatatctggtctacgggtaccactcgtcgacacaatcgactaatggttatgcaataaaacaatagtaatatccagtagaaaccaatcagctaacagtaatatgatagaataagcactgatccagatccgcggaggagcagcagtgctcatcaacatccagatccgcgaccatctcttccgcgcaccacctccttcgctagggtagcttgtagaaggtggaaatgagggagaggaggagctggcgggggcgcgctatcatcttcctccttcttggccgctccatgttgaagcgcgctgcgcgtggccgctctgactcgagcccacgtcgtcgacgctctgccttgggccacaccggtggctagctcctagcccgccgaagccgtctaccgccgcctcccctcatcccgctcaagcttgtcgtcttcgttgccgtgcgcccgtctgcctagtgcattggataagttggagcggagaggggagtaataaaaaagaaatagtatgcgacactaacgtgcaagtccacactatatgactcagcaggttgcaccacgtcagcgaaatcggccttcaaaaccgttgagagagtcaaattgctctagttttaatagctgaggggtgaagctatagttgagggagtcaaagtggacttattcccattagcaaacaccaaatcgagcccaccaccaccgcgctagctgtagccctgccaccgcgccacctgccccggccaccgcaccaccccaccgtacgcctcgccccgcgcaaaaagagggaaatccaccgtaagccgcgcgccccgcctcctccctcgctcgcgggcgcggctgccatggccatcgcggcatcgccctccggccgccacggtagccgacgcccccgcgaccgcccgcgcgttaaagccggtgtaatttccgcctctctcgcgcgagcgtccatccatcctcccccacccgcccatccgccccccgcgcgcgtcgcgcccagccgcccgccggcttaaccatgcccacgcctcctatttcgcgatgccatcaccaccaccaccaataccccaacctcgccccttctctcctccggccgcctcgccgtctcgccaccaccgcaaccctcgcctcgtgccgtacgggcgcgccgcgggagccaccaccccacgtccgtcgcgtcgcgtcgcgcggcacgcctcgccgagagagcgggtggtggtggtagtagtagtagcagtagaaggagggggggtcgggcggtcgcggcgcggcgcggcgtgaccccggccggctatgcttcagcgcgcggcgagcaacgcctactcctggtggtgggcgtcgcacatccgcaccacccagtccaagtggctcgacaccaccctccacggtactcgtctcgttcaccccccgcatgttcggcgaaatgcgcgtttgcagaatcttccggtcatgttggtgacggtgccgtgtttgggttaatttgtttctctctgtgtgtgtgtatgcagagatggaggacagggtgaaggccatgctcaacctcatcggagcggacggcgactcgttcggcaagaaggcggagctctacttcaagagccggcccgagctcatcaaccacgtcgaggagatgttcaggtcctaccaggcgctggctgaccgctatgaccggatatccagcgagctgcacaaggccaaccacaccattgccacagcgttcccggaccagatccaattctccatgcaagatgccgatggggaaggattccagaaggcgatatccgggatcgatctcagcaacttcaaatttcctgcgctggaaggtttgccaatggggtcacgcggcgctagccggggaaccagcccggtcccgaagaggacccagatgcaccggaggatcacctcccacatgaacaaggaaaatgcacaggaggagatcgacaagctgcaaaagcaaatcctggtgctgcagactgagaaggagttcttgaagacctcttatgacagcgcgctgggcaggtatctggacattgagaagcaggtggtggagttgcaggatgaagtttgcagcttgcaggatgcttttagcactggcgcggccattgaagacaatgaagcccgggcattgatggctgcacgagccattgtgtcttgcgaggatacattggttaatttacaggaccagcaacgtagatcatctgaagaggcaagaactgagtttaaacgattcattgaagcaaagaagaagcttgataccttcaaagctgagtgtgggcagcctcatacgcaaaatgatgaacctgataacagtgacaaagaatacatccatgcaatgccatctggggatgttgatgattctgttcagaatgagatcaggtttgacctgcaggaagtatgccaaaaggtcaaagaactaattgaattgcacccaggggtatcggtcactgatttagcagataaggttgaccgacttgtggagaaggtaatcgacctagagcttgctaccacttcacagaatgctcagatcaatagaatgaagactgagatagacgaccttcacaagtgcctgcaagccttggaggaagagaagtcggctttggttgctgattccagtaagctggtagacagattgaagcaagttgaagaggttttgcaagcagtccaacatcttggaaactccatacaaaatgggacacagaatattcataaagaaatgaatgcagcctgcagtgaacttgctgaatttgtagaaaaattacatgaacctgagccccaaaacagtggtttcatgaattcatcccaagagtcaagttgtcaagaagaagattcagaggtaacaagtcagtatgccaagaaacaaacatccgactcaatagatggttcaaagaatgaagtggagaaacaagataaaggctccgagggtcctttggtgcagcaacatcctgacacaaatggatctgatggtgaggacaagattttattagaggggtatgcatctgtccttcagagctacaagggtacagagcaaaagctgtcagaaattgagaagacaaatcaagagtaccattcaaggtcaatgtcagagctgaaggatctgaagagtgccaatgcaatgaaagatgaggagattcactctcttcggcgcatgctaagttctttgcagagaaagatgaatgcccctgctcctgagaatgtggacaagtctgaagaaacttccaaaataagcaccactcctgtcaccgaagacaaagagattgcagaaatagaggagtacatgaagcaatgccaagttgaagagcaacttgcttcgtcaatttccgaggaaaaatttagagcagagattgacagggtgttggagaataacttggggttttggttgaggtttagcacatcatatcatcaaatacggaatttccaaacatcatttgacaagctaaaaactgagatggataaattgattgatgcacaggcacagtgtggtgcagatggagttcctatcagttatcaggtagcaaagctggagtcagctgttctagaaaaaaaattccgggatttgaacacagatcttcaagtttggatagaaaaaaatgtgctattaaaaggagaactagagaacaggttctcatcactctgtggcatacaagaggagatatcaaagatcgcaactctggataaaagcgatgaagttcacttcacccctttccaagctgcaaaactccaaggagaggtgcttaatatgaaacaagagaataacaaagtcgctaaagagctagaagctgggctggaccatgtaagaggtctccaagtggaggttggcagggtgctcttgaagctccgagaaaatcttgaattatctatagcaagaagcaaccgagctcagcaaaacttccgtaacctgtcaacgaaagctggagttccccttagaactttcctgttcggcacgaagccaaagaaaccatcactcttttcatgcatgggtcctggggtgcataagcatcacagtggctcaagggctggtcgtagatgagaatggttggatcatcaactttcttttgtcaattaatacagaacagagctcagtgtacctgtcaattgatttgtggtatatgcagtttctcatagaccttaaatgtaaagaaccctgcatctcttaatataaatttggttcaccctgtccgctcatttctgcattgttagcttgcttatctgaccttactgccagaaccaaacctgatggaaatgtatcatgttaaattcattataattctcctgttactgggagaacctgtgcttattctagtgccttcaattgccaaattgaggtcaagttgataatgcctatataaaatagtggtacaactattttgctatatcccaagtgtatcatatcatgagttaatgacattgttaatcttctagccatgtttaggaaactatgaaattagtctgtgtattgtgggcatgtggcaaatgaatggaaattcagatcaaatgaaatttcttgctgtgcacaaacttgtagaacttagaattgctgatatgcacaatatccttccaatttaagaaaacataggtaagtgcaatctcaaacatgtgtgaattggaaaatactattgcatgtgagaatgaaacgagggcttgcatgtgaaaatgatgtgtggtcccaggcccacacgcctttctcacatgtttttttttcttcgaactttatgattttttgcatggtaccaagcaaaatggttcatttgtcaaatcttgggtagcaattcctttcttgcatgcatgattcaactagtggcaggttgcctgacaatagtgtccattgacttattgtatttgacagtatggttcatgtcatgattcaatataaatttcatattttgacatgttaacatcacaaaaaggaaactgtaagtttcttgtgctactgaaattctatttagtttcttctgtagcaccttttttttcatggaataatggtggacgctgtttgtttcattagatgctcttgtctcttaatagttttactgcaagtcttaggtctttggtcttaccttgggtggatttgatcaggtatgtctgatattaatgatacaaaatgcattgtatgaagttaaaactaccttggccgttcacttgtctatgaacagtaagattttctaggaggagacaaatgggctgtcaattatcagatgtgaccaatccttttctatccacaatacactcactgtttctagttccatgcatagtgtgctactttgctttatgggggaactgtttagttttccagtctgctcaccagctttctcaaagctcttctgatccttggagtggtattgtggtaagttcctgtttcttactttcttatagtcaaatatctaattatggatagttctacagatatctgaaaatgacaccaaccttagatggaactcttgcaaattgctgcaatagtgatgctttcatgttggctacagaaccaggatctcattgtacagaatcaaagataggactgctgggaaacctctagactctgtttaaggattaaaattgaaacctttggaagttgagaaaggcgggcttgagtttccttgtagcaagcagtatacggatatcaactacagtatgtcttctacacctttctatcccttctccatatgttagttgctagtcctgttgccttggtgattctcgtggaccaaagtatatgtgagctgtgcatttatatttgaaacctgttgcttgttactgtcccaaattctgttcataattggctcactgaactcttttatttttttaaaaaaatatgtgcagtgcaatacataaataaaataattgaagtccactgtttcctagttcttgaaaatgtgctatggaattctttaagtaggtttcttagaaaaaggtaggagcttcttatttctcatgtgtatcagggagggacaagttcaggctgtgactgctgtgagcttgtgatttgattgaagatttcaaaactaccattcctggtaagatcaccggtatatacatgctcgcggtaggtccacgtacaaaaatagcagtagcagatggttttctgtaccttcgttcatctcttaatacagaaggattgatggcaccttttccttttcttaatacatgtatggttggagcatattccttagctatgggtctgacacctgttcattcttcaactcttaaattcagcatgcttcttagtcttttatcaaagcagctagattttgaacatcttttgctttgttggaaaatattctcgtttccaatgtcctttttttcaactacatttccaatgtcttagctatatagaaagggggacaactttgccttgccatacagctcaacagtagatgagcaaacatgatagtgattctcaatggcaaatttgattatcaaataggcctgatattgtttacttggagcacacagtaacacatacatattttattttagagtaaattgcgtccacggtatataaacttggtaggtgggtgcgatctagtgtaacaactttgaaaaatgatcatttttcaatttatcagatgcatgaataaaagattatcatatctaaatagaagatataccatcttaatacaaagatatgcaagtcttatgcgtactccccccaaaaaagatcatttagacatgagtacaattgcatctaaatgatcatttaggtgtacacctaaatgatcattttaggtgtacatgacatggtatatcttctatttagacatgatgatcttttattcatgcatctgataatccttttgacttgatgattgttggctgttattagcttagagctgtaatgttaggaattttatgcccttgttaaaatgagtggccctactgcctttggtgcatagtatacactgcacacacttaactttgtctttttataccaatccccttcacttgcaataagcctcccaacacatcaaagggatccacagttcaaaagccatgttccatccttcttcttcctcgtcgccaccaacctacagtgactcctccatgcaccatgcactgagcttctcttcggctctgcccacagctccaactgaaattcctggcagcggcggcggtttcgtcgacgacaagggcagcatgttctctcttcccaatgttgcgggctcggcgccgcctccctcctactactcttccctcccttccttctacatccacaggagcaccagctcgcactccctccttcaccaccggttgtctgacctcctcaacagtaatgccgcattctcttactcgtctgctccagcttgccaattgcagcccctcccacctgtttcttcctccacttcatcatcctccggcgatctcttggagttcagctccgggaccctgcgccgtgtcttcagcaccggcgacctgcaggtaatgtaaccccaacccaaatctcaagctggaattgtagccattaacaaacacttttggtaaattcactttcttaaccctatgctgatgcacaacaggcgatgaatgtaccgccatcgccaccgccaccgccgccgttttcaggtgacatctgcatccaggaggtcggcggcccgttttcgcagaaggtgggccgttacagcgccgaggaacgcaaggagaggatcgagaggtaccgcgtcaagcgccaacagaggaacttccacaagaagatcactgtactggcctacaaaaccgcatttccatttcccttgcaagcaattgaccatggcagctactgtagctcatcatcatcatcatcccctggccgtttccagtatgcctgcaggaagacgctggcagatagcaggccaagggtgcagggccgcttcgcgaggaacgccgaaaccgaggccgatgccgaggccgatgcggtggccggcctggacaccgaggtgtacggcaatggctatggatactgcgcctacagcggcctcaccaacagtatcagcagcaattgctacgacaaccagagccagagccagtggtggggaacgccagctggcgcggccaattggcagcaccagcagcagaagcagcagcttggtttcgacgtcgccgtcgacggcgacgacgaggactacgagctgtgctgtgggccagcatcgctgacatgtgctcagggacctgaccctgagctgatctgacctgtccggccacacacgccggcagcagctgattggcgctgccaggtgcaaggaaggcggggggaggcaaccgagcggcggctgccgtggacagtgcggtggtcggagtggcgtcgctgaccttcttgtcgccgtagtgtaacttcgccttaaattagttatagaagctaagaaaagagaagggtaaaaaaagggaaaagaaatagaccctctcgtgaaccaagccaagaaaaaccagcttgttgtttttgtgtggtcaggattagcaatttagtaggcatttagtactactttgatatctttctccgatagaagtttggccatggttttgctttgtcacacctgaaatttgaagaaagtcttgagtgctgcaacttttgtcttgctcccaatttgctcgttagtggcggctcatgttggtcgcccctgtggttagtgcgtggcatgcttgcttaatctcttctctctctgttttttttttcactgccaaagtggcaatggcaagtagctgaccccaggagctcactgagccaatcagccaaggggtgtgtgtacctgcctgccggaaatttcctgtcttgttacatatggcaaattgcctttcattggtactccatgttctcaaatataagcatttttaagacttaaatttttatccacaatgtaagcagttgtgaacacagaataggagtccaagcattttcaaccgatcaggagaatccaaacaatctaaaatttaaaaaaatttccaaacaattaaaaattaaaaatttaaccaatgagatgtctgaaaggggatatttccttatcattattcttttctaaacaagttacaaggtgccggtcaccgtctgactgtctctgatagcagtaacacaggcgaggcaggtagatatctttcttcttgcaagtgctatacgtccctaattctgaatttgtagacatctgtgattaccaataggagtgctttgacatggcaaccttggcttggctcaatcagtgtggcacctcatttttctgcagatttgccactatggttttctagggaggtttgatcttgtcgattgtcatcctggagatgggagatgcacctggccatctccatcttgagagtgctatatacttcctctgtctaaaaaaaacaaatccttgctacatcatgtttagatatatagcccgagtttgtctttatttagatggagggagtatgtcgtagattctgatatttaacttctcggtactttcacatggaccgtaaaatttattttttgaaaaacaaaggcagaagctgcctaacttcatttagaaaaataaaagtacaaacaccaaacccagagaaggggaacatcgaaaataacatccaccaaagtagatcctgaaattgtatatttattactatcttaatctaccaatacgaattcttcgaggaaaaagtaattctgtttttatttggtacgaatacggtcacacggccggtttggccatcggagatcttggtgcttacactgtctggaataacacggtttaagttacgtagatgcttatatctctttcaactgtcatagaatcaagatagtggaatagctttgctgccttgatgatgcgattggcaaaagcagcgacattttctctatatactatccatgtcttgcaaactatttcagtcatagaatcaacacactgatttcttgaacacggcactacggaagcctgaagctggcagctctaaacatcctactgctatcaagcaaaatttaaccaaatgaacagccagtgcagcattaaccgtgaggaataatcttgaccgatctttctgcaggcacatatcgattcctaagagcccaaatgcagccaatcttcagcagccttcctttttgaccatctgaaaccgttcaaatgcagcaaatgagtatcatcaagaataaagcaggagttgtcctagatatgtagcctataaagaaattttaaaaatggcatgaagagcacccaatgaagcagagttcagctctgcagtgcttgcttctttctgaagaacggcctgaattttgttggatttcggaatcttcagtgaagtaatggacgaccaagaactaccctccaaactgtttgcaactggcaaaggtgcagcaccagaggttgccatgatatcaaaagatcggtcaagagggaatccaagcattgtgactcaatgatgagaagagcaatgagtaagctttttacagtcggcccaatgttgcatgaatgaaaccgatgcctcttgcaactagcatacggctatctcgtctccctacagtcctaagatatttcttattgtcactagtcatgagattccatgaaaagttgcaatgcttctattgttgtatcagcaacttaaacttgtcatagaatgtaccatacgctaatgtatagaaaattttcagtacatgatgcaataaatatcgaaagctctgatgcatgtttgtaatgggtaaacaattcagatgtacctgaagacggactgcgagtctgcaataactctgtcagcacttgcagtggcggatccagaaaatcagtttgttggtgtcataacgtgtctgtcggtgtcatagtatgctaattatacttagaacatagtgttatagtatatggataagcagttttgttataggttttgccgaaagtcatcggtgtcgcttgacactgacgcttatactgtagatccgcccctgagcacttgacccttgcaggaatacaaaggtaagtaaatccaaagaacacaagattccaaaatcaatatagtaggaattagccgaatagattagcaacaaaactacaaaagtgtactacactacttcttactttagggcaaccaggagagccagtggtgagctaatcaaaatggtatgctcttgctgcctctctggaatttctgcttttccatcaaaaggctatgcatgagctgcattgtagagggagaatgaagggatacttgactgtcactcccctcccctagaggtggggagtgtggctggcggattctctgtcggccgctaatgccaagtacgatgcactgataagtgataactttgttaacttcactatgatgacaagtctaactagtagtactgtttagtacaagcttttgtgtagcctaagcctgcatatatataattctgatgaatgtgcctggtacaagattagttggctcctgtgctagtaaatttaactcccaacactgtttcatttatgtgatgtggaaaaaaaaaataaaacaagataatcaataatgctaggagcaaagcatgttgccggtaattaccagcacagtcagcaactcagcaagccggccgatttcaaattacaggaacaatttgctttctcaagtggagggagaagaaaggcatcatgtgaggtgtttcactcacaccttattccattacccagagaagaaatgaagcaagaaccgaagtgatggcaattctcccgtggacaaatcaatcataaggagattgtgagggaagaacacatggcatgaacaaaagtgcctgtggatgctaatgttgactctgataagaaaattaggagctggcctactaacccttcaccaattacaattattagttcttgattgtggacacgataaggatacacaatctttgtgcactcgacagatctctgtcggaaattggaaattcttcatttcaattggtccaattaaagcttaaacagggctgaatgaagttttatttgagaataaggtcagaaagtgttgcggtattcaacggaagtggagagaccatacgtaaaagatgcatggaatattcacctaaaattcaaatataataatgtgcatgatcagaacataaaaggggtccctgtgaccaaatggtaaatcatgcaaggcttgttcatgacacccaattcaggatcccccactgccaagtggctagtctcagataatttattctaggaagaatgttctgctggacaaaaatatatatttaagagtggatgtctttccaatatttgttgggacggtcaaacgaacttcacagtataagtactaggattagtgacttagtgttgtataagtgaagtgtagtgtaggtattgtgctctttctcctgatgccgtcaccatacgacagccaaacgtgcaaatcaaaaatcagaaagtgatttgtagattgtaatgtcagcattggtgcgcctcagagactatgcaatctgatataagctgatgaaaatctgaaatgttgtttgtcagtgccatcgatgtcattaccgtacaaatgctgctacagatttcagaactgtagtgtaatttagtgaatttttcggctcttagaggaaaggagatttcatgcagcaggtatacggtataccttttccccaccaaccggctgcctgcggcgcgcggtgcgccggcccgccggagaaggatgcggccgccggggttggcgcagcagacgtcgacgcccggtgccttccacggccgcagccatgttctcccgcctcccgcaacgcacagggcgtagtacttactgctgcgcgggggcgcctcgatcgacggctcagcggcgcgcttctcgccggcgttccgccgccgtcgccctcccccggcgccaccgcgcgggggccaacgcctccagcttcggcgaagtggtgcggcggcgacggagaagcacggcgatgcggtccccctcgccgccggccgatctggtcgcctgggcccacgaaagcccgcaaatcgattactgtacatggaaagtactcgctctacctacttttccaaaaccgaaaattttatttttgatagttttatttcaatccaacaacctatcatcttaatgattttctcaaatttaatgcatgactcttcattcttacacatatgattggctacatgggttttgagaaatgtaaatactccccccgtcccaaaataagtgcagccatgattttccacgttcaactttgaccattcgtcttatttgaaaattttctaaaaaaattgaaaaacacaagtcacgagtaaagtactactcatgttttatcatcttataacaacaaaaatgctaattatagaaaaatttcaaataagacggacgatcaaagttgggcgcggaaacttatggctgcacttattttgagacggaggtaatattaatgaatcgcttgtttacgatgaatgactagcagcatgcttaaatgaatgataagtaaaactacttatccttggtctgtgtgtcaagatgaaatatgactatcaaaagtacatggagggagtataccatatacgtatatacctatacatacgtaagtgtgtatatacgtatacatatacatacagtacatgagtagggtaagtagcttagtggttgtagtgatatgagtagcactgttaatgtcaaaaaaatttaagtcctagagtcatcagagttagtaagcgtggatttttcgtcaacacatccaaggtgttcaaatctccatagaaacaaattttagattggattatttgagggctatcttccctatttaatatgttaagtttctaatttaaaaaaagctacatatatcatgttagatgtagaggccgggtaaaaaatacccttccaaaaaatgagtatggttctgtacgattcaaaaccggggatcaagcagtaaatcgtacaatagtgcagggccttccatgcaaaataacctccacctctcgtagacgtagctctccatctaaggcgttcaatcctgatcggtcggctggtagttgtccattttggatcgctatcgttggtagcgatccgggatttgaggtcccaaacggtaggactattttagtatagggtcttccgtgcaaaaaatcctccgtttaaccgttactcgggccgactcgatcgatctgggccgcggaaacttgatcgtgtggctgagcctgatggccgccgtccaaacttccttctcgccgttcgcgtcagcggcgggcggccggccgcttctctccaccgccggcgaaggcggcggcatcaaaggtaaagccgtgagccttcctctacttcctctccattagccatcttcttcccttcccgcgcgctccatcatcgtacgatcaccctcttccgccgcggcgttcacataccgccatctgctcggcgaaatgccgcacaggcctcgcgcctctctctgtggctcggaaaagattgtgatagcctgagaggctacgacgagtcgacgattacctgatggatgggcaggcaggcctgagtttctggttgcttaggatgaaatggaaatccgatactttctgttattcccacggtcctacctggagaatgcaagagcaagacgtaagccttgcgaatgctggaattctttttcgttttttttttgtggaaatcgaacggccttatggagattcttgaactccagtagggcttaagtatttcaaaaacgcacaatattctaataaatctcattctctcgtttcttctaagaagcagtctcattgcttgcaaatctgtactatcgaaatctgtacaaatcagagggcaattagcgaggccacgtggcatgactggattcatgggtttggtccctcgcgcacagccgtcagatcacgcatctacggtgatatatcgtgcggtggatcttgttgtaaaatataatctttcgagggagtttaatgcaaaagagtagagtatccatactccagtaaatacttcgttcgtcacccgttcccatccgccgccaaggctccaatctccgctcgttccacaccgcggccgtcgcctcgctgtcaccgggcggctgccgatcccgagccaacagcccgccctgctgccggcacgcggtcgttgaatcgagggcgctgcctcgcccccatgattttctggtgcgtcgccgctctccacgtgttcctcatcagccgcaacgtccactttctccgccaccggcagccgaggcgccgcctccgcccacatcgcagcattgacttctccaggttggctcacctactccatcggctattccaggtcatccaccgtctcacccctctgaattgcaaactactatcccctgctgcactctgcctgttcgttgtaatgcttattagtggaaaatagttcaacaatgtcatctgccaacgattagtagaacctatgatgtgaatccatcatgttgtttgtctgtgaccactgagagtttaataatgcttattaatatgttgccatgcgaatgctcctagaccaaaatgtagtctctgtcagtttcttgggtttctttgtaaccatctgaatttaaatcggtaaattgcctatctgttgtatgtaatttcagaagtttaaaatagcaaacgtcaagatggggctatctcatgataaccttaagtggtaagatgaggttggggatacaattcatatcaagagttttttactgatttggaccaattatcatgtacaattttaaaatgacacaaataaaaaaaaatgacacaaataaaaattatgtagacatgaactgcaaaaacatatatggtgattagatacttagatgaatgagagagaatccttgcttacttggtgcaagattaaagattaaaagaaacggtaaagtttatctacggtaaagttcagctgcatatataagttacaatgtgcaacacgtaagaccaggcttctttgcaatcatttatctactaagaatctactggtacaagaggattaggaggcaccagcatattctgctcatgtttgaggtaaacgctataccaaattattaaacgaataatcaattcctcaggctctttgtgtaaactgaaatgcactcaaaacgtgatctttagagaataagaagtgaaagttattttaaaaaaaggatttccagagttcttatagacatctggagggataaaatgaagacaagtactttcattactttggttcattggactttagaatttgtgcgcacatattcgactttcaactgatgtcgatgaactcattgtcttgcagccttcaattgatctgaataaagcttattccagaaactatgtcatatctgagaacaattagatattagaattaaattaaattcatattacagagagcagaaattggtactagaactgttatgtcgttagcattattatgttactttatattacagattgtttctgcattttctcagcactcaagtggaaaataagctggaaattcatgcatcgttttgtaattttaataaatttgtaaactaataaatagcccatggagatctttctcatacattgtagtgctgtcgaaactcaagtatggttgaattagtaccatgattaatcgtagcttcatgcactttcttttattttggcaatggtctctttgcgtactcttctattcatgcaatgacatgatactgaatactgagcattgaattctaaaactgaactggcattattttgaagaaataaaaaaaaaccaatcatgttattaggcaacaagatcagtgatcatgctcaagttgataaggaaccatattattaaatgtttaattttgattattttcctagcctggtactgaagtactgtctaatttgacctctgaagtacttgacatttgaattttttctaccattgccatgaagattttgtaaggttgctttttattatacctgtacagttagatgcaatatttaaccaatcgaagtaggcgttttttgtgtattcttttaatatataatttttttcttttcaaaaatgcggaagaaaaacaaattggaattgcaaaatttaacgctgacaaagcatccattcaaggcattcctttcttttttgagagaatcccttatatgccactagaaattggttagttctcttatatgccactcaaaattggcttctcccttatacaccactagttcaagtttttctatccttttatgctactcccagcactatagcatttgttgactgttagtcaaatattagttttttttcataaatgaccaatatgccatctcaactaaaaaatgtgtaaacttcaaaaaaatcataactaattttttttaaatcctttttgagtgaacaaagttttgtcagaacaagtggaaaatgctctttgtaataaaaatattgttggaaagctgcatgtttcatacttgtattgaaaatttgtttgtgatagtgatggctaaaattgcatgtgattgaaaaacaaaatcaattttcatatgttgtatccagtagatatattagtactaaaatacctatcattggttatataccaactctcaatggtaaatgtgtctttttactatgaagttaacggtcaactgacggtggagtgacggcaatggcataaaagggaggacaaacttgaaccggtggcataaaaaggaagagacaatttgaaggggcatataaaggaaccggttaatttggagtgacacataagggattctcactcttttttcatgttagcaatggtgtaattaatactcacctgtcaaatacataaatcccctgccaatggttctactgagtcctttttcttgctcttgttcaagaacattttattttcctcttctgatctcaagtcccaacgtctattaatttatttctttaggtttttggttcaatatgttaagaaaaaaaaccattgatcctaaacaaggccactgacaaaatagattggcctaatctaaattgggcgcggcaaagccgcacgttgtttctagtacattctaagaaacaatcaaattgctcagaaaatacatgcctttctttttcctccatctataaacggcagcagcactaactaatgcccacgtacctttgtacaccaatgttccagttcttgatggaactttacacagaaagagttgctaaccgatgctaaaatttcttgttctatataagagcgcctgcgattattttggtgtttttttcctggtctggtcttagaagttctccttgtggaaatggaaccgagtcgttgtcgtctggctgaattctagtgaaagatccctcagcattttcgtaagtgttggagacccacagtagaaaacgcctgcagatttatgaaacatctcagcattgctatcctgtaaactaggaaccatcacttgagatttatcacatagaactgacctatacgagagttctggtgggcattggccagatctgagaatacctttctccagttcggccttgcaaaatgtgtccggatctgcataaagcgagaaatattgaatcaaattttgcacatgtgatttagtttttatttttatttttgcaggaggatagaagtgggaaaaaccttgctgccagagacgatatccacaccatttttggcatgttgaagtgattggaccatggcaatcagagctgatcttgcatctccttcttcatacacgcttgtcaggtaattgtgcatctctattacattctgtatagtgagtgattatgttagtatctatttattaatctgaaggagagaacatggaagttgcactgaagcagttagactgagtagtacatcatgatcactttcagcaacatcattcatcacgcctttaaaccattcaaaggaaccttgctctctggtgacccagtagaaataagctcttcctggcccattgctcttaaaggtgcagcctaactcagcatcatgcgtgctttgcacatcctgttgaatccaattcactttagatattatgcacttggtttactgtataagaaagaatttgctatagttaagcagtttactccattggattttatgttgttcaggagatccttcagtatgctgatgaaaggcgttgctccaattccaagcccgataagcaaaagaatgtcatatttcttgtaattttgagctggtgcgccgaaaggaccatctataaagactttgggaaagctaaatgaagagaaccaaagtcaggaagattagtgaaacaattgtatagaaattccttcaaaaagtagatgaatgtagaatatgaaacaaacagggcataattaccaagtctcctctttcagaccatctgctatgatagtggtttcaagtcgtgcaagtgtagccttcttggaacttacttgtgcctcacaagcctgcatgaattagcataaccctttagcaactttgttaatttagcatataaatactgcataagctcccattatgcctgaactattctccttttctttttgtttctgtttgctcaactgaccttcccaaataggtttctaagttctgttgtccagtcacctaatgtacggatatgaacactcaagtagtcatctccaggtgcagaagttatggagaagggatgcctggaagcattgaagaatctattaatccatagcctggataaacactgacatttggacagagacgatcagatggtaccattcaaaaggcgaaacatctgggcattttacaaacatatacatcccacttttgtacttgaaacttgatggtttattcatgtgaatagagagcacatttccagggtaaattgctgcctgcatggcacatttgatagtcaattaatggtattcttgtacacttagaagctagaataaattgaaaatactcatcgtgcaattcatgtgaaatatgttgcttaccttgatgacggtcaccccataactgctctcacgaactcttctgatagttctctcgcaggagtaaaagaggactggaactgccaagaacatccacgtctgtaaacacaagcgtcaatattatgcacaaccactgaattcacaaaagaaatagttgtgccaaacatatgccagagaaataccgttcgattgtaccactgcttggtgagaaatatgaagtaggagtgcagcaccaagaggatatatgcaatcaccagtaggtgatgggcgtaccaaaaggcattgaaaccagcaaggtggtgcagtggtgatggaagcttcacaacgctcctcctgaacgaatgtgtcgcaagtgtgaacgagaatgacattatcaagatcatgaggatgccagtccaccctggagtgcttgcaaccagcgatgagtatgttggttgaacatagttgaagtaaggccccagtgtggcctcgaacttgtcccttggacatgataccaatcttgggaagtcgcaggttacatgagcaagagtatgagtagccgctccaattgcaatcgtcagtgcgataacctgatatggtgatcagaacaaagaggtcaggctgtgtaatcctggaaatggcaaagagttccacacgtgtaccttgtggaagtttatgttatcatcaaatggtacgactttgctgagtgctgttgatcggagccttgttagtgtgtttcggcacaccgggaggagtataacggccatgttcagcttgagtgtttcggcagcaccctttgctatgcagacacagtagcccatcacctgaaatgcatcccgcctactgtactgcacaaacttgtacatgaataatgcaatattgaggatcgcccacaaggagagcacccatatcctcttccaattctcatggatgaagtcaacagtcttgttgaaacgcctctgcattggactccggtgactggaagggaccattgtccttgcaaggcttgctgaagccagcttcaccttctctggaggcccttgggctgtcaccataccacggagtagcgtctccagctgccaaatctgcattgagacaagcatatctgtatgctgctgtttgtcaaaaaaaagggagataatttcatgtcttggtacctcaatgtaaccgcgatgatcaggatccagctcttccatgatcagtgaggcgtaggttgcagcatggcttttcaacttggcaagtttgtttgctgcggcactcaacacaataacctgcatatggaaagagaaaggtaaattcttattgagatcatttccacaagctttgtggaaaaaaggtaaattcagagatgattgggaactgacctctttgacctcgtcctctgtaagctgcccatcaccattcttgtcacacctgattgcaaagcaatctcatcaaggggcaagtcataaggttttttccattgaagacaaggaaggtagacctttacatgtcaaagaatattcgtagtcgtgaatcaaagttctgatcagtcaactcctcccaaaattctttcagctgttcctttgttatcccatcttctggtttgatgctcctccttctcgccaatgccacaaacacctcgcttgcaaactccttagaatccgccatacctttaagttgcagaggcattctaagcttagagcttcaatttatatacagaggatggatttattgctattctgatgtcatttatttacctgactacacttcttttaaaagaaaatgtcgtaagcacgagtactccctccgtttcatattgtaagactttctagcattgcccatattcatatagatgttaatgaatctatacacatatatatatgtctagattcattaacatctatatgaatgtgggcaatgattgaaagtcttacattatgaaacggaggaagtatatcctattcttgctacgtggtaagtattgtctccgagttatatttgggggggccaaagtctgaactttgtgcaacccgtggtcgaccaattatatcctcttaaattttccaattttctttcctccgttttttgttaaaataaaattgtgaataggaatgattatgtatactttatcaaagaagtgctgcaaacatgtatgcatggatggcaggaggaggctggctgcttaaacagttgaaatggctgaaattttggacaaacaccatcgacatacgagctaggaatgatctgtaccaatttctcatctactaactgttcccctttttccatcacatgcacaaaagctttgacaacattttccccttttttttttgcagggaaaacaaagcttgtcaattttcgatgtgttcttgctaacaatgcaatttcaccgtctctcttttcatgctgtggtgaatcactaatcactttggaggatggagaacaccatgggggcatgtgcaggagcactcaccgatgcatttggcgaagctctcctggggcaggcgtccgtcggcgctcatctcgtcgaaccgcttctcgacgttcttccacccgtccttccccgccgacgtcttgtcgaggaagcgcaggccgcgcagcgccggctgcgcgctggagtgcgtccgcttcagcttcatcgtgtcgggcaccatggacgccagccgcttcatcccggacgccagccgcgacggctgcttcttcagcggcgccaccggcggcagcgtgctctgcccgccgccgcccagcggcacgtccacgtagtcccccgccatcctgatccgaactaggtagcccgctgctgctgctggtggtggtggtgggtgccctcaccgcaggaggagcgtggccccgggcgccatggcgtacgtggtcgtcgtcgttccaggccaatgaagaaatggcgcggtgtaaatttgggctactggctaagggaggaaaggcagaaggcgagaggacacgccgcgggatgcgggggggagggggagggagaggccgtgccaattttagattggtgctcgcgcgccgcgcggccgggaattctcccgtgggtgcgagtgcggccgtgcgggcgcgggtgggctagcttggctatagccatgggtgggcgcagaggcgcgcgtgctgcgtgcaggtgcaggtgcaggtgcagtgtagccgcgccgcgcgtggacaaggtgacgggtgacggggcgtgcagggggtcacaggtggcgcgaggcggaggtggatggaggcctggaggggatttgtcgggcggcgagccgctctttcgcctcttcctctgtttctgcagaggtttggtcggcgtggcttcgtgggcccgtggtctgcctgctttgaacaaggacaataccaacccacagtatctataagtagtatttatggtgccatgtcaataaaactttacgatagaaactacactctataacccatggttttttaaagtggtccattaataaattcatcatctctcttctctaccgattatatttattcttcatctattatgaagacactattatctcccaattaaaaacttgatagtgtctagtgcataagttctcgtgttgaaactgtgtcttgtatgagactcagtttcttcctctcttcactctctctctctcttaattaatatagtgccacataagctaaaagtcctacatagcaatgtagttaatgccataaacaccatcctaggtggagggttgggactgtcctaaggtcactttagagcaggtacagcaatagactataagctataaacatattttaaaaagataagagcaaatttaatagtataatccactactagctctaatttatctatagccgatctaatagccaatttatacaatagttgcttactatactattaatatatgttctcacatgtcatacatatattgcgttttgaaatccgtgctgcagctggctacagatctgtagcctgctacttttctctctcatcttttatcttattaaaatatgtttatagttggctaatagtctgccattgtacctgctctaaaagataagagagaagagcagcgggctatagatttgtagccagctgaagcacggacttcaagatacatgtgcgtatgacaagtgggactaggtattaattgtgtactatgttaggctattcccagctcaatgattaggatgatgtccatagcattaaataagctgccacctagaattaaaaaataatgtaacaagtgaataaagaaggaaagagaaggaaaccaagagtttgtacacaacatccaagacatcatgtgagataagtatcattaaatttaagtatggaatagtggtgtttgcattgaaagggtagtgtctggtactagtttcttgatgatgtagagtttatggaaactatatttagtgttttgggttgggactggccttataagtatctattatatgaattggctattaaggcagcgttcgagagggtgagagagtgaatttgtttgtttcgttttccgcacgtacgtttctcaaactactaaacggtgcattttttgcaaaaattttctataggaaagttgctttaaaaaatcatattaatccattttttaaatttaaaatagttaatacccaattaatcatgagctaatagctcacctcgttttgcgtatcttcccaatcttctcaatccccttatcctcaaacacaccctaaattgattatagatggtttggagcttgtagctggctatactattaaacttactcttaggtccctagattttttgactggtcaaaaattcatccctaaaccacaataccagatataataggactcacatgtagtgactaatttttacctcctcatctccccacttctctgccattgcggtatcaggatgtaaactgaactcaacgtcaagttgaaggacctaaagtgaacttattcctgccttcttaccttgtgtccttgtgcttcggctcgtgctgggtttgtttgggcctgaatttcccgcagtgtaatggatatgaaacgggacgcggtttgtttgagtttttgatagttcaaagcaaaaattattaaggagagaaaatgaccttaatatctctcactaaatgtgaatgattgagagtggatctgtagttaaggggggtaagaatggaaaaaaaataaatgggaggtaattggagaaaaagaattatactatgcgtacaaagcttatatgctgtaatggcactcatatggtacggagagagtagcctataatatagaaatctagaattgaatgtgacataacatagtacaagaggtatatttagatttatggtactatgttatatctaatctggttttagatctatattatatggggcggatggagtaacttctttcatataaactatagcatctctagtttctccagataatttaaatcctcatctaaattatatataaaaataattatagattacaaataaataactataagtcagaaatggaaaaaccccaacgttattctcacgaactcactagttgctttttttttaatcttgagctccccaaacataatcataagttggtgacgatagcacataagtgagttctagttacactaatttctagaagtattccaccaccccctccccttctctctccctttgaaatctcgagcatgggttttgcatgtagtggctaagggttcacaatactactatgtgagaaaactcgaggagttccacccatttcaatagggtttattgtttagttttaaaaaccattcgaagtcccctataaaccatgaaattttgtgaaaaccaatcgattttgttggaattgtaaattttggtggtggctacaccagcaccaaaaataaagatctacaccataaaactaccagcaagcatgctcgaaacatgaagtttacaatgaaatcccgttcacagccaatgttggaaatataaataaaatattttccccatgattttaatatgtttcaaaagggtcttgatatagcggatagtggatagcatgtaaagcgtgtcttgttctaaatatgtttagtaccgatagcgtgtgtttctagcaagcggacccatgaggatgagtcctctatatcacttacctatgtttttctgactttacgttctaggtgctccttactgtggaagaggcgaaggacatgaaccgcttgattggtttagtaggccaggtagtaatagggctagtcatgtactcgtttacatatgtaaacttctcctctcaaaacattattccgttgtagtctagctggttaggatactcggctctcacccgaaagacccgggttcgagtcccggcaacggaattttttttgtttgcaaaaggtagtcgttttttgtcggcaaaaggtagtgatgttttttttggtcttgagaaaacgatagcacatctaactgcttattgtattcttcatcctcttccatttgttttaaatatataaactggtataatcgttctctaaataattgctcccttattattttgtctcggtcattgtcaagtctcaaggatagtgtaaggggttgtttactctactactactattttcaaccatactattttttgacaaaattgtaaaaaaaaataatatctacgtttaatttgtggctaaatcttggtaaatacataagaaatcataccaaaattttggcaatattaccatcttgccaaaatctaaagtagcatatcgtcctctaaacatctgattgcttactattttgtctccgtcattgtccaggcttgattgttgcaagagtccagttccctgatagaccattacagacattatatgtgatcaaacgaaaaacaaaaactggatgagttcattactaactttgatagaaagaaaaaggaagaagtggtcaaaatagaagttaccaatctgccattcttggcatgcaatagcaacagggtttataaaaagcgatgaaaaccggtttgtatttcgtaaaatccggatttcccgaaccgaattgaaaacaccaaccacttgtttttttatcaagttcagaaatatttcaaactaagttttaattttttggcaagatttttcctggttttattggtatttttttcgattcatcaatggtttccgtaaaatccgaagataccgctcgtgagctgtttttatccggtatcagagttgtgaatattgaatatcagtactatgcatgcatttccccgctaacaatggccatgttcatacatggtacatccagctaattaatccaagattaaagagcggtttttatctgatatcagagttgtgaacactgaataatagtactatgcatgcatttccccgctaacaatggccatgttcatacatggtacatccagctaattaatccaacagcaaaaatattgcagatttcaacagcagctggaattagtatatcctgtatatccaaatatccaaatgttccaccctgtatagagcacaacatatggcaaaaccaaaatgcagaggaaaaatttgggaaacggcatgcatcgaggcctatatttattggctctcccctctgttcaccaagttaccccgctcagttggaggctctcacccccacattgcaaatgatttcattgaggtaaacgggaagcaaaagaggcggcaaaaattaatcgagttcatcctttcttggctcgtttcttcctcgtcccatctttttttctttcttgcgtgagtttaattcgctttgtttctccccaaaacctccatttgatttggaaccattttctgcaacaccatggattgcttcgatccaaatggcatcccagataccgattttctttgtttggaatgctggaattttctgcagattcctgcaagatttgaattgtttggtgtaaaattctgccatgccatggatgtgctaattaacttggacatggtttgattattatccccagggtctccaattgaggcgggcggtggcaggtcaaggtggcgattgacaaggcgggaggggatccatcggttggccggccggtcgtcgacgccatggcggtgagccagagcgcgcagctcggcatggccaccgcgttcttcggcgcgctgtccttcctcctcgcgatcctcggcgagctcaacaaggtaattaacgccggcgatgtcgccgccgcgcgcgccgatgctttccgttttttttcctccggcgaatacgcgagctgaaacgggaagctatgggcggtgcagccgccgcacgggacgccgatcaggggcaggggcgtggtggtgtgcaagttcccggcggacccgacggtggcgctgggcgcgctctcggcggtggccgccgcgtgcggcgccggcgtcggcgcgctcgccgtgttcttcccctacaacggcaagcccgtcccgaggaaggccctcttcgactacaccctcctctacgtcttcttccatctcgccatgtaattaatcaatcaagaaacgcgtgatcgatcaagaactccattaactctcgccgcgccgtacgtgttctgagctgagatcagcctcttctcgtgtggcagaggcatcacggtggcagggatagccacgacggcgtgggtgacggcgagcgaggccatgcaccgcgtccggaacgtgcacggcgtcgacccggagtatgcctgcccgacggccaagaccggggtgctcggcggagtggcgttcctcaacctcgacgcgtcactcttctggctcctctgcctcatgctcgccggcaacgtcaaggaggagtacttcgacgacggcggcggcggcggcgaggtcggcgacggcgtcgcggggctcgaggagaaatagccagttagccaccctggcttgtacatgactcgcgcggggaaatcgccaccgcagatttgcatcaagattcggacatatacaactcaggtggggaaaaacaacgtcacgagggagaaatacagcacgcatcacggaaacgatcgaacggcagatgggctaggtgcagaaaaaccgcgtcccatatgcgtgtgaatatgcatggcaacatgacatgtgtgtacatattatgcctggtcgttctaccgagactctcctttcgttgtacataaatttgtctgatccgtattggctgccgctgaagtgcattgttcagtactccctcagactcataatatggcaatctagaattagatgagatatttcaatgaatctgaatagaagggtgttcagacgttatactataaaatgacatatccgattctagattgctattattatgggatggagggagtatcttgtaaccgtgaaatgtgacacgtgtgtaacaccgcaacccgtttatcacctgtaggctaatagggattggtgaggttcgtgtgatctagaggtagagtaataggtggtttagtttcattctgaaaatatagacggatgaatgtggttagtttgacgatacaactcttatatctgagttaatcctttactcaaaagtgaagacgaaattataattaagtaggtatcgtgcatacgtagatccactctacgtgagagtgtactaatgtatattttagaggtagtgttatattcaccaatttacgaaattttagcataagagcagggttatatttggccactttagagattccaaccctaagccctaaaggtttgccggaataaaagggttaacccaattatacagtgtaagattaaaactgtataagtgtctagtgaggtggtatgtcggtcagctttaggtgagagcataccaatttggattttaaagggcagagtattacaatgtggtaccatgcattcaacaatttgtgggatttcaaattggatctttaaccttcaccgagatcccaaataaaatttagagattccatacaaaaattgaaagtttgataaaattggaacgatgtgacggaaaaattggaagtttgtgtgtgtaggaaagttcgatgtgatggaaaagttaaaagtttaaagaaaaaaagttgaaaacttggtgcagattggttcaggaggaggcacaatttagaagggaagtagtaccgactctctctagtggataggggtgatgagacaacaacgggtcactttgatcaatggtggattcatgatttttttagctaggaaaatctaataatagttaatgagtgcatgcaactctatagaccatctacatgaacgaaaaaaaaaagaagtaaacatcgagttgagatttatggaggaaaccaatgcaaaaattaaatcagtgtgtttatatttgtgcattgtcgatgacctacactacatatctacatatgactaatatagtgctctctcacttttttaaggtatattataaagtcaagaagtcaaaattagtgatttgaccatctcaaattatattgttttaacttttatattttttaatacactttattaaaacagagtgagtatataatacattagtatcttgagaaaaagaggtaattaagtggttccagtgaattgaacatgccgataccatttttagcttggaaactatatacggtatgcggccttgctttgctagcgaggctgtgttcgcatgcaccttttcccatcccctccctccttttctgcgcgcacgctttttaaactgctaaacggtgtgttttttttaaaaaagtttctatacgaaagttgcttaaaaaaattaaattaatttattttttttaaaaaatagctaatacttaattaaccacgtgttaatagatcgctccgttttccgcgcttaccgttcttgataggaacgagccactgcgaacacagccgacatgttcttcattagacgtatcagagcaactgaaaaatgtaagggaaaataaaaaaaaaagtaccactacaaagatactgacatgtaggtcgtagatccacatgtcaatgtgtcacgccccgaattagtaccgaccggaactagcccgtgacgctccaatttaacctgttaatcgataccagtcccaagacacagtgctggtatcacaggaagacagattatcacagcaacagatgtctctttattatagagtagatgtacagtcatgttgggctgcggacagatcccgagctcacaactgcattacaaaagggaaacggaagccgggacttggaccaaacaacacaggcgcgacttgggaactaggccgaaaccctaaaactcatcgtagtcggcttgctcctggaagaactcctcatcagcaggatccgcttcgtcttcttcagcgactgggggggattatttatatagagcaagggtgagtacggggagtactcagcaagccaagggaaaataggtgtttaatgcaggcttcaaggaaaggctgttgtttttgcagttgattttatttgaactcctttttctaaaaacaactaagtgagtgcttctcaaacgacacggttgagacggtgcgtctcgtccggtcggagtatgtgcaatgtatcagtctttaaaatttaaaacaaggttggcacccggccaacagcttttcaaacggccacccgggccaacaactttcaaacggccacccaggcctagctgatcccatcagctgcagatttttcaaacagcgaacccctttccacaacagcaatttcacaagcagtagtcaaacaaaactacgctaggaatcacctcacatccgcccatgaccgtgggcacggctgttcgaacagtttgttaacctctgcagagggggtacactttacccacacgacattactaacccggatcacccagcccgtggggatcagccacgtcgggagacctccaagctttcatgacaaggcattttcaaagccgatacaggtttaccatatgccgacgagaggggtcccagaccaacaacaggttaggtcccagaccatactatgccaggaagcccaggggtcctccccgacaccaccccgacgaatccacatgtctctcgacatcaaggctcccctgataagctagttactcagccaagggtgtcatattccacccatgtggtcgtacttgtcttatgtttggatgaaattcctaggaatcggtccttaagtgcgagagcgggaaaaccgtacacccggtacgttccccggtccacggttttggaaattcatttagttcacaagcaccgacccaagtgtcgggttttccaagtcttttgtaaaactcaagttttacccaagaagttgctcagattttaaatttgaaggcgcccttcggtactcgcacagattgcacgatttccgaggcgcaactgggtggttacaagggaatatggtataacaattaacaaaggaaggatcaaatgcaacaaactaggtagatccgccaatctgccttgctgacgggacagcagattaagtgcgatcctatcaatgcaaaatattttgcaagtaacataattaaatttcaaatataggctcaagatgttcaaaggtggcttgccttgctcgagatctggagcttgatcctcgaaatcctcgcactgcgggtcttcgggctccggaactacacgcgaaacgggacaactcaacaaacggcgaaaatgaagccctaatattgacctctaagcgtgccattagatagatctcgagatttgaggaattttggaagttgaacggagtcaaacggatctacggttgggaagatattgaatttctaagattattggatttttggtctaaaggaaaaggatttaattaaatcctttttggaaaagaaaaagaaaagaaaagggaaagagggagggattatagacttctcctcgggcggctagggcgcggcccaagggaaaaggagcgaaccagccgagctaaatgggccggccggcccaaggcggcccaagtgcgcgcgcgcgggaggggaggagagagagggccggtggaccgggctcaccgtgcgcggtcccgggtgggacccgcttgtcagcggctcggctcaccgtgcggagggagcacgcggcgcacgcgcgcgggcgggggagggacgcggtgcacgcgcgcggtctgcggaggaacggaggcggcgggcccacgcgcagcctcacggctcgcggtggaacgcgcgcacgggaggggctgaccggggtcggcccgtcccgacctcggctgagctggcgccgacgtggcgcctacgtggctgccacgcgggccggcgggaggtagacgacgacgccggccggaacggacggcggacaacagcggcgagcggcggagcgaaccacggcgataccggcgaaagcgagcacaccgggtggttgcacgagacgaggggagacgagccaacggctcggattcgccggaggaagcttgacggtggcgaatcgcggcggcggcaaccggcggggagggaagagggaaacagcgacgaggtcacgaggggccgattcccggcggtgagagcatctacgcggccacgggaatccgatgctagcgtcggattgggcggagctacgccgagcgaggctggcgacgagcgggtgctacggagctcgagcggcgacggcggcgagcacacggcgggcgacggcaacggtcggggcggcgccggctagctacggggaggccactcgtgctaccaccgaaaactaaggggggggagatggagcgaggaggaagaacggagggaggcatcaccgaggtgaggaggggcgctgtgacgagaggccgacggcgcgggagggatctctccggcctcgggccggggaagaggaggaagacgagcgcccggagtccctttccgcgtcctagtgcgcaccggctcctccggcacacacgcgacggctgcggtcggcgagagggacggcaatggtgcgggcgagaaacagggaagaatgggagaaaagggaagggagggcgcctgggtttatagggggcggcaatgtcggtttggaaaccgactttggcggtcaaggcgcgagctggcgctctggctagcggccaaaacggtgacaggagggagggaggatgacgccggcgggaggaaaaggggaaaaaggagggagagaaaggggggctcgcccctttcttctttgggaaaagggggaggggagcgggggcgtcgcggcagagggaggagggctcggcctccgtcccttggcggcttgcgcgcggagtggcggggccgaggcgatgacgacggcgatgacggcggggcggtttggagcggcgcgacgacacgggtgacaggcgcgggctggcgcggcagagggtgacgcggcggcggcgaccagacggtcggccactcggcacgcgcgcgcggcttgcaacgggagggcgcggcggatggagaggcgcggctcgagcacgcgcgctggctgcggggccgagcggctgcaggcgcggcagggcagcggggccgggcggcgcaaacgcgacgcgggcgaggaccacgcgggcgcgcgcgcgaacgacgcgcggggagcggcagcgaaggggcggaaaggagggctcggctcggcgcgggcggctct

SEQ ID NO: 10444 - DNA, 1722 bp, Oryza sativa
atcagttatcacaacggtcaacgggagtggattttgatccttgagaggatatcccctcattatttgcatattaatcaaattgttttaaaaaaattaaaaaaaattgagaagatgtattaacatgtgatatatcactccacaaacatacaagttcaaattcagcttctacatctcgcaacgaaaaaaataaatttgtctgtgaatatacattaactagttgtatagtttaatttattttttttccttgcgagatgtaaaaattgaattttaacttgaatgtttgtggcgtgatatatcacacgttaatacatcttctcaaattttttcacattttttaataaccatttgagtaacatgcaaacgacaaagatattgatatcccctcgagggatcaaaatagtttcccctatcactactttgaattaggtttactatcatattcatcacaaggtttccccaaaagaaaaggcaaaagtagaaaaaaaaaacaaggctaggaattaatcaatcacctgcagctgctgtagtgaaatactgggagatggtagagtgcgtgtaggcataatcaaaatcgtttacaattctttcggcgtcatacatagatacctcttgtagcctcttgtttgccatgtcaacggtgagcaccagcgccttctcatcggagacgtcaaccttacccatgatgtaaacaatgtgagcgtccaccaagctgagtgttggatgagctaactggagcgtctccgttgttgggcaaccatcatccagcttgggcaggaggcaggcgttccgagtgctgtcgtcaatcgagacgtcactggacttgatcttcaagtcctcacgccactcatcatccaaacaggtgactggcttgctccatgtggtcagatcccaagcgcagcaatcgtcgtcatcatcatcgtctgaatcatcatctgaatcgaggtaaaggcacagcctgacaacggtgagacggccattgacgatagcaatgtcacgggaaatggatgaagtgtaggtgttgtggatgttgaagatctcggatggcatcggcatgtagctgcttcccccaggtgtgctgctgttgtcgagcacgttgcagatgaccatgccccgccagggatcaacgaaggccactagtggttgttcatcatccaggataagtaccttctctgttaaatggagcacgatatctttgtctggcgcattgcggagttggtcaagaagaaggatgttgttgctccatttgcagtccatggaatcgtcttcgtcgtagaggcagagcttgaagtggccaatatcgaagcggtgatcccgatcgagcgagctaacatagaagtgaccgctgttgttgtcatcatcatcagcgccggcggcatggcggcggtcagggaggatgacaacgttgtcgatacgacgaaggtagtcgtatgggttgtaggggctgtaggggttgtggatgagcttgagagatgggcgagagctggcatggtagatgagatcgtagatttgatcgctatggacgcggaggaagacgaggttgtcgttgacgaacccgacggcgggctccttggcgaagaacacggcggggtcggtggcaggggaccaggcgcagatgtaggagacgagcggcggcggcgcgatgcagaatgtgatctggattttgcggccgttgctgaagacgatggtggcggtggtggagttccggcggtcggcgatgtaggc

SEQ ID NO: 10445 - DNA, 745 bp, Oryza sativa
cacttgcacatcaacattttgagcaagcaaaactgtcatggtattatgcaattggtagtagcgtagacctggacacatggccatcatctgaagtcctggaactcttcaataaagctgaagataacatggagaggggtacagagatgtgggaggaaatggaagagcaacgcctgaagaatcggtcaaaacctagccaggagaatgtggtgctggagaagatgggcttggatgaatatatcaaagatgtatccactgatgacgcagctgaacaagcttctaatatgaggtctcagataaacattttatggggtatgctactttatgaacgttcagttgtggagtttaaattaggccttccaatgtgggaggattgcttgatggcagctattgaaaagttcaaacttggaggggcttcagctacagacattgctgtgttggttaaaaaccactgtgccaacgaaactgcccaagatggtaaggcaattttaacttactttatctcatcatgttctcctgggaatagtatatacagtgttgattttgctagaaaataccagaactagaaaattatagcaactctagtgtcattaatattgcggaacaatgaattgcaaatttctcatataccttatgtaccacccagaatatttttttcaacttcttatgtttcaaatatatatatcatttaattctcaaaagcatacgcaacttgtttctaagtttgcatcttttcttcataggtttg

SEQ ID NO: 10446 - DNA, 1539 bp, Oryza sativa
tctaaactgaccatgaaaaaatacagaatacatatcattagactatatagcagcaatattttgtccatgcaaagatcaaatcaattgacaacatggtatgaactctccattggatgctaaacaagttactgcgactcaacaggttataaaacaaatattttcagcacattcagtttagacaatcatcaaaaccaagcagtgcaaggaatcaaaatgtggaccgcggtacaagtagtcataagatcctaattctgatgcacgtaaaaagacataaaaagatgcttcctttacacccaaatatttggcaatgcttaaaggccaaaatgagggctaaaaagagaaatgtcatgcacaaacgagggtatcatgtgcaagaagagatatatggtaccactataatgattctcacctaaaagagaaaactggtactgataacaatgctccggcattaaatatgtgctggagcaacttcatgtatactatatatgctccagtgcagtatgcaattgtggaactctccgcctaaatagtggctcaagacggaaggatggaacaccacgcagccaccgtttaatgtcatacatttcattccaggcttgcacaatttcatcaatcttgaagcccaaacctatgaagaaaagatgcaaacttagaaacaagttgcgtatgcttttgagaattaaatgatatatatatttgaaacataagaagttgaaaaaaatattctgggtggtacataaggtatatgagaaatttgcaattcattgttccgcaatattaatgacactagagttgctataattttctagttctggtattttctagcaaaatcaacactgtatatactattcccaggagaacatgatgagataaagtaagttaaaattgccttaccatcttgggcagtttcgttggcacagtggtttttaaccaacacagcaatgtctgtagctgaagcccctccaagtttgaacttttcaatagctgccatcaagcaatcctcccacattggaaggcctaatttaaactccacaactgaacgttcataaagtagcataccccataaaatgtttatctgagacctcatattagaagcttgttcagctgcgtcatcagtggatacatctttgatatattcatccaagcccatcttctccagcaccacattctcctggctaggttttgaccgattcttcaggcgttgctcttccatttcctcccacatctctgtacccctctccatgttatcttcagctttattgaagagttccaggacttcagatgatggccatgtgtccaggtctacgctactaccaattgcataataccatgacagttttgcttgctcaaaatgttgatgtgcaagtgcaagaaaaccttcgaaaaagtttggctttgccttcacggcttcttcatatctcctcccagccttattgtactcttcttttgcccattcatacgcttccttcacttgttcaagtaccgattcctgtggagagtctcctggcagtaacaacctcttctggcccgagacatatg

SEQ ID NO: 10447 - DNA, 11848 bp, Oryza sativa
gctccatcctcagaataggccggaaacaagccatccaaacccgtgtggataggttccaaactatgaatccaatcaaatgcactctaatttccataaattatacgcttagttccagttaccataccagtgccatatcaagaaactttcatgttgcctcgtggaagttgagattgaagctactacgggagaatcggatgtcggtgtgtgatgttttgatttctacggtattatataaattctaaaataattttgggaaatggctagtttaataaaaacaaaaaaaaaattattattatgaggaagccatgtatgcatgatatgtgggtctaataatctcacaatatacctatgtgaaccacctaacccctccgcctagggatccgcctaatattggtctctaatgtttcggtcttcaacgtactatctaaattctgagaaattttttcaggaaatagctagctaaaaaaaaaacttttcttctttcctttcaaaagtaagctttacatgacccatgggcccaatggtcccccccatgtggaccccccacctcccaggacccaccccgttcacacgcgcactcctctggagactgcccaatataggttgattatgattcagttatataaataaaatgattttttgttgagcaaataaaatcgcatttcacgaagaatgtcacggtaactaattccatgctccttagagacgatgtgcgggattcctatcaaggcaatactacaatatagtaccatatttatttcttctatcttgttcttgttcctctctctttctcgtctgagccatttctccgtgacctcttcttttcatggcttggcactatgctagcttctcctcctccctcttctaatttcttcttaccctctcgctgttgtttgtgtatttgtttgcttgagtgcaacttatttgtttgtcatatccctcttgcgttaaccgcgtaccgttcttttgcatgcacgcatgagggttttggttttgtggtttgccctgtgcttacatatttgctagctagcttaatgctaaatttggttataatatttatgtgtttcctctcttgtttgctctgtcctattgtcttccggatcagaagaggcctgaagcgaggcaccaaaaaatccaagtggtcaagttccaccacagtaaacctaaccaaccgaggcacgcttagtttgtgtatgcatattatagcttagttccaatgaattgttccggtgctatatatgttgagaaaaattccatgttacctccctgtggaagtggggattgaggctactatctacactctaaaacattatttttttgaaatggctagattaaaaaaaacaaacattttcttccttttttatgaggaagccatgtgtacgtgatatgtgggtccaatagtccccatacacctgtgtgaagcgcacaaccccaccatatcggtctccaatgttttgatctcaccgtactatcagaattgagataatttataaggaaatatctagcttaaaaacattttcttatttcctttcatgaggaagctaggtatacatgatctatgggcccacgttcccccataatacacacccatgtggattgcgcacaacccctctccccccccccttccctaacatgcacgtttggaggtccgcctatattgattgatgatgtttctcttgagtaaataaaattgcatgtcatagtaacaaattacatgaagacactgcgtgggagaccatattaattggtcaaggtgatcagatttgagagtgtaatatatgtatcatccaaattccggctacaacctgcaaaatgttaagtacactatcatctttgtgttgtgtacataattccccttattgtgcatgtgctacatacatccatttatggtataccataatttttgagggggggaggtggcaacaagggtgaaaccctgattaacttggcctagagcaaccaaattgatcaagatacgtgtaatagtgttgctgttgtggattatgttttgagccgtgtagtttttggtatgtcagaataatttcattgaatttgattaaatgtatgattgaaaaacataggaatgtatcttagagatatatgttaattctaattaagtgctaaatataacatagatttgtctttcttatcttctggtgtgaaaggttatatgtgtggaccccgtagtccgcacaaccccacgtaagcatcatggtcccactagtcaatttttgtccctctcacgtgaatagcgcagctatttagaataaaagaggtgtcacaactccaataagatttatcatcggcaccgttcgagcagacttccatcgtgccacggaccaccgctatgggtggccgtcgatcaagacctacttagtaggggagaaacggatgctagaaagtttcaatctcgaccatcggattatttatctaaatttggatacaaaagctttaggaagatagagatcaatttaatatatcaaattctcattatcttaaaaaaaatactagattaacatcaactctttttttttcatttccatgaataacgaggtacacgcatgggggcgacctgtgggcccaacccagtggtccccacagtcctgcgtgggcattgtgacccggcctccacccccaggtttgctgtctccctttctctggtaaaatagcatcacctgctctgtgctgtggatggcgaaggcaaagctagcttgcatatattggcgagatatatatcagcttgcaaccactcccaccaccaccaccaccacaatagtgtactattccccggcgagagatatcctaaactccaaagcaggtagagttcagagaagtgagtgattgggaaagaaacaagcggtagggttcattcccctcctcggttcctgtgtgtttgtgtgtgtgccacacataattcctctctccttgatgaatcatctggccactatatttttaatctctctttgctcgtttggtgtgtttctcctgttgtttttaagggtttggttggctcagcatagctttcccaaatctttgtttttcttctaaccttgttcctctctctttctcgcccgagccatttctccgcgacctcttcttctccctcgcttggcacggtgtgctagcttccatatctcttcctcttttgattagttccttcttctgccgtctcgcggttgcttctgtgtttgtttgcgtgagtgcaacttgttcgtttgtcatctctctcttgcgttaattgttgttttgcatgcaaacatgagtgttttttttttgttttgtggtttgtcctgtggcaggaaccacacatatttgttatctaggtgaatgctaaatttggttacaagtatttatgtgttgctcacttctttcacttgtcttttagatcagaagcggccggaggagaggcagatagataaacagtgccagccatgtcgcctcctctgtgacttaaattggactgaattgatcaggtggctgcgcctcacctgaagccaacaaagtaagcagcgagaggacgcgccgccagggtagggagagcaagctatatatctagctgtgctgtgctgtagtgatcgatctctccctgttgttttgcggggatggcggccgcctcgtccgcacccttctttgggctcggcgacacgcagatgccgccgccgcagaatcccaccaatccagcccttcaccaccaccccaaccccttccccgctcccgtcgacgccgccgcgcccgcgccgaaaaagaagaggaaccagcctggaaacccaagcaagtgttctttcttgatcgattgatttcccctttcttcttcgttcgattgtatcgtgttaaaattaatcagttgtcgattcttctcgtgcagatccagatgcgaaggtgatagcgctgtcgccgcggacgctgatggcgaccaacaggttcgtgtgcgaggtgtgcaacaaggggttccagcgggagcagaacctgcagctgcaccggggagggcacaacctgccgtggaagctgaagcagaagaaccccaaggaggctcgccggcgcgtgtacctgtgcccgaagccgtcgtgcgtccaccacgacccgtcgcgggccctcggcgacctcaccgggatcaagaagcactactgccgcaagcacggcgagaagaagtggcgctgcgacaagtgctccaagcgctacgccgtgcagtccgactggaaggcccactccaagacctgcggcacccgcgagtaccgctgcgactgcggcaccctcttctccaggtccgtatgcttcgatcttgatcttcctcgtctcgtccatggattgattcgttcacgatctaagttaattaattcgagtaattgatccatatctttgcaattaattctttcgcgaattgaattgacagcaaaatcggctggctaggatagtagctagatagatatattcctttcgaattcaatggggtattattatcttcctgttttgttcgttcgcatgattgggtcatgatgaactcgatcgcgggaaagtgatcgatcgatttgatgggtggtggtggtagtacgcctttgttagggttagctagggttgtcgtcgttcgttcgttgctatagctcgttgctccgccatggaagagattggattccttcgagagagaaggaacggtagggacgacgacgatctccatagacgcgccgcgcgcgcgtgcgctgcgtgcagtggatcgagcatgaaatgcgacgagagggcatgagcgctgctgctcccacgtgaaccgttcttgtcgggaggagacgggagagatatgcatcctgacatgggcgacggctcaaaaaggagccatctcctccttttttccacctcggaaaccacgctcctctcctctcctctctcttcccccacctgttcacgtggtgagacatacgcgcccccgtcgttcgtctgcaagctgctacaagccacggcatccaatccaaacatgcctcgcagcgcggcggctggctagcttgtttctcatgtgatcgtgtagctgcattccgtggtgggcaactggccggcaagcagtgtactgtactactgctgttgctgtgcttgcttgacccatgcgtccggtaaaaatcttagcttcttctctctctctctctctctctctctctctacctccatctatctatatctctggcatactgcactgtcattggttttaattactagctagctgcatgacaattattagccacaagcctgcatgcagccggatgcatggattggccgctagctggtgttttcttgtgatttatgcttgctactctctgttgatagtagcagcagatatggtgctagtgctacagctaagatgatttattttcgttattaatattggaggtttttatgcgagaatttcatttctgtagctgttgcatgcgtacgtttactcattcattaattatttggttttatttgccagcctgcaactaatctgtacgcaatcaatctacagctagtagtgaccaagtatttttggcagtgaaataaattgatgattaattgaaatactatccttgcatgccattaattcttcagttttcttcacctctgtattgctggtgatatgcactagtcattaatagtacacttaagattgttgccagagcagtgacaataatctactgctatgtatagattccatgttttaattactacccacaactgagacaccagtaattaatcagcacatttaaaattcccgccatgtgtgattttcaatatattgcaaatcaatgatgaatatataagcttaattgattgtaaaaatgaactgcccatttttctttttgcgaggaaaaaaatgacctgcccattatattacaatggaatattgatcaactggcacttaggctcagtttgaggctcagtttgaaattaatctcgttaagctttttgcaactttttttaaaccactatgtgtgtattcttttaaaaaaagttaattatatacaagtttcttttaaaaaataaaaaatacttatttttatgtttataatagttaatacggaattaatcatacgctaatatatttcttattttacttgcctgcacccaaactaagccaaaccattcgaaagaacgtagccttagttatgcatgtgtacacgcttatatcatatgctagccagctttggttgcggacccgatcacagaatatgttgagaaaaaattcactataattttgtagcaaaaaaatataatttcactctaacttgactaaagaggctgatcagggaactgccgtgcgcgccgcatcgtgcgtacccacctgtgttcgaatcccattcgacatgtgtgttcacattcttttcattctttatcaatgcataccataccaagttactctttggtatccaaaatttaaaggctgctttttttagcgaaaaatatagtttcactctaagttgactaaagaggctgatcagggcgttgtcgcgtcacgcgtgcgttcccacccgtgttcaaatcccattcgacacgcgtgttcacatttttttcattctctatcaatgcataccataccatgttactccttggtatccaaaatttaaaggctgctttttttagcgaaaaatatagtttccctctaagttgactaaagaggttgatcagggcgttgtcgcgtcacgcatgcgtgcccacccgtgttcgaatcccattagacgcgcgtgttcatattttttttcattctctatcaatgtataccataccaagttactccttggtgttcaaaatttaagggctgctttttttagcgaaaaatatagtttccctctaagttgactaaagaggctgatcaggacgctgtcgcgtcacgcatgcgtgcccacccatgttcgaatcacatttggcatgcgtattcacatttttttccttctctatcaattaatacataccaaattcctccaccatggtatccaaaattttaaattaaggctgcgcttgcatacccacccgtgttcgaatcccattcggcacgcgtgttcacattttttcccttctctatcaataattagccaattaatcccctaaccattccatttttctcccttttttttaaattttttttggctcactgtctgatttacacgtcgctgctctctcctcctggctcctcgcgcgcgcccaaatgaccgctcgtaagcagtaaccggtcaaacaaaattttgggcgccgtgggagactgcatacgcgccggtatccaatacgagttagagccggttgtattacaaggctattttgcaaaaaatacataccaagtttctccaccatggtatccaaaaatttaaaggctgattatcctggctataatttagtgttcatgttcaccgcaatagtaaatgctatagctcctagctagctccaatagtgatgctccagaatttcaaaaacgaatttcattattgcccgcagtgattgaaaagtagttgtactactcactgtaaatatactatagcgccatatgtgatcatgtatagtggtacaacgaatttttactgagattatttcacgcatgcacaatgcattccatgaaataatttgatacatttgtgttcttcacatattggatcaaaatatgcaggagggacagcttcatcacccaccgcgccttctgcgacgcgctggcgcaggagaacgcgcgcatgccgcccatcggcgccggcgtatacggcggcgccggcaacatgacacttgggctcaccggcatggccgccccgcaacttcccgccggcttccctgatcaggccggccagccgtcggcgtcggccggcgatgtcctccgcctcggcggcggcagcaatggcgcctctcagtttgatcacctcatggcctcgtcgtcgggctcctccatgttccgctcgcagggatcgtcgtcctcctcgttctacctcgccaatggcgccgcccatcatgctcccgctcaggacttcggcccggaggacggccagtctcaggccggccagggctcgctgctccacggcaagccggcggcgttccatgacctgatgcagctccccgtgcagcaccagcaaagcggcaatggtaacctcctcaaccttggcttcttctccggcagcaatggcggcgtcgaccagttcaacggcggcgctggaaacggcgggcagggcagcatcgttacttctagcggcctcgccggcaaccacggcggcggcggcggcggcttcccttctctgtacaactcgtccgaaccggccggtacactgccgcagatgtcggcgacggcgctcttgcagaaggctgcccagatgggtgcaacgacgagcagctacaacgccggcggcgccggtggcgcgagctcgctgctccgtggagctagctcccacgggatcagcgtcggtgaagggccggccaacgagaggtcgtcgtaccagaatctcatcatgggctccatggcgagcggcggcggtggcgcgggtttcgccggtagcttctccggcgcgtctggattcggtggcgccgtcgacgacggcaagctgagcacgagggacttcctcggcgtcggcgtcgtccagggcatcagcggctcggcggcaatggggccgccgcgccatggcgcggccggcctccacgtcggctcactggacccggcaaacatgaactgaagtcatcacagagaagaaaaaaaacaatagaagacggaaggagatgatcatgctgctaatttcatttcatcatatcagaattagtcaagaaactggaggtaattaattaagaagagaaaagcgatttcaatccatgcaagatggatgtttctggggaaatctggagctgttaatggtgagtcgtagttgctagctagctagccagagctgggaggaataataataatacctggattaagtggccagaacttaattttgtaccggtacatttcgtttgtttttcatgtacttttggcagggaaatgggtctcttttgatgtgaagtcatcatgtgaaggcctgaccccagactagaatcaattcaagcgcgcgctgtgcctggattaattaatcttggagttttattgcttgttttggtgcacatatatgcaggtacagtggcttgatcatctgtgcactagctagtctcgttactgtcttactgattactcatcagtgtaaggcttagctataatatttcatgttggtttcttctctgggtgtgctgctttcaaagttgaaagggaggagcaaaagcaagcatcattaaatgtgggctttggcgtagtgtcagtatacactgtcactgtttgatctgaacagcaagcaagcagcagcagcataagactgaagaagaaggttacaaacagatcgaccaaagaaggcacgcatcccactgtcctaataacacggctgtgttgctttgctcgatcgcttccgtaattattccctgcttggcttcttccttcttcacttcactgtccaggtccagctgaaacattgcattgctgcaatgcttgctactagcaaattaagctactatgctgcgaccacagtgcatgcaattgcacactcgacatgtactacagggagagctcagctcacatagggcaggattattattattattattgatatgtatgcatatgtagagacacacacagaaaggtactactacgtagctaccgaacatttggaagtagctaaatgctacagaacaagagttttggatgaagtttgtccacgtgaagagagagatagaaactttgagagagaaagatggatgcatgcaagtctgtgcaggtcagaggtagccaggtctctctctgtgagtactgtgcactgtaacacactggggtgagcggctgctttcacaggagagtgttgcgtatttggggtatatatctacttgacatttttgttcaacacggttacggtaaaagtgtgttttacatttttctgaggagtttaagttttgactcttgtctagctacttccgctaaccattacaaagatcaacccttgctttttttgttcgtattaagaattcgccccctggcaactggtttggcgatcaatatttttcacaataaaattgaagtcgttgtgcaattactttctaccttttccccaattacaaggaaattcacccctggccactggttgggtgatcaacggttttcgcagtacccatagtgtcaatatgcatggatgcataacttcaaatgcaaaataatcctactagtagtattcgttagagaataaatacatatgttaaaattggccatatgatttaggaaggagatgtgcttgctggtacagtggcaaacgcacacagtgccatatgatttagtaccagttacgcttgttggtgcagtggcaaacgcgcacagttttaaccccatcgagctgcgctcgactccaggacgctcgcaatttcatatgaattaatatttgataccaagctccttcttggtcgtctagtctacatatcgatatcgatatgatttagtaccagttacgcttgttggtgcagtggcaaacgcacacaattttaatcccatcgagccgcgttcgactccaggacgctcgcaatttcctatgaattaatatttgataccaagctccttcttgtcgtctagtactacatatcgatatgatttagtactagttaatttatttcctatcaagcttaaatttctatatataaacaaaagatatatggtaatatgtttgcattttccacgtcgatccggttcgactctttctgtgttcgcaacaagagaaatagatgggtgcgcttggtctctgaatttggaagagtagtgaataaaatggagggagaagaaattaagaagcgtacaaattaaacctacaaagttattaatttgagtcgtttagttgagaaagtttgtttcacgatagttaggcctaaaacaaaactcgcaactcccctttcattgattattgtatggtagtttaatttaaaaaagtccaacaccatcgatcttcaccaacaactaatcaaattacaaatgcatcggtgcgtaaagattatacacggactgacggacactcctatttcaaaattgttcacatgcactatcaatatatggcctgtatagctctaattagctatagcatcaatatattttatgataaatcaacggccaaattagtcgaagaccttttcaatataccatgtaaattaaaatgaacagagatatcattaatttgatttgcacatataagtgtatttgtctgatattctgaaccaaattaaacaagaccccatatacatgcatgaattgaaaactgatttcatgtgtgcagtcgatcgatcgtccataaatatcctacggattatatatacgtacatttttgtggatgacgtgcattctgtgatgacagtactccagtgcataataatgacgtttgtggtcctttgttcgttacatgtactgatggcgacaaagtaattcgtcctatctctatatacacgcagtcgtcctgaatactttgccgctagcttagctgtcggcgtcatgcgataagtgtccaggttcctgactcttctctgtgtggcttcgttgatagtgtatatagtactatccccaccatttcttatcgtacatgtggtctcgaacatttacatttaattcgttttgagcggtaaacaatatgttaattttaacaataaattaccagttagttttttttactgggaactgtatagtactccctccgtcccataatataatggattttgagtttttatttgtattgtttgaccactcgtattattcaaaaaatttgtgcaaatataaaaaacgagaatttgtgctaaggataataaagtaaataaaaaaaat

SEQ ID NO: 10448 - DNA, 8800 bp, Oryza sativa
cgcgagtaatttttccagacggcctggacagaccaccactagaccaagaaattaaagaacgcatgccaacgtaattggaaattaaagattcaataccttgaccgctttaaccccttcttccccgaatgttgcaaccaacgcgttagctgcgattgacgccttacacaccacgtcgcactttgagctcgcacgtgctctgctaaaattgaccaaattgggaaccttaatttgatcagtatggattctaatcaactagaccggtgactgaagagcttccaccaaccatgaacgggcctgataagcgataaaattgtctgaaaattctcaggagtgtggaagaaccgatctcgcaggtagcaaccggcaacagttaattggctggggaagttaatttaagtacatgtaagattagtaacggtcgccatgctgcttgcagtgatgtgtgcttgtcagtttgtcagcaaaccaaattttgattaaaacgcccgtacttactaaaagagtactagttggtatactcggtattattagcagcaaattgagacggacatgccgctgaaaattcgtgtctacaactctagctgaccaaacagttgggtgatactgtttaatttatacagtaattttgccacgtttgaaacagtttattgattgaattatggctcatttctatttgattacaggaatatataaaatattttggcaaataaacttaatagttttaaaacaagtggtctaaagtctgaacaatgaaaatgtatacagtacacacaagctttccatacatgcgaactaataactatcatcaaaagttttagaaaaatacacatgttttccaatattattatatctatgtgcaaagtttcatctttaattttattatatttaaatcgtaaaaaagataaatttctgacacattaattcgtacatttaaaacggttagatttttcatctttttttttgttgtcatggtcaaaatgtaatgaatttaaagttcatactacatatatgtataatattattaaaagtacgtacatgtacattttttaaaagatttttcagttatacttattacttcctccatattttaatgtatgacgccgttgacttttcaaccaacatttgaccattcgttttattcaaatttatggcatgcttaaacatttgatgacgaatcaagtcacaataaaataaatgataattacataactttcttgaataagacaaatagtcaaacattggataaagtcaacgacgtcatacattaaaatatggaggtagtagtttgtttacacggaatacaggtgtaacgtaagtacgtctacagtatatgttcgcttaagcagtacaagaaaaaaaggtttttaacaccccaaatatatttttgaaaacgtagagcaaataatccgtttcaatgatccaataaataaataatctaattaagctttagccggtcagatcatcgtcgttgaatcggccatcggtgatcggttgatcgaatgccgcgctaggtagcaatagcatagctacatgctgggttggttggtggcgccgtgcgtggcggtggccgatcgcgatcatcgatggccggcgtcagtacgtcttgacgactagtgaagaattcgatcagggtattgctacgaccagctgctggttctctgaattccggcgagatatatatcgatcgatcgtacatagtactccctccatctcaaagatatattattttgaccgttcgtcttatttaaaaaaattaagtaattattaattcttttcctatcatttgatttattgttaaatatacttttatgtatacatataattttacacatttcacgaaagtttttgaatacgatgaacggatcaaatatgtttaaaaaattcaacgacgtcaaacatttaagaaaggagggagtacgtacatacatggtgccggtggcaacggcggccgaagcacgagctagcaacaagtctcttctccggccggcgctcgcttgctttgacgctggaattaattgaagcgaattagcgcgaccgatcgacggccaagtggctagctatagctttcatttcatatatactgttataatccatgcatgcatgctagtacaaattaagtcgtagttacgtaatgaaacgtcgttacttcaggcccaggagcacgtactagctagcaatcgcaatttccatgcagtttctttgatttcattcgatcttgcactgcatgacgaatttcaaaagacaatgatatattggtcgcgatcgtcgatcggaaacacacatgaatcaattaaccgatcgatctagctagctatcgagagagctgctcatgattatatatcacagtgacgggagttgccagattagaattaagctggtcgagaaatgtaattaatcggtccaagtccgcgttgaattatcttcccggtcttgctacgcatatactatctgctactcaaatgctatacgtggcacaatttttatggtggttaatttctctaagaagaagggggaaaaaagggatataattggatgttgtcaaatgcctgagtactgatcagcatattagttatgagcagtcaaaagatatttaccaaggcaccaacttaatttatttatgcacaaggtgaagatgcgtgtgttgaacgtatggatcgatatatgctacacgtgtggatacaaacattgcctctactgcatgcccctcgaatctctctagtttgtaattatatgccatgaattttgtactcttccccggaaaatgttttgacctctcgatggatcgttgtaccacgtttatttagaaaccatcgaaatagttataattttttaatttaaaaaattatattattcatacaatatatgtatatccctttataaaatttttatgtccaaacttaactcatacattgagatataaaaaaagaaaaattcaaccatataaaagtagtagtgtactatttatatctgaatttattttttccctctcaatgtagagtggtatatttcaatatttccctataccgtatattatcattttttaaaaaagaatacaactattctacttttttttaaaaaaataactattttgcaatgaatttggaagaaaatgtgtacgatgggacattgtaaacccttaaggaggtacatgatggaacatttacttgagatattaaaattcatttcacctcttttcctttgtaaaatggaaactgtcgacgggctatacccgactacggtatttgtaaagtatgaagatcgtacgtaccagaatatacgcgggattgtatcaagaagataagaggcaatgatttatattggttcgggctcttaagataagtaataaccctactacagtttatatgtattgttgggagatgtgccccacagattacaacggaggagaaagagatgatcaatctaatccgccgactagaacctaccacagtccagctagatctaatcatcaactagggcttcggcttcttccagattgtatcttgatgtggctttggctatggttgtaaggactctttatatttatagcgatgagtatcttcttcaagtagaactcagagtttatgctagacactagtgggagaaactttgttttttctaaataggactctgacaccttataccccggataaacaatttccttacagactcgcaaaaatctgtatataaggaatttccttcctgtatacttattaagtatgtggtatttttgtatatcacaaacccttgtatagaagagatataccttatctataacccaaacaaatatatatatatatatatatatatatatatatatatatatatatatatatatatatatatatatatatatatatatatagacacacacacagatgaaggaagatctctcgctcatttgaccttttttttaaaaaaaatacacaattaagttatgccagggagacctacacaagtattaattaatgatcaaaagtttgaataaaatatactccatgtttgtgatagaaggtttacgaatcctttcctggatggatgtgtacgtcttctttatcaatggaatgggacgaagcttctgcctttgttttagaaaatatatactcctcaaaattgtggcatataccctcaagaaggatcgagtctctccattaactagctacttcatactccctccgtatttcgtattttaatgtatgacactgttgacttttcgaccaatgtttaaccattcgttttattcaaatttttttataaatataaaaatatttatgtcatgcttaaagaatatttaataacgaatcaagtcataataaaataaataataattacataaattttttaaataagacgaatggtcaaacgttaaacaaaaagttaacgatgtcatacattaaaatatggaggtagtactgcttacacgttgcctctcaataatacaactatgcatatattctcttcttttttaatcttacatgaacagcactccagttacaaatttttaatttacgcgcgccactaacccgtcaattacgccatctctccacccccaaacattataaaaacaggaccccccttgcacttgcacacacgcacactcctctcattcgatcgccattagctgctttgcttgcactactgctgctagctagctgctcgatctcttatcacatatcatatatataccaactaattacgatcgaattaaggagctagcaatcaatcaagaccatggatagcctgccaaagagagacgctaactacgtccctttgagccccatcaccttcctccacagagccgcctccgtctacgccgaccgcacctccgtcgtgtacggcgccaccagcttcacgtggcgccagacgcaccaccgctgcctccgcctcgccgccgcgctccagtccctcgccgtctcaaagaacgacgtcgtaagcaactctataccctattattatagtcgtaatcgggcgagttcagaggttctgagaagcagcgggtgagaacgactagctagtgagaatctaaagagttactgtagtttttttcatattttggcttctagaataactacaaatttttacaatctaggtaagaatctaaactattttgggagagttgaaaataagatgtagtatatgtgtcactctccatgcatgtcacgtgctaatttttgtatcatgtggttacgtaggtgtccgtcatcgcgcccaacacgccggcgctgtacgagatgcacttcgccgtgccgatggccggagcggtgctgaacgccatcaacacccgcctcgacgcggccaacgtcgccgccatcgtcaggcacgccgagcccaaggtgctcttcgtcgactaccagttcatccgcgtcgccaccgacgcgctcaaggccgtcatgggcgacggcgacggcgacggcggcgaggtcagggcgcccttgccgctgctcgtcgtcatcgacgacgccgacaagccgacgggcgcccgcgtcggcgagctcgagtacgagcagctggtggcgcgagaagacccggcgaggtacccgcctcgtccggtggaggacgagtgggacccgtcgcgctcaactacacctccggcacgacgtcggcgcccaagggcgtagtgtacatccaccacggcgcgtacctcaacaccatgggccttcttctccagtggggcgtcggccacgagccggtctacctgtggtcgctcccgatgttccactgcaacggctggaccttcacctggggcgtggcggcgcgcggcggcacgaacgtctgcatccgcgcgccgaccgccgacgccatgtacgcggcgttcgccgcgcacggcgtcacccacatgtgcgccgcgccggtgctcttcaacatcctcctcgacggcgcgtgccgggagccgctgcgccgccccgtggaggtgctcaccggcggcgcgccgccgcccgcggcgctgctcgagcgcgtcgagcggctcggcttccacgtcacgcacgcctacggcatgacggaggccaccggcgtggtgatggtgtgcgagtggcgggagcagtgggacgccctgccaccgtcggagcgcgcgcggctcaaggcgcggcagggcgtgagcgcgctcaccctcgccgacgccgacgtgaaggacctcaagacgatggagagcgtgccccgcgacggcgccaccatgggcgaggtcgtgctccgcggcagcaacgtcatgaagggatacttcaagaacccgcgcgccacggcggacgcgttccgggacgggtggttcctcaccggcgacgtgggcgtcgtccacccggacgggtacgtggagatcaaggaccggtccaaggacgtgatcatctccggcggcgagaacatcagcagcgtggaggtggaggcggcgctgtaccagcacccggcggtgcgggaggcggcggtggtggccatgccgcacccgcactggggcgagacgccgtgcgcgttcgtggcgctgaagcgggagttcgccggcgccggcgaggtgagcgagcaggaggtggtgtccttctgccggaacaggatggcgcactacatggtgccgaggaaggtggtgttcgtcgacgagctccccaagaactccacggggaaggtgcagaagctcgcgctgcgcgacatggcgcgccgcctccgcctcagggcgcccgacaaggcgaggcccgtcgctgcccctgcccgccatgggccgttgactcaaactgctaggctttgacttttttgctgacgtcagcacgtgactacgtggtaaggattgctattggtctctaaaaaaagggaaaaccacagtaccacacacctttgtagtagtgcactttagtattttctttttaatttttcatacgctgcaatatggtcatagtgtatattatcatcgttgataataaatgaactagtgaataattaatttgctcgttgatagatgatgagaaatctcggataatccaaataaggtctaagctacgaagattacatgatactattgtcttaagagtcctatagctaattaaatggctgcaaaatgtaaagaaaaacatttttgcattgttttttttcagtggtattttctccgtctcaaaataagtgcactacttcacgctaaattagaggagtgcagttattttgggatgaacgaagtcctagtactacatgtgaaatgacaaaaaagcagatttaagaaaacaaaatatatgtattagaaacaaaaaaaaagacaatttgcacgcccatatacactggagtagcttcatagctatcagatcaatgtcacgctgagcgcatgccaatttttataatcagatctacttagtacctccgtattttaatagatgaccccattaacttttatatacatgtttaatcattcgtctcatttaaaattttttgtcagaatatatgaatcatgcttaaagtaattttagtgataaaataacttacaacaaaataaataataattacattttttttataaaatgaattgttaaatttgtgtaagttaacgacatcatcggttaaaaattgaggtagtattccttattagctttgtcggaaaacgaagtcggaaatagatgaaacgtatcatttaaaataacaaatttaatcttgccatatgtgtacagtgtacttgtttatcagcgttcattgtcctggttttagcatcaccagttctgtaaataatcggtcgtactatcaaagagctgaaggacagttcttgcaatcaatcttctatcggatgctgatagcgctttacttttaaaaaaaagaatcgtaacgtgcgtccatgaacaaatcgccaccaaggcaccaacatcaaattctgacccgatagtcagcatgctcaaatcttttaggtagacgctcttatcatgaaaaaactagaaaagaagtcatcaagcacgggatgcacattatgttctgcaaatgcaacaaatattttaggcttgtggctttgtttaagcttaactacgtactatgaagtattcaagtgcacgtattatttattttgtggggaaaaaatcttgtccatatcgagctgaatcatgcactgcatcatcacctacgatttataattgatttccgtttgggactatttacacatcacatatgcatttatctcttttcccttctccaatcatatgattttctttgtcttctactcccccttggccttaccggtgtcacttatccctctccctgaaacctccataccatcacctcctttatcttctttggcttcggtaccccgcaccgccatactcatagcttgtcttccgcggctccgtcgttgaaactgccgccaccttctatcggctatcgtctctagtattcctacgctatatccctcctaagccttctaaccactcaaatgatgagcttatcccttaacaacaccaggtcaccactctcctcctctttcaacgccgaggtggcgccaccgtggtctcttgctgccctggccacctacacaactagccgctactgtcctagccatccttctaagtcgggcactaccttccgccctcagccccaactctgaaatcctaaccacttgggggattgtcggagatgaggaaggaggccgtggagtacaaatcttgaagtggatctgaaggttagaatcacttgatttttcctctaaaatcgtgcgcacgatgtatagatttgtttgatacgtacgtacagacttgatttccgtttccttttaatttgtggaactatgatcgtcactgtaaagttttactcttaacctatcagagaaacaaaaaaaaatttgtttctaggcactattcca

SEQ ID NO: 10449 - DNA, 5988 bp, Oryza sativa
caaattccaatttaatatttgggaattggatgttctctgtacacggatcctaatatgcattaccaatgaaagaaaccaacccattatcaggtatcgatttaatggtgtgtgatgaatcatctctttctagatagtagtagtcaaaataaggaactttcactgcctattacacgaaatggtggatttaataggagaacaacagaaagaactgcataataataaaaattaagcaccataggaaaaacaccaatgatccatactgcatgcatattttacctgtttaatcatgtttataatctgatcaatgtggtctgaaacgcgaggctccacagatggtggtaaacaatgaagattagccatgtctgataggaagtcatcagagtaccttttgcttaagctaaaaggatcttctcccaattgatttgctcttgcaattatctacagaattccagaagtgcaactcaggtatcctgtgcagattagcaattggcatataaattttctttctaggtttcaagcaaaatagcttaatataatgagggaggtaaatatattgaaacaaatttgaagttaaattcaggtattaatctgaaacaaacacaacattggttgcaatatgaatcaaacatgaccttggtctactctacttcaactggtcaacatgacacgttttctccatattaaaggtatggatataatgacttctaactatagaagatgaacaggtagaataactgtagcataaataaatacaatacgattccttgtttacattaaatttagctttcagataatgaggaccagcatcacttgtttgaaaataaatttgacccataaatcaccttgtcatcaatgtcagtaaaattccgaacatagcgcactttatggtccaaataacgcaagtacctgccagatatcatgatacatgagataagcatatgaccgtatggtactttctagcaggagaggaaaataagacaagacaacatggtaagagtgtgctgaatgtgaataaaaagaccataaaggaatacggccggattcagggtgtgaaattgttcctgggtatgatggttgagttgctccgttatgcttagctaattgagatgcaacagtgaattggcttgttttcctaacgtcataacaaattaacaaccattcccagagtaccttttctgtttccggcagatctgttgctaagggaagagttaggatcatttcgcacgcaactaccataacagtttgccgtagttctaatgtcagaacatcctaaaccgagctatttagagcgcaaaatgtttctcacagtgtgtccacaaacaaattgtgaatgtacataatacattgtgtaattttgcaatgcacttactgctataaacatgtctcctcatttctccatgtatagaatactgctattaagtcggtgtaaatttgttaacacatccatataactaattaagtacataacgcctcattgggtgagtcaattgcacagcacagtcaacatcactatcactagagcacgcaattcaccaacgggaccaaatccggagaagaatgaagctagggggaacctgtagaggacgtcgaaggcgacgtaggcgcgggcgtggccgatgtggctgtcgtcgtagggggtgacgccgcagacgtacatgccgacctccccgccgggcacccggggctggaagagctccttcctccgcgacttggtgttgtagaggtgcagctcccgggctctccccgcaggcgcgccattcgaggcggaggcgaaggcggaaaacgcggcggacgacgagggcttgggggagtgggagtagaggcggtgggggcgaagcagaggaggggtcagggcaagcgcttggcggtgcggtaggcgagctcgcgacggcgaggagaggaggagagggaggaggccagcggcgcgcctcgccgccgccatggtcggtcctcgaggcacaggaagcgcgacggcgcgaggggttagcggatagcgtttccctcttttcccattttttttgggttttccgccccacgatttaatttcgttccactgaacagtggaattatgaaaaataaaagggaaatacaagtacctcttgatgggcttatttgaattccttattttgttactaaatttatatatagtatgtacctgaagttttagagagagaaaaaagtctagttcaaaatgtgaatccgaagagtatatgacaacagttttattggagacaaatatagcatattaagggtctgtttagatcctccaaaatagtgaaagttttgtcgttttggaccactttttggcaaaatagatctaaacactactagcaaaagtagacaagttggcatttatcatttgggagtccaaagcagcaagttttgctaaaaagagcgttgggagccatgtgggacgcacactgcccctgctcgctctctcgcatcccttaccctcgcacgctctctctcatccgctcccccaaaatttccccatctcgtatgcctcctcctctgccgatctcgctcaccgccaccgctcacgcccgcctccgccgatctcacccaccgcattagtccgaggcggagacggacggctccagcacgagggacttcatgtcgtagtccgattcactttcccccgccggcgggcacgaccccttcaccgactccctgtaccacttcactggatccggcagtggcagtgcttctaggataggcatggccgccttcgacctcaactccggcagtgatgggtggccaggaatggaaagctacgagggcctccttcactccggctcgcaaggacgcgacatcggcggatttgggagccacctttgggctggctcgcaaggaggcgacataggtagatctgagagccatctttgctctggcttggtatatgatacatttgtgtagtatcaatttgtggcttgcaagaagttgagcaacaacagcagcactcgagcaagccgctgcatggaatgcccgcataggagagagagcaatcaataaggtgcaattaatacgggcaaatcaatctataatggtaaaatgcaaaactctaccatgcctctaaacatctattccctccgtccaaaaatataacggattttggacggatgtgacacttcctaatacagtgaatgcagatatactctctgtcatattcatcatactcagaagtgtcacatgcatctaaaatcccttatattttgggacggatggagtaatatatgtcgtgaagtttcggtggttttaataatcgcatgctttgtgttagcttctcgcaggttagttggatgcttttaagcacgcaaatagaaatatctgaaatgaaaatttgaaaagaggatatgtatgaagccaaaacacaaaggctctgatgaggacatcctccactattacccgctggcaaagacgccaaagtcgggcggcgaccgtgtgagcttttgaataatcccaccttgctaagcttgggaggaggaagccaccttaaaagggagagccacccttcccctattggactagtcttttagggagattaggccttttcctgaatgggtgtgcctatgaactgttggggtccgagcaaccttaggttatttgttaaaggggtgggaatgatgaggacatcctccactattacccgttgttaaaccttgctaagcttgggaggagaaagccaccttaaaagggagagccacccacaagtcataaatatttaacgtgtatgatatgatcgaactcaatggattttttaatgattaattcagaaaatggtatgaatagatttgttttgaaaagtgcccataatatcataaacttattctgatagtacaaattttatgtttacctttttaaagtttggttaaatctttttctaaacttcgaaatattaaagacaagagggaatactgttttattattatggccaaatcttccaaccccaatgttgctactaacaactgcctctatcactttcgtggcacgtagatattctggcatgatttgattgacgagtttgaattttatccagttgtctcttgccagtaaggtttcgagtatatatattccggattatcggtccttggtggctgataccggaatttacctgataaacatttaaattcatttttttatggaggataaaaatcagtttgttttcttttcatggacctacctggttacctggcccatctggacccagctaatacttaatgggctcgacaaacgctggaataggtccacgagggtacagacgtccagcccataaaccacatcacgaaccatcagtgagttagctttacggcccatctaatggcccagaactaccttcacttgtccagtgccgcagccaggcccagcccaccgttcactgcgttgcaccgtaggtggggtccgcatcttggttcatgcggcacatgaagaaccaggtctacggagggtcctttaccacaggtgggcccccgtgttccacgccttgcactgttcacgggccccacgctcctcgtgattggcttttgcaccaaaagtggtcgatgcaccaggtctttatggaccgttgctgcaaaaatggtcagcataaaaagtcaattgaaaaaggaaaaaaaagaaagagagaaaaagttactagtagtgacagtcttgcagtcagccaaacacctctttgtttcaacctcacacttgataaggcacagtactcctatagacactgtttttcgatgttaatatcagtggatgattgatgatcaatgtattactactacgacatgattggtaagcattggatagataatattgtactacccagcagctcatgtaagccacaaccaaatctagattttgaattttttactctaggtgttatttcatcatttcatataacacattactttcaaaatctaccttattagctttaaatattacttactaaaatcataggaccgagattcaaatcctaccaattttatggtggaattgtatggaaataagatatactgtaagattagtattgttccgtcttactatgattgtagtagtattgtaaacctttgtcacggctattaatcgccatgcaaaagtatgtttcatatggttttgtttgaagaactcgagattctatgaaaccagctagggattttttttttgaaaaatgtgtctcccaactttagacttgtaaattataatctgaattttataaatactaaatacattacataatataagtcacaaccacttttttagatgttctatgcatgcatgcatgccattaactataacatattcttcattaaattactactttcttaaaaccttcactctcacactctctaactctattggatgtactccatatgcattatacatttattaagataattcaaagtacaatatgataataattatttcttgatctttccatattaagagtggctgtgtattatatagactagagggagtacgatactcgtaattttcgagttaagaatatggactagaatcccaacatttcgagtaaagctgctgccactcattaatcagagccaaagcaggaacatttatcgtctgcaacaacggcagcagagtggttaatgattaaatggacgaggtccatccagggagacaggcgtgccaatcctatcgtctcagcgtctgaccctgcctgaccagacctgaccagaccagacccgagtgactcatcaccagcagcaaaaggcaaaaaaaagccggcccgcccgaccgagccaaagcgcgcctcgtccccaccccctcacctcgccacagttctcgtctacagtatccccccccccccgcccataactacgcgagagccccaaagcccaatcgtctccttcgcctcgccaccaccaccaaccacgcctccgctgccacacgatggacgacgcgtggcccgcgcggtggcctccgcctccgcctccgcctgctccggcgccggcgacgccgacggcgacaccgctgccgagccag

SEQ ID NO: 10450 - DNA, 4217 bp, Oryza sativa
acttccatttgaaatgccaaaccgtattatcattcaaaaaatgaatcagcacacaatattttgtactgatgtttctaaaaagtatcgcgcagtaaactctgcaggtaaaaaaataggcaaaatgttgcaccatatcagctgactcgagaacaaaatatgtatgatgtaataaaactgtaaaacttggctatcttctgtcagacagaaactcatatccactctaccgaatcatgcaggccatctgattcgtcagatgttctcttgattttctctcaaaacctggaaaacatcgcagttcctcatgaatggatcatgtggtgatgggtatttgaaatggtcactccggagcttttgttgcgcagatcatgtactggcaaccaccccttgctcagaaagaggtacagatggcctccaagttgttccgtcaggaccgtccatgagggcaattccaacagcagccaattcttttctgatttcatcggatttttcatactgttttgcctttcttgctgaagtcctttcttcaattttctgaagcacctgctcctctgtcatggaagctcttcttagtgctttttcccgcagctgctgcagagcctgagaacagagaattgttagtgatgtccggtgtgtgaaggagaaaaggtttggctaatcacagtcatgtttactagagtagaattataataaacagagtgcctatggaaagtacaacttaaataccgtgttggaatttgattgcgctagctgccctgttctgggcacggatacattaattaagcacctataacagtggttaccacagtatctctttcatttccaaaggaaacacaagttttgaagagatacatttgtcctggctattcaacagtatgacagttgaagctcaaacttgaataaggctgagtggtaaaccaaacctgaccctctattgccttttactttctggaaacaggaacttaacaaaacaggaaaagaaaatggcaggaatccagttccatttgttagcaaaaaaacaggttgtactggttggttctttaagatataaaatttgaatatcttgattttgcatatttgaggtcggatacttgagtagacattgcgtggagtttaagggggtggaatataccctagaagacaaggtttaataaaacggcctgctggtgtggttttctcaacttgtcaccggacagtaaactgtgactttctgaaccttggtttattgaataccataatgtctatgacaacaaaatacaggagatgggctatacaagtgatcgtatcaggacagacaatgcatattcacagaggaaagaaacaaagtgtgttcttcaacagacaacaaaatatattcaaactgcttgggcagagttgataaaacataggctatgttacatagcactcacctcataatagcttgatggtagtagccctaggacagaaagcaccatccttattttctcttccatagcagaaagtgattccagccgtttttcctgcttctttccctgctcaaatatcagagaaagattgaaacattaggtatgattttagtattttacttgtggcgtgcgagcagatcaaatcatagatccctgaaagtcactaactgtatctccacaaggttttcattcgatttaccttacgagtatgcagcaagtcattcataacttttaatggctcagaaatagcagccagtgctactgaagtgtgaagatcatcagacattgaagtctcaaattcatcatggagcttctggatacaatttgtagtattaacaggtaatggatctccagccttgctttggtgctgttgacaactttcttcacaatcttgtagtgtctgtaaattaaaaacaaaaaacataaactctttaattaagagttatggcattgaaatatctcctgaagaaacagcaaaaatgcagcatctccctttcagtgccaccaaaactcaaaagttctgactagtcattcaaattgaagcagcttcccagtctccaggcataaaggttaaaccagaacttaagtgatcttgctttggctagagattgagaagcagcaaaagccagggctgcctggtcagaccatgcgtgcaactatagctatactaagatgaattcagtgctaccctgtgattctaaatttcgggccaattcacaaccagtttttaatcagctaagacaaaaaaaaaaagttcaatggacatttcaatttaagcgaaccgacttttatttggagtactgcagcttagccaagacaagtgcagatggcaagttgtatggggttaaggaatgaatcatggtcacagactcacaggccatctgaataatgatatatttggctttcaaaagataaaaatatggttcatctaattaatatatctatagactaaatgtgtatcttaatcttgtaaatgccttggcataaacataacctacacttgttctcacaaaaaaaattaagtaatgttactaattcatgcatgccaatttaaggtccagtgtcattccctctttagtttttacagtagcatagacacttttggaatgtgaatttacagatgcttttaacaaggcaagccaaagtacaaaggcctgaataagtcctagaagccaaataggctcaggatcatctttccaccaccccaaggtccggcccgactgttttgctggtagaaataaagcataaggttagtaaaactaacatggatataagaagatataatatacctggtaagtgtagtacagtctgtctgatgcaacattaagctgttctatggtatagttgattggggacctgtagtgtgtaccaagtaaaaacatcctcaaagcaagtgggtggtacagttccgtaacctgagaaagttggaaatctttgagaaagataaagcgcaacgattagacaaaaaatgaaagttatatagtcttactttgcgtatagtgacaaagttgcccagcgattttgacattttctggctgtttacattgacaaagccattgtgtatccagtaatttatgctgctgtcacaacatgctgcacggctctgagcaatttcattttcatggtgtggaaagatcaggtcctccccaccgccatgtatgtcgaaagagtggcccaagtaatgtgcactcatagcactgcattctatgtgccatcctggccttccagggccccaagggctatcccaagatggctccccatcttttgcagcctggagaaacataaaatcagctaatttgaaactgaactctctaaagaaatcttgaaattaaaataaataatttcctcatagaacaagagtacataatagatacacaaaaaatagaagaaatctacaaattgagaacaagacataccttccaaagagcaaaatcagctgggttcttcttcctctcatcaacagcaaccctttcaccagctctattatcatctaattttcgaccagataaatccccatattcagggaaattttcaacagagaaataaacatccccgccaattgcatatgcacaatcattatcaatgatctgttccaagaaatgtcatagataaaacatcaagctgggcagcacataaaacaattatattgcacagagaattcaatagcagcacaatattgtcaatcaggtgcaactgttcgtaactgcatatatgtgataacaatcattttcatattttacatgcttaccattcttaataacaaattgcaaatttataatttggaattggatgttctctgtacacggatcctatgatgcattaacaatgaaagaaagcaacacattatcaggtatcgatttaatggtgtgtgatgaatcatctctttctagatagtagtagtcaaaataaggaactttcactgcctattacacgaaatggtggatttaataggagaacaacagaaagaactgcataataataaaaattaagcaccataggaaaaacaccaatgatccatactgcatgcatattttacctgtttaatcatgtttataatctgatcaatgtggtctgaaacgcgaggctccacagatggtggtaaacaatgaagattagccatgtctgataggaagtcatcagagtaccttttgcttaagctaaaaggatcttctcccaattgatttgctcttgcaattatctacagaattccagaagtgcaactcaggtatcctgtgcagattagcaattggcatataaattttctttctaggtttc

SEQ ID NO: 10451 - DNA, 12345 bp, Oryza sativa
gatagctagtgggactctatgattctgaagggttggatgcccaagttggccgtgtccaccatgtccccatgagagaacgacaccttcatctgaatacagccaaagaagcaagacgttagttgtgtgctacaataaccaccatactttcttctataaatgcaatttatgagtgaaaaaatctctctaactattattgccttatactgtttgttgcagttccaaaagaaacttgactcattatcagacatggtatctgattgaaggtcatcattgcatggtgcaaaactggcattaggtatggtcaacaactcacttagataatattttaaaatgcaaatttctttatttttcacttctgtatgaatgttcgtcgggaccttggttgcaaatgcttgtttcaacagtataatacagttttgaatttagctaggagaatagccaaaattgcattctattagtggcaggaaagcaacagaatttgcaggtaataataacttaccagtcagggctaaagaatgatatccaccacatgctacttggattacatggagatttttcaggctagggataagctgtggcctccagtcactggaattgctccctctacccaattcgaagtttgaatttgctggaaatcgtatggaggttagacaaaaagcatgtagaaaattaaattaaagagtatctacacagtttgacaagaagtacatttcaggtggcattccttaaccatttaactcaaggtttagaaattctagacccaacatatgtgattccacttgcattaaaaacatatgtgattccacttgcatcttttataaaaattgatgggattaaaacaggagattctagaaccacgatcagtggagaatagatgaaagcatatcaaatcaatttgttcttgagatattggttttgcattttggataggttcactaagagccaactgaaagcatggagtaccatgtcagatgctctgttcaatacacactgcttagcttgagattattatagtaaaactatcaagccctaataactttatgcccagtctatgaacaaaggatctggaatgtagatgccagctagttagagggaaacttgtatattgccacaacatttcccggttagcaccttgcacagttgcacgttaatgtgaactgtaaggcattgctggttgctaaagagaagaaacactaatccaataagagaaaaagataaaatattccaagtgtttatacatactaacctccccaactccatagctgaccatctgaagtcagagccatagtgaaaaaaccaccacaagccacagcagcaactgaaacaggcagagcgttcaccttggaaggaacactgagagatccagcttcaccaggaccacctccacttccaagccccaacctaccatcgccttcatcacgaccccaagtgtagagctcacctgttcacaaaagccacaagatcagggctgaggcggtctgacaatcacaaaatgccaatattccaaagcattcaattgtgaaaggcagtggaagattatccacaatgtctttcaccctttcaggtttcagcaatcagcattaaccatgaactggaccaacctgagtcagtgattgccgcagtatgtgctccactggtagcaatgtgtgatatcttcccttcccaaggaccattcactttccttggcaacaattccctatggtaaacataatgccccaaagcaccaaatccaccataacccctgcagactacagtaaactgagtgatgcagcagccaaatccaataaatttgcaatgcattcttcttgcagttcatccagcgagcactcactcactcaagcatctattattattattattattattatctaatcacaccaaaaggaatttcaaatgagcaatgtggtggtggtttcctcaccaggtgaagacttccccggaggcggtcagggcggcggagtggatgccgccgagcgcgaggacgcggagctcgctgaggttggggttgtggcgcgggacgaaggcggaggactcgtccccgaggccgaggcggcccccgtcgcccttgccccacacccaggcgccgccgtcgacgacgaccgcggagtggaacagcccgcaggagatccccacctccacgccccccgctgccgtccccgcggcggcggcgtcagggaggcgtccgggcgtgggggagagcaccggcgcggggtcggggagggagaggtgcgcgacgggggacgggtagaggcggcgctcctccttgccgccgccgagctgccccgacgcgccgcggccccaggacaggatggacaccggggtggtgccgctcgagtagagggttggcgtcgcgctcgaggacgtcgaggtggagaagcagcgccggagggggaggaggaggcggcggaacattgccggcggcggcggcggcggcggcggccggttggttcagctgcgtgacacgaagactactagaactagacgaacagtataaatccgggttcgagggttcaaacccgttaacccgaatcacttagcgcccattaggtttctaacccgttaaccccgctctgtcaggttcgcgtgttcagacccgttaacgcgagtcccgacccgagaagagtatcgggttaacgggtgcatctctccaacctccaacaaaaggcaaccaccaccgcgccagcgagagcgaaaccgcggcggaggcagccatggcgaacaaggcgccggcgacgacctcgtggcggtggcggctgctgctgctgctgctcctcgcggtggccgccctgtgctggatccctccggcgatcgcgatggccgccgcggccgccgccgccacgacgtcctccggggggcggaggtcgctgctcgggttcgtggaggcgcaggggaactcctcctaccggtgctccccatccgggccctgcgtcccctgccaatactccgagaaggtcagccggttctatgctctgactcttgtcattcgatcttggggctcaccgtggaggggggaatcgatcttgggagggtgaaacaagagggacgatgttgcagtcctgcaattggattggatttgggatttttcaggactatattcctaatttatttttcgatgtagcttatgaataatccgtgttcttggattgctacaactgaagaagtgtgcacattaagaaacgatcggatcttgattaaagttaggcccgttttgcttcaaatctgagtttcttctttgactttcgttttggtttgcgtggtaatagttagtcttcggatggcacatatcactatatcaattatcaggtccaagttcttgatgccatttattagttggagtgtcattgatatggtattgattattgaagaagataatccttttacagtaggatttatttagctggtgatgtttagttcatctccttaatcactgtatcggtttgcacaataaagatatggccaagtgataatggattcagcgaacttgcttcatgtgtaatatgattgaggggttgctaccatgtgtgagcttgctggctttgttggaataaattcaaaataaaggactttgttgctctttcaagctgttgatgattctataataaatagcatttctaacataatgaaatttagttctttcatgcaaagatttataggaaagttgagtcttattcagcctttctagtgattatagaatcgtaactttgtggtttgtgctctagctgatgcattaaaggtgcaatattgtatgttagagtgtatcaaaaaagaaaggggcaaattttatgggttgagggaaatacatatattatgtttttaagttacctcaacgatttctttgtttctcatctttatgttattcatgatcttaggtgtatatcttgaagatacataaacagagttttctacttttccattgagtgggagatgaaccttttatagttatatgtccttttgtgcatatcatagaatgtcaacggggcattaatagtttaggaaaaagccttacatataaatgattccatttatgttatgcccaaaatcaccaacctacaaatattgattgaataacaaatggaatttatattacagcctgatggggcaggccaacagggtttgtaagaacaaggatgtctcgcacagtgcactttatctttattggtcagaatcgacacccattaactcttatccccagtccccacccccgcaactccttatactgtcctatcaagtaattaacttcctattaccacgtttcctggccttttagaagatgtgatctgaaaattggctggactgtgctgattattcgtagcttttggataattagtttacagggtgggattagttttcctggaccatgtgttcattcagaactcagtgtcttttccatggttatgaagcttagaagctacttatgttgggatttctgctgtcgtgcagatgactctactaggaaacctaatttgtatagttatattcgcaaatacatgtgccagagtctttgtgcactgtgctttccctgaccaccaatagatatgcctgctttcagctgctgctcatttttgctttttccttcatatttgtaatggagttgaatactttgtttgtgttgagtcagggctgaaaatatcaaattacctctgttgaagacaactatcaactattgaaatggcatgctgacatacaatttcattttcatttttgttagagcgatgagaagtactgttgcagtgaaaccggctaccgcttgccattgaaatgtgtagaagtacaaaatgttaccaaagaaggaaataatactaagcaacggaaggtgctggacgatgcatccacgtcaggtggttcaaagcattacacaacttacaggagttgtgtaccattggaggatgaagagaagttatctgttcttggttttgaggtattaaatcatagaacttctctctgttcatattgctataaagattatgcctgtctggctgtctgccatcaatttattccctccagcataaatttttgattacattaaaactgtggaagtagatagtgtaaagccagaaactgtgaaatatttatctatttttttaagaacgttgggacgagatttaacctatcacacttaaacaggagcaaacacatgaaccacccttttttctgtcagtatgtgcctgtctggagctttaatttctggttgattcagttgtgagtattgtcttgtttttttcttgtgaaaatactatctatacttgtgtaccctatgaagcaaagtgtacgtttctgacaaaactttattctgttaaggttatatatgtgtgatcagtgtgtcaagggttttagtcttgtcctgtattgtgtacaatttatatgttctttgagcctaatccaaaatatctatttcattcctcattttcctgttcttcctaaattaaacatcttcatggctcttaatcatatcatgattatctatgacaggtttttattctttcttatagcatggtaatttaaggaagtttatggtctttacaggttatgatggctggaatgctgctaataagtggcccatttgtatactatcggaaaagacgaacagctataatgcagggggcttcaaggatcccaacaagccctcctaggttttaagtatgcaatgatgaatcggctgctcaagctgatttggtgtaccattttgatgatttttcccccctatcaatgtactgtatttacacgtgctattgttgaagaagtcaaagtgttgggtagttcttacaggattagaaaagcacagttgctagtctcattgtgctttgttttcttgaatcaaatctttgtaatgtttatatgtaacaaattactttcgattttgttaccccaatgaagttgccctgacaaaggagactctgttgttggcaatcaactatttgtctcgcagtgttatctgattcactgcagaagtttgagtctctacgcaaggaaaggtgtcctcatatcacaatggtcatcaaaaattgttttggaataactctttgccttttggcttcgagatattatcttttgagcatgggtagttcagtaaggattttgtttagtttgcggccgcatgttgcctggtggtgtcatacctaaagtataaactatcttgtgatatgaggacaacttacagtgatatggggttattatttggtttgtgaccatcataagttaccttacagtgccattgtttggtcaaaataaccattcttatggttctttatcatacttgtgataaaatgtcttcttcatcacaaaggtttcacgtctcggtctcaatgacaaaatatactgccccgttctaacatgagcaaaattcctgatattttagaacggagatagtaacaaatttggtctcttcctagccaaggtgttgttagagtttcaaattgtaaaccaaatcctaaacggtttggtggtctccgaggctctaaaagctaaatttataacctataataaggggtgaaaatggttttttaatggacgatcctttagaatggagctatagtattacaattgtggtcaattgatttcgatggcatctggcaaaatctgtggtaaatatgcataggcaatagacatggtactatgtatcacataagattagtgtattacgatataggtgacaccgttctttcagttttatggattcaattctcctagcgatatgagagtccgattgtctctttacaactcagatgctaatagtcgatagataataaaatagatagatccgttcttacttttgtggtcaacaagacaaaagaagttcctgtataaatggagggatttttactgttcaaaagattcacaaagatcaatagaattagtcataaaatagcaaatatcgtaacagttgtgtcatgattataacttcatcaaacagatgatccatcatgatcaaccaagtttcgcaaatgatatccctttttccccaaacacgaaaactcttttgtgtcattactgcctctattgtctaggattaaattcgaattctagcagtaacaattttgagagttttctttacattctttttttttaacttctctattaaagtagttatagaatgtaattttgcgaaattagcagggactccagtgcaaaaaagggtgtccacaacacaatccccaattcccccgtcaggctcaacaccacactcgcatcgcatcccgatctgattgaatccgagcagcacaagcggcggcggcgatgggcggcgaccatggcgggcacggccacggaggcggcgacttccggcagaaggtatggagcatgacgggcgggccctactgccggcccgtgcactggcgccgcaacaccgccatcgccatgttcggcgtcttcctcgtctgcatccccatcgccatgaagtccgccgagctcgaggtacgtctccccgccatccaaaccctaccacgtagtactagtcacgcgccatgcttgtcctttccgcgtatctggtcgagctgatccgaaatcgctagccgggagatgtgatccgtggggaatggaaatgaggagcaaacaatagatagggtggcagaaacatttttgttggggtcattacgaatatgaacaagatttacgttgttgtgcatatcaggaactcggtgtgcagaagaagaaatggtaatagctctattgggaacctatggaatacgcttaactcaaacctggatgaaatgtttgagtaatattttcgtgtaatacctttgagttgctctgggtagtaaagtgcaatagaatgttgaattgttgatttttcttgttagaggagaagacattagatagggcaactgggagaaatgctagatataaaacaaaaaatgtcgtgcaattttccagttaatctagacaaaacttgaaatgaaattacttgttcccgttgtaaagcacatttgttctatgcacgtgacaggcatgcctgttcagttagttttgtactattgtgcaaacaaatgctaatatgttctagtggtagctgaatctattcaatggagttctgtaatcagttcttgaataccagtttctaccatataccatatggtggttaagattattattcctcgcttattagacaaactacgataaaggccaactttgtcagtaaatacataatttcatgagtcatttagtaattcttcttgatttcctcaaaacaatgagaaaagcttctttctgaaccccctacttggaaagggatttattccatgttcctggctgcattatgaccattcagtagtaggtgtgctactggtgggatgaagccatctaggataccctgtttttgttttgcaactagatctcaggaggtttgttgctaagagatcttgtagtggtatatgcgctgatgttcatttccaaataaatttgtggattgtccacaggaacttgcacgataaagtacagatgatctagtgtttacatttggtagatggtcttgataataattcggtttttcatgtcatgtgtttcaaagttgtcttcatcaaaaaattatacaagcactgggatgatgttgtcgacttgccatcagctgattattacaattattcttgtttttctgtacatcaatgtgtaactttttttgtggatagtgtttgctttctgttggtgaagagtaaatgaattcatctgaatcaaaaatcataggcaaaacataagcatttgcatatcattgttttgtaaagcttgacgtgtatcatgtcaacaccaatgcatgccaactgtatatctcattttcctctacttatcacaaaacatgaaatcttgctagtaggtttcctccccccgtacattcattggaatatatgttttcacacataataatttccattaagtaaggttgcagttgttaatgatcttatccgttcttttagttgtggaaagatgtgctgacagatctaatgttttgcagcaacgcccacatcacccggtccggccgatcccatctcaactttggtgcaaaaactttggcaagaaagagtattgaaggatgtctgaacttgcaaggaggactcctgtttttatcttgttttgtcataatttgttctcagcgatcaatgcttgaagaagtatgctcctacgagtatgcacttgatgcttcatgtaactctttcgacttatattatgtcatacaaggagtttgcctgttggtaactcaaaataaactcgtgacgcataagcctctgatggatttactttagggtttaatgctctgtttggatgattcctatttcatgcatttttctgaagaaatgctaacgtctcaatgatgaatttacttgatttttaaacgcattttgtttgcaagtagacttgggaatatgagtaacctggtgacgttgtctcctatgtagtatgaaccaagtattctcaaaggaaatacaagagactgttagtgttctgaaaagaaggtaaaattgctggtgtttctatcttaaatttgttcagtgaattacagaataattgtatacatttgagacgttgcccaagcaggagctatacaatgccttttcctagtgaaaggcgtaaagatatgagctgtgttgctaagcgaagccggcgatcagttgtagaagtggaactcggtggcggcgtcgccgggcttcttgccgacgacggcgaggtatcccttgtcgaagtcgtccgccgtcacggcgccccgcctgtcgcgcacggcctgcatgccggccttgcggcacacggcggcgatctcggcggcgctgagcttgtcgcgccgcgccgccagggcgtcgaggtcgacgtcgccgtccaggctcatccccgccgtgcacgtctgcagcaccagccgcttctcctccgggctctcgggcgccgtgaactcgaccttgcggtccagccgccccggccggagcagcgccgggtccaggtcgtcggcgcggttcgtcgccatgatcacccgcacgttggtggactcgtcgaagccgtccatctgggtgagcagctcaatcagcacgcgctgcacgtggcgcctggcaccgccgtcgtcgtcgtcgccgccttgccgcgccgccgcgatcgcgtccacctcgtcgatgaagacgatggccggcgccatgtccctggcgagccggaacaggtcgcgcaccaccctcggcccgtcgtgccgcgcgagctcggcggcgttcacgcggaagaacgccgccgaggtctcccgcgcgacggccttggcgagcatggtcttcccggtgcccagcgggccgtgcaggagcacgccgcgcggcgggtcgacgccggcggcggcgaagagctccgggtgcgtcaacggacagttcacggcctcgcgcacctcccgcttctgcgcctcgcacccgccgatgtcgtcgtaggcgacgcccggcttgtcggcgtccgcgacgaggaaccgcgcggccgagcaggcggcgacgtcggaggggggcacgccgacgagcgcgagcgaccggccgttcagcgcgacgttcgccgagggcttgaggaggccgcggtcgagcgagccggcgacgccgacgcacatcttcctctcgcatccgtcgcccagcgtcacgacggcgtggtgctcgtcgacgacctcgtcgagctgggcgacgacgaggggggtgaccgccgtcagccgcctgacgagctcctcgcggaagcgcaccgtctcttccagcacgtgaatctggaacagcgcgttgtcccgctgctcatccagcaggcagaactcccgctccagcgactccagcttctcgcgcagctggcgtccctcctcgtcgtcggcgtcgaggaagatgagctcgtcgtcctcctcctgcaggtccagcaactcgagcttctgttccggggaagtcttggcgttgccggcgccgtcgacgtcgtgctgccgctgctgcacgccggccggacacggccgcggtggtcggagcgccatcacggacgacgtccttggctgcgaatctgcgacgttgtccttgtgtcaaagaacgcatgcaatgcaagcaagcggtggcgcgtgaattataggaggagagctagtacaaatccgagtcggagactcggattccgattaatacatgtgagactcggattccgattaatacatgccaactattttttttctcccttgtaggtttgcaggggatgaagatgcaacatactgccattggcacttgtgtgttcaaggaacagtgcaaatcaactcgctcaggtaactaactgttcaaacgctaggtctttgattctctcgtcaatcctgataattgcagattttgcaaaatttcatcagatgatcagctggtgcagaattgtaagggttgaacttcagtttaccctcataccctgtctggtggcattaagggggcatcccagtggagaaggcctcgaacttgtgcaaacgaagaacagtgtcgaggccatggagattggagagggttcaatttattgagaacgggacgataaaagaccatggccagtggggtgctcaaaagatgaacctggtgaggattgtggcctgtggctgtgataattcatattggctttcagacaaaggtgtcaaacatccctgaactttctgctgcagattgttatccaccacctatttctgaacccccttgtttatctgtattccagacctgaaagaacaacatgagaaacaaattaacatgtatgtctaattatgttctgtgagttatatacatacattgggtgccactctaaacacaccttgctggaataagaaaacgtccacatacaacggtcgatctgtacaagctatttttctacagcaatttaccagtcatgtattaccttcacaatgcttgagcactgcagaagtggatttcctcatatggaagcacgctgctgtacaattaacatacgtattgtaacacagttaacacttgatatgagccccaaaactagacaccttcgcttgattgtatatctgtctcaagtgatcttcctactcccaggtactcttcagcaaaaagttcatcattttttgcaagcatgtctgtcagactgcagtctatctttctactctgaagtacacaaaaccgcggctttatcctcccttccagtgaataactgaagtaccttggatattctacaacagctttaagtggcttcttcatggttcttaacagaaattcaagctttggtttcataacaagttcaatactgtaacccagaagtgaagagaatctatagatcatcgagcacacattttttttagacaatcccatatccaagaggtagttgattctgtaaacattggaatactgttacatgcattgaacatatttggtagagtatcacatcattagccggtaagtccat

SEQ ID NO: 10452 - DNA, 12056 bp, Oryza sativa
attaactccttaggtttagcgaagtttaggcataactgcagttcctccggcaagtccctaaactcttgttagatgaagttctgtttgagttattctgctgctactatagaatatttattttctcatcagtcacggtattaacgtttcaatatttctgagtagctgatttgttcattcatctttgtcagatttttgtaactaatcttctttaaatccagttagtatatcgcatagttcatcaaactcttcctttattacacttgcaatactgaatttggcttctgatttcactctgcaggtcaagttctgcatgggatacagtatatggatttcttgtgcttcatttttttattatacattcgaagagtctgcttcctggttgtgaagcttttcatagaaacttattctttgcacagggctggagcacctttgcaatttggataccttagttcttgtttttgtctgctttgtcatgcacaggaagctgtgctttgttactggattaggggctacatgtttctgtggcctcgtaatccattgctggaggattggtggcatcctccttttgttttgtgggtattttgtgactacatgcctgttttgcaaactcaaattaggcttgtaatacgattacatttattgttattgaaagggaaaagaaaaaggtcagaaaaaaacatcatatctcagtcagctgacaacttgaaccatttttgcttcagtatattttgcatgctctatcaggagtatccgaaaacagatcagagctagacatcaagacagtagtacctgctgcacatgcatgacaggctagttgattgtgagagaacatgcatgtgttctctgtcctgcaagaaattttcttcagtggctgctgtaagggcaagttttataataggggtggttaccacatctaattttatccatgtaagataaaagatgatatatagaatacatcacatctacactacctctagcatactaattcaaatgtttttattttatttgtttgtccaatccactctttcttttatcttctttttcttggggtttgtgtgaaggttatcccttatataaggggtggctcaccttctctttcctcacttatttcttccaccttatcatacaatcttacgtggcatgtttaggggcaacacatctagcattatagtacttgccctaagtgaaccaattactccatgattgctccttcattattactgtacatttggaggtacaatgtgtcaggattgggcatgttacttgcaaccgagttttgcaactgctccatatatttgctgcatgatcagaccaagaggccatgggtggttctaccttaagttcagagttctgtgaactgaagaagacgagatgagtgtatcttacaacacatttcgattccactgatagcatgaaaaagatggaacatccatcaagaaatgaaaataaatatcttagtccatgtaatttgagtatataaggcctgggaagcatcggaaatttccacctcagtcaaaccacgtttcgaggtggatgatcaacaagtgtatggaaacattttccttcatgcgaggaaaaagtgtacccacagttccatcgctttcatgggtagcaaaaatgaactactttttgggtgaaacatgaaaatgaacaatgcacggcattgtttggttttgtggggacgggatgattgagtcacttaacagatcgtttgtttgaagaatgctaaactattgggaaaaaaaatagtgtcattcttcaaattttgtaggttgatcttacgatgatcacccattctaaagggttgtttaatccctcgcccaaaagagattagcaagaattaggctatgtttgatagtagtgatcggtaacctttctcctctgcacataatactttagcacatgactaattacatattagcttaaaaactttaaaaattagttaatataatttttatagcaacttttttataggaaaattgtaaaaaatacatcctttatcagttcaataaacatgtgtccgaaaaatgtgggagtagaagttggtaactggtactaaatataaaaatgtgggagtaatatataacacaccctcaggccgcgttattttcagcggttgggtttggatgattagctacacgtaaaacgagaaacgcggttagcatttaattagttaagtattaattattaaaaatttgaaaaataaatttatttgatttcttaaagcatcgtttttatagaaaattttttgtacgaaatacaccgtttaataatttgaaaaacgtgctaacgggaatagctaagctgcattagctgtttagaacgcggagaggggataagttcacatctactgtgggcttagggcatactccctccatcccataaaaaaccaacctaaaaccggatgtgacatatctactacgaatctggacatacatctgttcagattcatcgtactagaatatatcacatatggtcatagatttgttgtttatgggatggatggagtactcttaacaggtccctgccatgtggaccctacctgcagcagcctgagggaaataaaaaaatatccaaagacaaaaacaattcgatccagtagcttgacacccccacccactagtcgacgccctcctctccccgtgcacgaatcacgagactcacgaccaccaccctcgtttcggtttttgaatcgtcctccaccattggaggaaggtgacgcgtcgagggcccccttcccggtgggccccacatggcagcctcacgcccccaaaaccctagcgcacgaggcgagccgccgagccgagccgcgccgcgcgccacccaaacaccgagcccaaaaaccctaaccccccctctattaaagcctccgcgtgaagagaccaaaacaccaccaccaccgcgagacgacgcgagcgcacgcacgcctgcacgcgcggccgcatcggcatctctccctgtccactcctcgcgcacggtctcgaggtagggtttcgagctcagatttgggtgtttctctctctgaatcctcgtctgttcgcgacaaagttttggggggttttgagaattttttttttaaaattgtttgttgcagagatggcggcggcggcggcagtgtgtggaaccgagagggtcgccgaggtgtccgcgtcggcgtcggcggcggcctttgtggccttctctgccgccgcggcggagagattcctggctgtgctcgcgctcgcggttagtgttttcctcttcgcctaacgctgcgattagcttgcgatttttgttgctagtggcgctaattgttgataaatcatgttgtgttatgtgtttcatcgagggtttgacctgaaaatttcaagtaattaagcccgcagatctggagatatgtatacatgccttctctgcagaatttttggatttcgagggggtaattttggtgttctattgcctatctgcggggtagatctaagtagcagatctgagtagttgaaccgagtaagtttctggttggaagtacaaagacagcctagtccatttgtaacaagcttgctagttatgtatttctatgagagcgaaaactgtgtagttgaatggttggaggtacaaagacagggtagtgcatttggaaccatgcttgctagttatagtatgtattactatgaggaaccaaaaactaggagcacctggatgcctgacagcctgagcattcaacacattgttggtgacaattgtaattctaagctgcaatagggacaccatagctaatttcttctaaatagatgtttagttggcatacttgctatatcggtcattctgtagaatatactggaattctattaagagggatactagaaggtatacagggctatttatgctgtatattctactagttgggtgacttaatgggtatgattttagctgtatattctacagtcgggtgactgaatggatatgattttagctgcatattctactagtctggtgacttaaagatacaattttagcgtttccattcatcatgtcagtatgtgatgtttttcctgaagtatcagtatgcatcagtgtgttttgatgctacagaacgttttgactgacgttggcatataggtaagatgctgattggttgcgaactatctgttcaatttgcatctctttcaaaacactaattgtttctaatctagctctgtaaatgaagtttttgaagtaccttattatcaaatcccataagctattctctacagatttctaattcgtagaaagtttatgctgtaatattaaagaacagcttattagggaagcccctcaaaccagcttagtagaagcttccatactgtggcttttggactaactgtggtatatactcacacagatcgttggataatattttgtcgcattgcctgagataattccaattttataattgaacattttggcttttttggactaattatggtatatactcacgcagaccgttggataatatcttgtcatgttgcctgagatcattccaagtttataattgaacgcaatgatgtaatataatattaatgcatttctttctttttggcactttctgacgtaacgggtatctttcttagatggaagcggtaaatggtggagcagatatatttaatgaggaccaacatgcaatctacaagtaagttccctgtcttattatgtaataataatgttttctatgtaatataagatgttctttgttgctgattagtttactttgtaattaaaggctactcggcagaatcaaatctgaatctacccctgagaacaaggatgggtcagatgatgacgacgacgatgatgaagatgacgacgaggatgatgaaggtggtgatgatgatgatgccgaggaggacttctctggcgatgaagggggtgaggatgaagatgatgatgatgatgaccctgaggcaaatggtgacggaggcagcgatgatgaagatgatgatgacgacgatggtggtgacgaagatggtgaggatgatgatgatgaggatgatgatgatgaggaagatgatgatgacgaggaccagccgccttccaagaagaagaaatgagctagcctccttcatcctgcatctgcctcctcaacttgtttcagtctgttgtgctgtttagatgatggaacaggttatgggacctatgtagcttatggtttgggttgtttgggtctctcataggagtaggaaaacatttgacatctgatgttaagccgttctcttgtgttttgcctttgtgcatgtagacgtaaaatgctgcggtgtgttatttattggagatctgattctgtcatgcattcaagtctgattcttgttactttacctttaagtgtgacctctgtgcattgtcatgttgatcttcgaagccgcctccattcagctatggtttggtttgtacaggtccgtaatgttattttgtgcaactggtgaagctgaatttgacgtcactctttggcggcggaaaaaggcttcaactggacaaaaaggaataacagaatcctgcagacttttggcagagcaatgaaaagaacactcaaataagcaaggcactaagccactaaccaccgcaaaagaaaaaaaacgaaaacactaactttatccataatatcgaactggcaagaattcactaaatacatggtcaaggatcacgtcgtaatgaactccatcaatcatcacatatacccaaagatgtcatatgatacaacaaatttacttcttctaccgttacctgggatactactgcagaaaacaacgcaactccccgtaatggaaaaggaaatcgtgtcagaacgtgaaatgacactcgctacacaaaagcctaaactaaaattggccaaaaatttgccaatatccaatgagctgtattctcctgtccaatgtccaaaaatccaacgctttgccagggaaactacatctgacaaaattcttcctgaactgatcccctctgggaactgtatatactatttgccatccaagtcatgactcacgacgactccggttctgacttcgaaaactcctgaggctcactgctggcaaatgctagccagacagcagtacccgtcaggtaaaaaaatatcgaaggtgcgaaaagtgatatctgcacataaaagagaactatgagattagaacagttcataatgaaaaactataggttatgaagatggattagactgtgatgatgacatacactccaagaatgagttgtatcaagaagatagcctgttagtgcaacgccaactattccaggtacagcacctacagtgtttgtgatgccctgaaacacaagaaacaagttagagcagccatctgagactaagtacagtgctgcagctaatatcaagtacaaataaaagaactaaaacaaatgaatctgtcgagctttaagcacacacactgtgaaggattgctcttatttttcaattccttttcaagaatacaaatgaagaaaaaatgagaggacagactgatgctgccttaccagcagaatgcttgcatactcacgagaaatatcttgatgggtgcaataaagacctgtttatcaaccagaatatttagctttagatcttgcaaacacagaaaatggtatgctcatgggaagcttaacaacatgacctgacaatgcgaagctggagagtgccagaccacttgtaagaaaagcaacaatttcccacggtggcacaccaagatccacagaggaaagcatcatgaaagttgcaggtgacagaaatgcaattgtttgacatatctttcgtacctatagaaaaaatttaacagatatagatactttaatttcccgcaatagatagctcactttccagttctccacaagaaaacagaacatcctgtcaggatacagaatataacacaggcacccctgacaagtttactattctggcctttacaaatgattcctagaattatttacagaaccacttcctatttcctaaagtaaatataaataaaataaagagaaaaatcattttatcatcagcacaaaattaagaaagtaaaggcctgacctttgtggtgtctactccatttgatatcaagttgtctgcaaaaggtgcagcaatagatgtaatgatcattgagcccaaaggaggaaggactgacacctacagcaaatatgtaaaaccataagctctcatgacagaaattgcattcatcaatgaaaaataagggaaaacagactttccctagtgaggaggaaatgaagcattgaatagaagaatctcactacaattttaaggaagcatgtacatacccatgctgcttcagtcaaattcaggtccagctcctcactgcatatcatttgaacagtaatgaattgcaagaacaaaaacatgttatcggcataaacttggcattatgtattgtacaaatagcaaatgatcagaccatgatctttaaaaaccagtttttttttttggaaaaatcaaatgcaaaattctaaaccatctattttttgtttggtcctattttcgtagtcaaaccattttcataaaactgaatcccaaaacaacatgtatggacatttaagaaaatgactgaaatgaaagagaaaacatggtcaatgaaactaagcacttcactctccacagcagcactaagttgatagctgctatccaactatgcactactcatttaaacaaaatagagacaattaatctacactgagccaaaaagtaagagaaacaaaatgtcaagacctgtgtaaaacaccaaagaccatacctaaagaatgttggtagccaagacaagcaagtatagtgcccccagcttccacaaaagtgagcatatatcattgcccacactgccttgcttttgaaaaattctctccaaggaacatcctaaagaaaaagaaagttgcaatgttggccgcataatcacatgtataaagaactctacttcaagatttgtctagagataataatgcactaaaaaattttcctggtcatattgcaaaccatatttgtttatttgggaatgatcacatctgcaacaggtgaggtgaatagaatctcgaaccattcgaactagtagttattcagtttggtatattttatgaacaatagagcatcaaatcacatagtccccatgccatgattttgatactttgacttcacaaatgacccaacttgagaacagtcttgtaacttaatccatcaatatacttctaggtcataacagagattatggcagaactatttcatctggtgaaaaatagaacctttagtgaattcatcagctctcccaatgatgactccgatgattttggagacacagaggacgagatgaggtcacttgatccagaaggactctgccccaaatcttgtattacttgtatatcttcattgccccttaactgttgttctttaagagattgaaaccctagacacctatgaaaaaaatgaatgggaagttaaacagaataaataatatttcatctgcttattagagatgtttcctcaccaaataattccaagaagtccaaatatgtaaaagacagattcccagccaaggttctgaataataggtggggcgaacaatagtctgtaatgccaaacaatgtatatggaattaactatctggcagaattgtgaacaagcgtgcatatgtaccacaaaatacctgaaaacacataccctaatacgcttccaaagctcaaaccaccaaacacaacagcaactgctcttgatcgttcttgaacagggatggacctgtatgggcagccataacagttaaaagttatgaaacaatagtccatgaggatccaaaaggtcataacagtttggtgtttttgttctatttttatttttcagttagggatcaggcacaattgtacttactacattatgtttaatataattaacatctcagcaggaagaagagtcaaatttctatgggattcctgttatgcatacaagtaatacaaagttccttaataaaaatctcaaatatagaaagccaatgacaactggactactattgtgaaatgtacgtacgaatcactgtgagaaatccataagaactaagaagcaggaaatattatttttatgtatcattcaacagctgaaagtaaaaaaaaaatgtaaccaccacttgctattctgcacagttagctacaaaataattcatctgaacaactaaaatttcaaacaatagtcatgaaaaatgaagacacattagttggttacatcagattttacaaaccacaaaatttaccatcatacaaaaaacacagggcggcactctaataaaaaatctaataagcatatgtccagatgattagatattttagatggctaccaaattagcactaagaaaatgaaaatggtaaggatgtttttaaggaaaaatgtttactcaatcttgccttgcaatcaaatctgtagcagctgatggtgatacaccttctccaatacctacctagcagaacaacacaatttaaatagaatatatgttatataatgcaaacataagaaatacattgtattttttttattacgagtcaggaacactcctatggtactgaactgaaaacgtggcaaaaaaactagttaatctcatctatatggagtgacatattgcactggctgttttattttggtttgctctgcaccacaactgtttatatccattattctagttcatcagcaatccgccacctcgaagttttcattgtctgataatatagtcagtagtcacatgcatgtttatgaatttattttttcatagagaacccaatttctcctaattgcatgatgagtggcttctcaaactagcagccctcactgtcttgcatatgctttcctcagacatggacaaattataatgtatcacaacttttcagatcaacaaattataggatagagagattaattaataagtagaggtataccagaatccttgacaacacaagccctggcataaaccctgctacagcagggataatggcagttgccaaagaccaagccacaactccaatctcaagtactctcctacagttagcacatgagataacaataattaattattacaagaaaacaatacatagatgaacactaagaacctttggagtgagataagataatgagaaagaacaagggataaaattataggaagtgcctctgagctatgcaagataggcagaatgattctcctgaagtttaaaattgctatatggttcttctagtttatttgaattgattactgctgctattaaatcattgtaactaggaatttactcaaatttatagttaaaataaacaattgggagtaaggaaaagggtaaaataaatgaagatatgtaccatccaaaaaaaattatgacctcgtactgctatttgcaattttgcttactaccaacttaacggatcattctttcccataaaggtacacaaaaaaatccgtaagatatcctaattcctaacaagatgggttgcagaaagaaatagccattatcatcatttgcatttattattggaaacatgcttatcccggaagcaacagcaaccaccaaaaaaaagcattgctaagatattaaaacacccatgcagatggagaatcataggtagcttttgtatttgtctatgcacaaggggggttttgttaccgcaaacaaaccttccgccaaacaattttgctagccatccacctggcagttgactcaaagcataaccccaaaagaatgacgattggactaatccagcagtcgatgagttccaaccatactggtgtgacattggtataattgcaacactcaagttaacctgaaaactggagtgtttgcaattagcaaatattcctaaggaaagaaaaatgaactgtccatatggactaatgcagaagtgaagtgtatatcaagaccaactaaaaacttcaagagatcatgtaactacgagtgagaaaatgacatcggcctagttagtagtacaaacgactgctagaatgaatcttgccaaatgtattgtcatgtttaatacaacagttatcacctgtcactaagcaagtaagaagactgttttcagctgaggtgcaccatgcatactaataagttctctgcttgcatatggcacatttaacataccgatggacaacttctaagtggtaatagcaatacatgctgaagatccactgtcacgctttcttcattatttatgatgcctagttgcctactaactgcctaccaccaaatggtgctgttctattttgttttctcttatgagtataacttagtaaaacaagactagaagcctagaacaacaacccagcggtctcactccaattcgagtctccatattccttttcctgaaaacagagctacactctcactctcaagtagcaaatttacaacgttgtgccatgctcagattatggacttattgttttctgcttcgaggatgactcacatattcattactactacagtgagagcagacatcacctacggaaaattaagcacagaatttcaaacaaggttggagactgggggagtacgaccacgcgcaccttgtccatgttacaaatgacgaaagcgagcgaggtggcgccgatgagcttgtaccgctcggccagtccctcccacggcggccacctcatctccaacgccgccgccgccgccacatccccctccccctcctctaccaccttcgctcccctctcctccccatcctcctcctccgccaccacccccataaccggacgcttctccagggcgcccgcgagaccaccaccaccaccacctccgcctccgcctcccccgccttcgccgggagaggccctcacggccgggggccatcggcggcgacgccggtgcgggagaaggagcagagccggcggcgcgtgcagtggcgggggcatgcggagggggagccggtgccgccggggccccgccccgaccccgacgaggaggcaccgctcggcctgcagcgccgacgccgacgccgacgccgccatgctcgctcgcgtcgctcctgctcggcttggaaccgagctaatcgagcgagcgagagagagagatgaggagtgtggacttgggaattttcc

SEQ ID NO: 10453 - DNA, 20662 bp, Oryza sativa
  unsure (1)..(20662): unsure at all n locations
gccgccgccgccacaagcagcagccgcattataagtaggagggcgatgacgattagtgatatgaaacggttgggtaaagctcgcttcaaattcagtttatgcatgctatttatgcttgtgcttaattaggaagctcatcacaagcgcgtggcctacctaattaaatcaagctgatcatcaatcacttaattaatttaattcagagatatatccggatgtttaatactcctagttgcttcattgcggcaagaaaatggatcctcctcgacgtccgcgccttcatcgccgatcgccggaacgccatcaccacggccaccgagctgagctcagcaggagctccattgaggagggcactgacgagacgaggccatcggctctgaactttagggatcactgatctcacgcgatataaaacttaaattggtcctagggagatcacgaatgtgttcatttcgcgttaagattataagtaggtcaaccagcgaaccaattataggcaacctcatttccttgttgttttgtgcttaacaccatattatgaaactttcatcatttctccaatccttcttatccacggctcatttcaatgcaacttctaatgtttcttagccatgttgcttcttttgtttaaaggacaaagtctgttttactcccataactatcagccgagtaagaggttttagtactcaactataaaatcggatattgtatagacctcgcaatgcaactgtccaaaaatcgaacaagttcccctcgaatggcaataaggttgtttttgcaaagttggcatccaaataaattactaatatacttttcactaacatgtcacgtaatttcaataagcaagatagtaataataagtaaaagacacagtaatccatcccgttccagatgggctgaaaataaaactttaactggcgggccgttcgacttatgggccgattatcgttgggcctggacggcccatggataaggacgatccccatctctccggattccttctttccttccttattggggaaaaataaaaaagaaaaaaaaagatatggtacaacaaccgagagctcgctagtcgtcgtcctcgaaacgctcgcggcgactccggtggctgccgcgccgccgcctccggccgccgtaccagcctcacctcgcttcggtaatccctcgcctcactccatccatccccattccccaatctctccggctcctgcttgcagtagtccgctactcctacgaattcgccgccctcctctacttgttgatttggcctcttggtatggaattgagatcgcgaaatggtgcctccatccttgctggctgggcttgggtggtcgatttttttggggtgcttggtggttgatttggtggtaggatttcgtggtggggggcttaggtcattcacggtcaatttcgcatcggcgatgcgtttttcagttgatccagtagtttgtttcctctactggcgaatcgtgacaaatgtgtgacttgtttgggatatgctacggcaactcgaacctttagtcggtttgaacgctggtccgctaatccacttctcagtttcttttttctttttaatttttgggtctgtttttgtggatcagtttctactgattaggcagatctgaaccttgctttgagaccaagctaaagtttttctctttggacggattggcgcagagaaattagttatcttgtttctttttctttgccaaatgttaattaaccgcagtgaaggattagcctagtaacagtatcccatgaatgattaagtgcatgacttaatgacaaaatattttggtgctgttattttgttcttgtaaagcatgatgtttagaatagccatccattcctgttctatatcctatgctgtcacgtagacatgatatgttctccttccctgctgaaaaataggcttgcaatcagttagtatttgcctgatgcttgtttgtttctttcagatggaggatggagtgtctacttatactgttgatgaggctcttatttccatggggtttgggaaatttcaagcatttgtgcttgcgtactccggaatggccaagatatctgaggcaatggaaatgatgcttttgtcatttgttggacagtcggttcaagctgaatgggagctttctgcgcaggcagaatctctcatcacaagtgttgtttttgtaggtatgcttgtaggagcatattcttggggcatagtctcagacaactatgggagaaggcaggtcctttactatttacattccactgtttgtcagatttatttgaaatcttcattacaaatctctctccctaacaatatacagctattcctattactgttaattattgcatatttatcttctaatagaaaatctaggtattggcattttaatgagtcatggtgctcttgaatgatatcaaatccgtattatagatatgatagtacaactcttcaccctatggctttactaaatacgatgtcttctgggatagtcagattaatgtaacccttgctagagcttctttgagagactgagagcctgagagacaagagcttgtgtggagtttggatgtaggcctgcaaatccccatatactagactgttcccacttttcagtgacaatgagtgctacaacccagctgattaaccatatagcaaattgacagagacaatatcatggttaggaggaaaatgtgcatgacactagatgacaatctgaaattcattttacttggggattcttctggccttccagtttttctaaaaaagttccaagatactccttttaaattttctgttcatgcaataacaagaaaattacttggatttcataaggatcactcacagaagccctctacagtacttaatcaccttgagatgatgttttcatacattgctggtgataattttaatagccagttctctcattaatctaaaagtatactaaaaatacgcattttacaggatgtaactttatttttctgactgtattcccttgatacttttccagggttgggttcaatttcacagcccttgtaactggtggggctggtcttcttagtgcatttgcaccaaattacctttctttgatcgtgctgaggtttatggttggtgttggactgggtggtggaccagttttatcttcctggtttttggaattcattcctgctcctaaccgaggaacttggatggttattttctcagcattttggaccattggcacaataatggaagcttcactagcttgggtaaatttctacattttgccaaagtaatactactgtttgcaatctgccttgggtcatagtggttcaactgatcatacaagtcagttaaacagaacgatgcaacatatgattttaaaacagtcgctatatttattaaaacagtggagattgatgtaattgaatttctttggttctgcactgcagcttcgatgcatgtgtttctgctaccctgagtaaatttaacagtgataaaatattagaatagatcagatcccatggaacagaataatgagcttgcatttggttagtcagtgatgatttatgcatttcatataatgtaatggaaactgcaatgaacaatatgttgccttctagtatgtactgatgtatgctccaaactgtcattctaattttgtaggaacttattatttgtttaattttcaggctgtaatgccaagtttgggctggaggtggctgctagcgttctcatcgttgccatcatttgctctactactgttctatccactgacactggaatcaccaagatacttatgcatgaagggcagaactgctgatgcggtgcaggttttggaaacaatggcacgattaaaccgtgtagctctcccttctggccatcttatgtctggccatcgaatggagctccatgagttgacagattcctcagagacatcacagttgctttctgctaagaaaaccaaccctgctgctcattctagcaaaaccgagattgggggccgcaatgcgattttaaagcttctgtccccaaatttaattagatctagtcttcttctttggactgtctttcttggtcatgccttcttatactacggtcttgttctactaacctcggaattgagtcatggaaataagatttgtggatcagaggggatagtaacaatgcaaacaaaccactcaaacgatgctaatctgtacagaaacgtgttcatcactagctttggaggtacatgtgtttcccccttaggctttaccatatttcttgagaatgttctacttcatgtaatcacattcatatcacactgttgcagaggttcctggccttatactatctgcggcaatagtggacaagattgggcgcaaactctcaatgtcctctatgctttatatcagttgcctgtgcatagctccccttatggtccctcaaacagagtccctgacaactatcttcctgttcggtgcacgcatttgcatctccgcaagcttcattgtcttgcacatctatgctcctgaggtttgcttgatcactcccaacatccccaatacttggttacatcgcttgcaacaataaaaagggaaataaaatcacaaaccattgcctcatgtattatcttctttccttgcagatatacccaaccgcagtcagggctaccggagtcgggtttgcgagctcaatcgctcgtttcggtgggatcttgtgccctcttgtggccgttggtttggtgcacgcgtgccatcagactgcagccatcctgatattcatcacggtgatgctcgtctcaggtgttgcagtctcatactttcccctggaaacaagcggccggaaattgagtgaccacatcgcggcgtaagagctaagttgcgagcagaatctgacagtgttgcaagtgctagtttctttagctatacaaaattacaggattgagctcctagaggccattcagattttttttttctttcagttcgtttaaagatcatatatatagaatagaaatgaaagatggtggatttcagattttaaatgtcattacattgttttaaccagacatatgtaaactgccaaatcgagatgcttgctttgctctcttgaaatgggatgatcaatatgttttgaaggaattatagtgcgtcgatcccccttacgcctcttttctttttgcaacagtactgtatagttttacatggcttataatattatagttcaaaaaaaaattcctcgctagaaataaaaagtgttgttcagaaaacgttcggtacactacaggcaatagggggaaaataccagtaaaaaagtggtattgtactatttttttcttttcttttttattttggctgctgcttaattaatgggccgtgttgggccggcccactgacagttggcacggccccacgcgaggaccagatttccaaatttcgttgaaacgaaacgaacggcttcccgccactctcggcttcctcttcacgttgctttctcccccaacctctctcctccctttttccccaattagccatgagagagagagaggggaattggtgaggtgatgctgcgtgtgggggatgatcctctcccagctgggaggctcctccgtccgtgctcccctcgctgcgccgccatggctcgccggtggccgccactggtggtcggcctcgctctcctcctcctcctctccgtcgcggcctcctccgtggtggccaagaccgaccagcctgacggtgagccaagttttttctgcaatttttgttttcagatttttcattcggtttcctctctttcaatcgatgatattcatggattggattctgaaagatgtggtttcctgactgtttgccttctctgtttcagttgctgctctgaacgtgatgtttgagagcatgaacaaaccgtctgaattgttgggttggaaagcgagcggcggtgatccgtgtggtgatgacgacgagtggaaagggatcgaatgcagcgattcatctgtcacagagatgtaattcactgcagcactttttacctttgggattcttgatttgcttgttttttttctttaaaaaaagacggatgaacaggcgcacttctgaagaacttttctctttttcatacaagatgttcacttcagtttgctaatcgcgttgcatttgcatagagcagcaacttgtcggggcttggattaagcggcacgctaggttatcagctatcgagcttgaaatcagtaaccaaattgtgagttgcccctgtgatttcctgtactgatcatcctagttatgcaacttagtgaattttttctctttcatagtacagcgatgtcagcaagaacaatttaaatggtgaaatcccataccagcttccaccaaatgtggttcagttgtaagtttctggatttgtccatacgtacttgctgttttcatgggtaatacaagtgtttttttctctagcacttttttaaagggttttcttatattctcttttctctaatacagaaatcttcgaggaaatgccttcagcggtggtgttccttattcgatatctcagatgactgatctggaaacgctgtaggaacttttcattcataccactatattagtattttcagttgttttgttttcctgtacttacgcatgattctgatatctgttttgttgataacttgaaatcttttttccccatggattacagaaatcttggtaagaatcaattgagcgggcagttgacagatatgttttctcagctgccaaagcttacaacaatgtaagcatgatttataagtttttccacacaccaaagaaagaaaaaaataagagttctctgtactttttctattacatacctacataattgtaatttcgcgcaatgcaaagtaatcatggtgccaattctcatgttacttctattgcccaaatcttatatatcagttgtgtcttcagggatttgtcattcaatagcttctcaggtaacctgcctccgagttttcaatacctcaagaacctcaaaacactgtaagaaactgaattttatgaactatagtaattcatcgataagttattttggatgctcaattgactgccattgtttccaaaatatatacagagatgtggagagcaaccaattcagtggtcatataaatgtgctggccaaactttctcttgaggatctgtaagtgctattcaagtgaaaactgcatccggaactactcttatcattgtccttcaaaatatattattcctaaatggctcacagcggcaataccgaagtattgatgttatcaaatatcaagagctgttaataaaatttatttttttaggcacaatgcaatcgttatttgttttctatagcttaactacattacttaaaactcataagtacaatctcaaacgtatgaattttcttaagcacatcagttaggaactaatctagaatggttttcctccttttgttcccaaggaatgtgaagaacaacaagttcactgggtggatcccaagtaaactgaagagcattgacaatttagagtaagtgggacatccagtcaatatgcctatttttgttgcacttgtgaaatctgatagttctggtcacatgatgaaggactggtgggaactcttggtcatctgggccagctcctcctggcatggagaaggagtcttcggcaggaagctcaaatggaagggatgatagcggaatcaatggtttcgccattggagcaatggtgatagctgtgcttcttgcagctctgattctcttgtctgtgctgaggaggaatcattcctctcccgtctcatctcattactacacggatgagtcaggtcagaaccaaccatttaccccgctagttgatgactcgagaagtatttatgcacactgtatctcttgaattatagaaaactacgtgggttcctttcagccgtgcatcattttgtgatgtgtagggaactacgaataattaatgtgatatgtgattctggtaatttaagtttgagacgtgcactaagagttctcatcttgcttcattttctaggccgtaggaattcttcagcagtcaacatgaagtcactggagcattccccatcgatgggctgtaagacaccgcctgctgttcctcgcaagtcgatgagtgacaatgagtttgagaacaaactgaatcattcgaggcgaagcacagaccccatcagcttgatgaatcattcatcatcagacctacaagcagctactggcaacttctctagtaacagacaactaggtcaggggacaaccggttgcgttttcagggcaaaatatgctgatggacgggtaggctcctactgtttgctttctaagatctttccaaataaacttgtttacaggctcaattcaggtaatcatctgagtaaaaattgaagtgacacaaagatcatgtcaaatatgcatgtaaaacacattgcagtaaccaaattattaaactgaactagatactaaggtctcaaagaagaatgcttgaagagttcaaagaggtcatataccttgaattatgtgtgtactagctcatcaattaccatgaacaaatttcaggtactggctgtcaagaagtttgatccattgagcttctcaggaagcagtgacttcatggacaccgtcaacggcattgccaagctgcgccatacaaatatctctgaacttgttggttactgctcagagcctgggcactacatgctggtctatgattaccatatgaatggatccctgtatgatttcctgcacttgtcagatgactacagcaggcctctgacctgggacacccgagttcggatagctgcctgtacagcccatgctctggagtaagttgacaagtaggagtaacattgaatcctagaatccaaaaatacatcaatttgaattcatgtgtaagattgtatccctttcttgtcattcattcaggtacctacatgaggtctgttcacctccagtgctccacaaaaacataaagtcttcaaatgtcttgcttgatgctgatctcaaccctcacctctcggattgcggcctttcattcttctatgaggtttgcatgcagagtggctcttctttaacaattgatgaacaaagtataataattgtaagaacaatgtggtctaacggtagggaaatctctacaggacgcaagtgagaacttgggacctgggtacagtgctccagagtgctcaagaccatcagcttacgtgatgaagagcgatgtctacagcttcggagtcatcatgctggagctactaaccggccgaaagccttatgataggtgaattaagggggcaaaaagataaaaccttgaaattcactactgatatccataatgtgatgcatcatctaatgtctgcactctgcacattatgcttactttctctatgtggctgtctgatggttctacagctccaagccaagaacagagcagtgcttggtcaagtatgtggctccacagctccatgacagcgatgcgttgggatcactggcagatccagctctacgcggtctctacccaccaaaggcgctctcccgcttcgccgattgtatcgctctctgcgttcaggtgagctccttattgtcgaagagatatccccatcaatgtgctccatgtctgaactctgaagtaatttcagacatagtatgctatgtcattcaacctgagtagcaccccaaggtccttagttcaaatctatatatgagcgaatttcatattggttatttgagggctaagttcctaactttataaaggctgtatatatccggttgaatgtagagtctaggtaaaaaaaaaaccttctattaaaaaaataaaaaaaaaggtctgaactctcaagtcatttcagacatactatgaagctagtagtctgaactctcaagtaacttcagtacagtatgaagctatgtctgagctctgtactgtactgataatgggaaatggggggtgggattgggattgggaaatgaatgaagggttaggattaaatagaagagggagaatgaatggttaggatttaaagatgggtgggaaatcatttccctttcccatttgccaaacactacctgaagttactgaatttggtcttgttggtggtgatgcaggctgatccagagttccggccgtccatgtcggaggtggtgcagtcgctcctccgctgcgtgcagcgcaccatcagcaacagggggatggccggatacttaagcaactcacagcggagcgacatctccgattggtgatggtgatgcacttcaccgaatcattgccgactttgattgaggtttatctgaagcaaaactgcccgtcaagtcgttcgtgccattgtacaaaaagaaacggctttgaggttaagagtaatcaaattggttaatttttagagaagacggcaagaatgcgttattgtattctacttgtagtgtatattgtactgatttgttcttccccctttgttttgtttttatcgctctaaggagcacatgtaaaagtctgatactggagtagatagttagtaaatgaatacacatgtaaaaggcctctctacctagccacctaggtaacagcaagttcagtaacaggcattgctgacatagcatgaattcccttttgtaagatgacaaaacatgaattcacaagctcaatgatcactacttatgagaccaaatctcacaacacagctaaaaacagccgtttcctagcaacagaagatccaagcttaactagcaaactatagatgaatttgcagaactcatctagtcttgcacatagtacccaaaccgagtatacattgtcacacagattacagggctacaacaaaatgaaatgggtgcactcaatcactgcagcatgacattgaagtttgaacatacactagggggtacattgctaggggaagtatttcacatcgcagtggccatgatagtttcatttcctctgcacactctactcaaaactttcctacaggagagaaaagatgttcaaattaagtaacagaacagatgagatgcatccaggcattttcaatggacaatgtagattacctgcatggtgcaacctcacagacttttgtcagtttaaatgcaagctgtgcaatggcaattctgattgctggctctgtagatccacttttgcagcttcctccaataaagcaaggaactccttctgtgctctcacagacacaaaaagttgacttggcttataaatcatgctcaaatccgctacctaggacaacaataaaacccacaatatgaataaagcgtataagctttcttggcattagcagttattgcgaaacataaatagactacaagtgaactacctgttgaagccaaggcaatgccaaatcaaacatttttttattcagaaactggccagctataaccctcaaaagttcacttgttgtttcacgtgacaatttctcaagaacaggtccagttctatccattacgtcaatcagataatcacagtcaccactgttcagggcttctacatatgcagacgccatgtcatcattaccatcaaattctttagaagcacnnnnnnnnnnnnnnnnnnnnggctgctcacaggaattggtaagtgaaactggaaagtttcccttaacccctgatgctcgagtccttgctgagcttggaacatatcttcccagagcactttccgatctcacaaccccaggctttctagttttgtcatgagtatgactctttagaaattccccctcttttacacccatgtttaagccctttgatggttgatcttgcatccactttttctcttgtttcaaatgaggaattggtggtggcttatagttagcatccacagatgatctaggtgtagaagtagaaaccctcggtgaagaagtggcactttggttcttaataaacttggaaccaggaaggtgatagcggctttcactttgagtaattgtatacacagttttgtctacagcattctccaaattatgcactttcatgcttaatactgacatgttctccactgagttagacatgaattcctgcacagtgaaagaaagtaagcaattaggacaatatttaggacccccccccccctatactttcattacataattgacttgtgcagtgctctttcctacacgatattatggaggatagcaaaagacaatcactggtatgagttgaagatcatgatgcctattgtcattatcaatttccctttttgtttaatctggcaatggacttatatatataggtaactgaaatgcacagagcttattgattttcaaacaatataatttccctcataactttaatcaaaaccttgctattacattctgaagaaaaaccattgctgaacttaacaatcagatcacatatataaacatttttccagaaacaaccaaactatagagagtagaataaaaaaaacaacacaaaataacaagaattacctgcaacatatcaaagatatttgcttgcttcctctccatctcttgaagctgcttcctgatatgagatagttctttcattgcacccaaacagcaagtatgtgtcccatgtgaagtgatatctgtaacagtggagtctatgctcttactcttttgagccctggggaattgctcaatgtctcttgcagaatcacaatcctcaacgcattcctgagcagaagtgacatgctttgtctcacaactcctgctggctacttctgacatagaggagcaatcttgtttatcatccatggggtcatactcatacttgctgtcattgtctacgatttcatatggacttctatttgaaccctttagcatggaaccattgccagacaccttttcttcaaaatcaactaatggtatcatattctgcttaggaacagatatctcaacatgccaatcgctcaacttcgagcgttgctgatttgcagcattattcagggctattttattgatagacagaggagatctcttctttgatgaagtaatagaattgccactgattgcagaaacagaagatgcaggatcaactctcctgaaagaagtgtctcgtgatccaccatcatttatacttctaccatcatgatggtcaccaaagaagttttctgccataaatgaaatcaataaacaaaaaagggagaaatttatgtggctgctgtaaacttcaaacagattctatgttaagctcgtaaaggactaacaagaaaatttaagaaaagagaccatagagatctggaaatctggggaaaaaaatcctgatccttggacagacctaagcagtagatagacttggcatgcaacaagcaacattgaatagcaaatcattgataaaccccttatcttttggggtcaatgcactagttctcaagaaactaaaaagtattatgagagtacaaattgctaaaaaaaacaaagggattagtattgtcaacaagcttcagaaagtagtatccaatctcttcttttaatttgcagaagtcagaagatcacaccaggccaaaaatctacttataaggattgtaataccttttgtggatgatccagcttctgatggctcgggagtatcagaccctggaataaccttccacaactgaatggcttgggtaattgcatcacgcactggtttgacctgtgacagaagtcagaaaaataagtgtagcatatgcaagaaaatattacagcatgaatgtttagtatgctgaccttgtcaaatttagaacgttcaagggagcgaaggcaggaagttctaaaggaggcaaccagatatccagaactgagagcaatactagatagagctattgaagctgctttccttgtagtccaatcactactcttcagggcatccataatacttgttagagcagatgttaaagactgctctgtagaagcaccttcagcctgaaaagtgggacagcagaaaaataagaaatgttataaaagatcaatctcctgttttggctaacacttgtaggacgaaatcaaaggatgaatatgactaatctacttccaagaaggaaaatttgatctatgacaccaaaaggatgaacatagctaacacaattatcctgacaattgtattgctgaaaatccatagaaagagacagccatattaacagtctcaagatgaaactagaagtttgaaataaaaatagacactcgactttttgagaactcctttttttatgtgaaactgactgagcagtcatataataaagtactcctggctcattatactaattactccattgcaattacttatgctaagctacttaaacaaccaccagagataagcatggaatgcaatcaccttaaaatactgaaagcacattaattaggtactactagataagcttgaagcgaatggtgttgatgatgcaagagcaaaattcagacctgaataatacttctgatcaactcaatcactgcaggctttgccatgaaatggggattcttgagcagtttaacaacacgaacaagcatctgcggcagaacagggccagggaagtaattgctctcgtcaataaccttggccaagcaagacgctgccccagcctgaacatacctattctgctcaccaagtgattcaaacaagggccgcaccaacgcaaccaatgcagcgccaccatccccatagcctctagcacacaatgcgagggtaccacaggtatcaacacaggcgtccctcacaacagagtcagcatccttgaggcgcttgacaatgctggtcaccatcttcgtcatgtgaggtgccactaggcttccatgggaccgagccaatgtgccaatcaccttgatgcactccttcctcaccgcactcttctgctcggcatcggtgtcaaccacgcaagacaagaagggaccaaccatgtcaggaggcaaggtgtcagcggccttctcaagctcatccaatccaatctggtaggtgtccctgtctgcaatcttgttgatggcctggaccagcctgtgcttcagctcgaacacggccttgcctttggaggtaaccgcattggacttcatcttggcagcctagaaggctagaacactcttgctgcaagatacacagctgaggcaccaacttagcagagagctcagtagctcagagtaacatggatactgaggggaacagtggcttctcccattggggaatggaggtcgtgtttcctgtagattccccacccatcacctgatctctgaaagaacacgtacatgaatgtgaatgaaggaaccacatacagttgatgaacaaatttgaaattggagcaatcaatattagaatgagaaatttggagctgtcaaaattttgaaatcgtacacagtaagattcagaaagctaaccaaatcaggaggaaatgaacttagcccaaatcaatcaagggaaaccaaataatgcaccaaattcgagatgaatagctattgcggcaaggctttcacgcatcaatctcaagcttatacttaattagacgcatcgcactatgatcatttgaacagttaaaccctagacatcggtgcgcaacccaaacccctccgccgagctccaaagctactggctaacggagcatataattttggagcaaattaacataatcacccgacgcgttctcaccaccaaataaaaaatttgcacgaaaacaaatcgaacaaccaccgaaaatgccataaaattcgaatcctccccttccctcccaactcccacatcacagagcacattagcacacacataaaaacaaacccaaaaaagaagtaataaacgaaccaacgagcaaagctcaattcaaacatgaaccaaaaacaccagagggctcgcgaacgaactgtacgtacggttggagcagtgggatctccttgctcgagtcggaagcctcgcctcgcgctcgcggccgtcgcctcctctcctcgcctcgcctatccagaggggagagcgatctgctcctggaagaagtagagagattttgaattcgaatcgcaacttgaggtaaacaagtggggggagtaaaatggcagcttttttttttcttttactcctccctaccttctctctccacgccgaggagaggaggacgccgagagcgccaattccgaggcaactgcgagtagtagtacaagtctttgctccctctctgaccacgacgttttcaaagcggtgtccacgccttgccgtaccggccccaccgggaccacatgtcagtcagtgtgtagttggtgagtggattaacgaaaggtaggtgggcccacattgcatcttgaggcgcttttgggtgccgggattcgaatttcgacggcttggatcggggccaggcgttgatctacgcgccgtcggatggacaaaccacgcacgccgtcggcgtgtcagtttgaatctgacgcacccacactgttacgctccgacgaccttgccggatattcgcacgcacaccatgaaattgacatgtgggccggaatgcattggcccacgctcttgctaccgtccaggtgcaggagccttgcgggcttggcgtatgtggatgacgcgggcccacgtcaaagcgacacatttttgaagtggtacacgccaacgaactgggcgggaccgcgggaagaggcttaggccctgtatagatggggctaaaatttttaagtccctatcacattggatgtttagaaattaattataaatattaaacgtagactattaataaaactcatccataatcttggactaattcgcgagacgaatctattgagcctaattaatccatgattagcctatgtgatgctacagtaaacattctctaattatggattaattaggcttaaaaaaattgtctcgtgaattagctttcatttatgtaattagttttataagtagtctatatttaatactataaattagtgtctaaatatagggactaaagttaagtccctggatccaaacaccacattagctaagttatcgtcacctaataatttgacggttatcatatttaccataaaaaccatatagttatcgtgatgtatactgcaatttcaaaaaccgagaaggttattgcatgtgataatcatgataacctcacgattttgtaaaccctgtaggtgccatgtcacattgtatctcgatatcagctatatgcatggccaacttacatggcctttaacttaacagcgatttcaatttttacccttcaaccgaaataccagatacaatgaattattcaagtgtcaaaaccggtgcaatataggtaatgatggtataatagcgggtggttttatccaacgtgacaatttgatctaagtcaacagcgctaagtcggtgtagaatacgagaggcagaaggcggatgcttacagggagattgacgccggcgacgccactcgacgacctcgacagcacgaaccctagcggcgcagtacaagcgtccttgaaagctcgggggacagacaggacaggaagagggagaataaacaaactttcttgcttagaacttggacacgacacggctccggcacaatgtatatgggccgcacctagaccataatcccgtttcgaatgggctgcaaactcgaatgggctgcaaacttgaacgggccaccctatctatgggccgattgtcgttgggaaatgggcttacacgataatgggccttgacggcccatagagaaggcccatagagaaggaatggctcgcgggaaaggctcgggctctccgctctcctcatcttcatctcctccggccatccccttctcccctcatccgccgcggccatggccaccgccaccgccaccgccgcgctcgcgctcctctctcctccgctccccgcctccccgacccctcctcctcctcctccactccgcgccattctcctcaagcagcctttcctccgcccgatacgccagcggcggcgtctgtctccgcgtcctctcctgcgccgccgcgaccccgtcgccgcctgcgcacccaccgccgatgcagagaccgcctccacctcgcgttcctacgacgcgctggaggccgagcgcgccgtcgcggagctcctccgcgagcacggcgcctccccggctgatgcggcttccatcgccgcgcgcgcgccggggtacgccgccatgctcgccgacggcgtccgcgagctcgacgagctcgggctctgggagtcgtggagctccggggcgggggcgggccgcgaggtggagatggccgggctcgggttcgggaggaaggtgtactacatggggaaggcgaagagcaggcgcgaccgcggcgtggtgccgctgctcgagagcgtcggggtgcggctctcctccgcgaagctcatcgcgccgtatgtttcggcggctggtctcccggtgctgatcgatagggtgagatctaccacttcattttgagctcaatttgcttcaataaatttttgtgtgagtgcatttgatgatcatttctgcccagtacaaactgcatagtatgagtggtgaaattcggtgacattacctttactgacatgactgaatcgttttggatgtgattggccagacaatgcactctagctcttgcctttcactctagtttaattgctcaaatagtatagtccttagctgtaatcctgcatcttagttcagcaaacttttagaagagtgaagagcttgatctcaagcatgtgaactactcctacctctcttcattcttgccacaaaccacaagagtactttcatctctttttacgttatggcaaagtatttacagggtaacttactgataattgacatagggatacacacaggaatttatcattgaacacttaactctaaaatgtgatgatgtcaaaaatatatgtgatattttttcccaggatagcggtatttatgtttttaacagttgtcatttcgctagatagttcactaggtatctgactaactgtattcattgcttatggtttgtttatatacagatcaagtttttgaaggaaattctattttcaagcaatgtctatgaaacattaataagtagaaatgctaaacgcatgatgatgcacttatcaatacctgcagatgagtcactccaaagtactttatcatttttcgaaaaagtaagtatcacagccctattagttgtttcttgcaccagcttccttgcatcttaagcacctacaaaaattgcatcttttattgcagatggaggccaggtatggcggtcttaatatgttgggacatggagatgtgtcgtttccctatctcattgaatcatttccaatgcttcttctctgctcagagaacaatcatcttaaaccattaattgattttcttcagtacattggaattcccaagccaaggattgcatctgtgctgctgtcatttcctcctatcatcctttctgatgttgaaaatgatatcaaaccaaggattaatgcatgggaaaaggtatacctagaggatatattatgtttgtcttatcttttggagcctgcggtataggtgttgacctgataataagtgagtcatacaatattaccacattccaaaattttctaggttggcattgaacaagaatatattggtaggatgttgctgaagtatccatggattctttcaacatgtgtgctagaaaactatggccaaatgttaatgttcttccaaagaagaaaggtaactgacaaaagagttctcctactaacttggcttaagatcctgttcatttgaggacactgtccattgtgtttgttgttacctgaaatggtaatgaggttcttgttttcagatttccagtacagtccttggtgttgcgatgagaagttggccccatattctgggttgctcaacaaaaagaatgaactcaattgtggagctgtttgatgatctgggtatcagtaagaaaatgttggttccagttgttacatcaagtccacagttgttgctgagaaaaccaaatgaggttatgcaggttgtacctgttcttatgatttcttctaatgtataaactccactggaatggagaagctatattactttgttttagaaaactggaactgactattcttccttgtatctcagattattctctttttcaaagatatgggtcttgataagaaaacagtggcaaagattttgtgtcgttctccagaaatatttgcttcaagtgtggagaatacccttaagaagaaaataaactttcttattgactttggtgttcccaagcattatctccctcgcatcattaggaagtatccggagcttttattgttggacataaatcgcacaatgctccccaggtatgactgcagctccttctataattatttactacaaatggcttattacatgtttatactttatagttcttgtgaacatgtaactgactttaactcatctatggtaagtagtttatactggtcagccgagctacaaaacccttgggtaatgtaatgtatatctgttggggccctcataattttcacctatgcttgggaaaatcttatgcatctcttgcccttaaacacatagtttcacaaatactccttcaaacataaggaccaaaaattgataagtttactgggcacttaaacccaaccagaactgacaggttcaaacttcaacatgttggctatcactagtattgaccaagaaagtgtgtcgttagcacattactatgcattagaatatgacatgtttcatatgatctgttgtgccatgataggcttaagtggaaaatgcagcacgacattggcaacgctatgtgcttcttagttatgttatgctacttccaattcttctgcaagatgcaatgtgttattgg

SEQ ID NO: 10454 - DNA, 29938 bp, Oryza sativa
ccccgcgccgccgttggccgaacgccggcgcggcgaggtctccagcacgcgcaggttgaggttgacgccgccgtggacttgcgccggctcgctctccattgatagctagaccaaccaacaactcttgatttcttggcctagctagctagctaactagattgtgtgtgagtagtgtcttcttcttcttcttcttcttcttctagagctaattaagctagccaagttaagtacaaatggtgggtgtggccatgtgagccctctatataaagagagagttccttgtcgggttcttacagtatcgcgccacttgtcatcaggctagctgctgcaggatgcttcactgtacaactcatctgattctgacatatatacatcgacagattcagattgattgattgatcacgactaattaaagtgattatactttgtctgcacatgcattgcattgatcatctgtcagctagctagttactccctccgtctcataatataagggattttgagtttttgcttgcaacgtttaaccactcgttttattcaaaaaaatttaaaattattatattattcaaaattcaacgtttgagtaattagctccaccgacgtgtactatattattacttcgtccgctccaaaatactatgacacatttctttaaatatatctgaacgaagaaatattcaaatatatattttaaaaaaacacaaaagagtttatatcttagaacagaaaagtaatgttttacaagacgagctgatattaagaccagctgatcgatgaagaaatcaagagttgaaaaatgaaaatgcatatgcagtgtttaattaggtaaggtgaaaaagatactatgtagataatgcaagatagctagagacgagacatgcggtgggaaagtgcatgaacattttggaagtgaagctgcatgtgagtgacggggatccagatattcagataatcagatgtgggggctagctgtgcctctttcctgagaaaggccatgcatacatgcagctttgctacctatagctaactatacatgtttttaacttatatgctttggattattcgacatatatatctcctagctatatatctagcttacaactgttggcatcatgatcagtagccaaagattgatattgatcaatctctcaggcccaattcagcagcaagtcgtactattgaaagaacggcatggattaatggactcatgtccatgcgtgagaggtataattaagcaaattcccatttcctttttgctcttttcgcagcatggtcacatgatcagatgatctgcaagggcagctactgtagctagcaagagctgtcacatctgaaatatctaccatgcaattatgaaatgcatgcgagaattggatgaaatggccgacacgatttcacatagtgcagctaggttgctactccacatatggtgagtacttcatccgtttcataatgtaactcattctaccattttccacatccatatagatattaatgaatctagatatatatatatgtgtttagattcactaactttcatatggatgtggaaaatgctaaaataatttacattatgaaacggaggaagtatataactaatatatacacatgcatatatatatatatatatatatatatatatatatatatatatatgatctgatcgatcgaattggtgaataatgctgatgcatcatttcatcgtcactagctagtaggttgtgagtttgtgacaactatagctgggagcagctgctgcatgcatgagcactgtcacgcaagcatggtgacacaagcgatgacgtgaaataaccgtgtgcattgcattcatatttattctactttcaagtgtcaactttgctactgatcgatatcgatgcaccggctcgatcgatatccatctctgggcctagctaattacacagtaacacgcatgtataaatgtcaccgacgcatgcaagctagtgatcgattaatggataagcatgattaagcatttatcgcttgtataacaaatcggcaggtccaagctacttcccccgtttcataatgtaagactttctagcattgctcatatttatatggatattaatgaatctagacacatatgaatatttagattcattcatatctttataaatatgggcaatgctagaaaatcttacattgtgaaacggagggagcaggagagatgaacaaaatctaatatatgcatgcatgtgcatcagtcaagggatccgctagctagctttcagtcagtcaatgttgggtttgcagcgtgtcaaaaaaaaagttgggtttgcagtggagatgtagtcagcatctatcattgacctgatcatattgacctgccaaaactagagttcaattccttagctccgatcccaaacgatgctagaatggcaggttatgttgtcccatgattttcacatcgacaatcttggggagcttatagaaagtatccacgtacatatagtgtcaagaaagaaattaatgttttatagaaccattcatatagacagtgcatccacgtacatatataaatgtattatccataaattaaattagttgctgataagttatatggataaacataagtataaacgaaataacggggctaaatatgacattagggctaaaagcagtggcggaactagaaaattgattcgttggtgtcataacgtgtctattggtgtcatagtatactaattatgtttaaatcatagtgttataatatatggataagcagtttggttataggttctgttaaaagtcgtcggtatcgctcgacaccggtcattacactagaatcgcccctggctaaaagatagatgaatatccatttcctggagacgacaagcactcggaaagtgaatgcatgaacgtttggaagtgaagatgcatgtgcatgacagggatccaagatattcagttgtgtcccttcctgagaaaggccacgcatgcatgcagctttgctacctatagctaactatacaggtgttaacttatatgctttctattcgatatgtcgtagctactcttactatatagtactagtgattacatgatcagtagccgctagtcgattgattgatcaatctctcaggccccattcagcagcagtactcgcactatacatactactgtttgaaacaacggcagtgcatatataaaatacatcatgatctgcagggaagcagtcacaattgaaatatctgctaccgtctcaaaacataattaactatcgagtgtactacatataattaaatctggagatggaagtattatacaatgcagcatgtatgaatatggccgacatgcaggatttcacatagtggtggtactcgatatagtagatctacttagtggccactccacatatggagatcactactagcgctagctgaatgtatgagctctgtaacgcaagcatggtattggtgacacaacatagctaacaactcttgtgtatttttcgtgtcaactttaattactactcactcgcagtgaccatatgattcatatgccgcaattctgatgcgaccggttctggccttctgggttaacaaatgcatgcacatatgtcaccgacgcaagtgaaaggataagcataattaagcatgtcactttttaaaaagtttgtaagctgttggtaatcgacacgtcgaagctattaggagagatgaacaactgaagtactatatatgcatcaatcaatggagcttttcagtcggtcaatgttgggtttgcagtggagatgtactcagcagcattggctactgccggcaccatgcttcattgacctgacaaaacttgttccttacctccaactggtagaatgacaggttacatgtatatatcgccccattattttagaacaatcttggggggctcagagcatccatatatatttatatatggcagagaaaaaaatcgcaactaaactagaacaagtgcagattgataagttatagcgatgtctcaggtgataaatggcaaatgcctgttttatttgggttcagtctcagaaatcacagcaatgtatgcatgatttcttgatcaaataattaaacaactaaataggctgcagtcctatatatgaatatgaatatatatataaatatatatatatatatatgtttaaacaatcttactatgattcatacagatctgataaatactacagcccatgtataattcctaccaccacagcctgcaatcaggtactattttctccaatgtaatttaggtgtttcactaactccctacagaacgcatactgttgtatttatggaagtattacattttggcagagacacaagggtggatttgcgaggatggcttgtcaccagacatctctcaagtatctcccttccatctgcaagctctttacatagctttctgtgtttgagttgtccaaagaaccctgaaaattcaaggtaacattcagcaaagtggagatgaaagcaaagctactgttaaactctaaagagctttcatggcacttcacataattactcataatgcctgcttagaaagaggctaggctaggtgataaatactaagggacagagttctggatttgttttgacctcaatcaagaaagtgcaaactttctagaggtagagcaccactgcatcctcccactaagaattaactgaatctaacaggtaccaaaggtaatgatatacccaaacaatacctgttcctgcacaatggtgtgtagtgtgcggtgtacatctcttgccatgccctttgcatcaccacagacataaatataaccaccctgagaaatgatgctccaaatctcgggagcctgggaatattacaaagcaatggtgaaaaagggaaataaaacactacaccttatattaaacaaaaaggatcatttcatgtaccttctctgccattttgtgctgaacatactcctttgaaggaccctcacgagaaaaggctacaatcaattcagacagcgcaccggtctcaacaaaattgttgagctcatcctcatatatgaagtcctgaacagagaaaatactggtgaggggagttatttaagaggctaggaagttttctaattgccaatcaccaataagatactctcctacactcaaactacaatgcagaaaagttttctgaaagacaaggagagctctgacaaagcacatatgtgcataaccacattgtgcaacatcaatggcagatgtgttgatatttttaattactaagatttataagaatacctatgaccaacagatttcgtatattgtaaagttttctaagtacaaactgcatatgaatatgaataaagtaggaatgtatgtcataccatctttcgatttctgcacccaaagaataggacggcatggcctagttccacaccagtctcttttagagctaatctttcctgccagtgccaaatgcataatataatcaattgaattataagagtcaatatttgaggaaagggggaggaaaaacaaacctgtaagaagcccctaaaaggtgcaagaccagttccaggacctatcattataataggcacagtaggatcagtaggcagtttgaagtttgactgcctaacaaaaattggagcccagctacattcttggctctcttccaagggaatcgagttctgcatacacaatcatcagattaaaatgtttactggtcagcacgaccatcacatacttcaaacaaagtttttatgcttgaccaaatgtatgaccattgttttcaaagtgtactccttcgaaaatataaactctcattatatatgaaacaaatcgacaactacagaatatatgtatcaagaacttttcgaagtctttcatattgctgagggaaagatgcactccctccgtttcatattacaagtcactttgacttttttttctagtcaaactaacttctttaggtttaactaagtttatagaaaaaattagcaacatatacaacaccaaattagtttcatcaaatgtaacattgaatatattttgataatatgtttttcttgttggaaatgttgctatattttcttataaaattggtcaaacttaaaaaaagtttgactaagaaaaaagtcaaaacgacttataatatgaaacggatggagttactatataactatagaattttcagggagtgatacaaggttgagttactgaatagaatgagttgtttagtgttattggcaaggccatcacggtaagttcatcatgagaactgttaacctgacactttgtccatacatcaagaaacttgagaaattatgattcacgtggagtttttaaagtgggtaagaaacaggttcacttaaccagttaaagttggacacatgtaatgaagactggatcttgatatataagcatcaaagcgagctatgacggtcatattcaattatctaccaatcatccaaaagaaatgcagaaagcacagtgactataatatagaaacagagtgccctttcactatgatagaacaagggcttaccttcatccaagtagaacaaactcctttatggatccttccagtaggggtttgcccatacactagcgcacatgttacatgaattcttgttggagtcatcctgcagcaatgtgaatggttttaaatagataggtcaatttgctcaggttagaagggtattattcctgaccaaggtacctcggtgaggaagatatcgagtagtatctcggctgcagtcgaggagcaatggctgcaaagaagacaccaagtggaggctttgctgatgggaactctgtcataacttccaagagactccgttgacttgaaactatccattgagaatactccttctgccaaatgaagctcatgtgaagccaaaactaacatccaaaagcataaacttatattaaaaaccaacctttccagcaggagatgctagatgtcttagcctctcagcatctttgggatcagatgcatgggaagccaaagcaattaaagcactctgcatcaacaaattaaaaaatattaacatcaatacaaatatccagaaaaaatgcatatagaatgtaacaagatagatctgcaaaagttcaccttcttaggaaaactcagaaggtcagcatatctggcaagtgcagtccccacagtacagggggacgggaaaggaggtggcaaagaacccccaaaaagtggagtgccatcctcttggtcagcatgaattgagaataaggtatctggtgaataacctaacagattttctacctcctctacagtctctgtgcagttttctgcatatacaccaacatgatctccagtctcatatctgttaagaaaatgggggtcatcagcagtctaaacaccagtaagaaaaccgtgcctgcaattttgtcaaccaactactaaatttggaaagtaacaaattcagatacttacgtaagaccagtccctgaaatatcaaactctaaatgaatgcaggaccggtaagaagccggcgtgtgaagctcccgccgcacagccacatttgctctgcaaggaaagcatgatcagaatttgttcagaccacacccagtgtcccagtgcagtcaaattaaagaaataatctcatacctgcaaggatgctgaatgtcatatacagcatgaccattactgagactaaaggatttgttgatatgcatggcttcctctggcttgaccaatacaactctatattcaggaatagcagctgtgtagggagttggtgctgccgatttatcatcttcaacacggagcaatttatccaattctggccatagaagttccttcctttagttgaacaaccaaagcattagcttttgttttatgtctcaaagtctaaagttgatatcaatgtttaaaaagtgtgcacaaatagaatcagtgtcaaaatgatgcctgagttcaaagttgagacaaagactaagctaattacggtacgtaccatgcattgaagtcatcctcaatgcattgatcatcatctccaagaccaagaggaacaatgcgttttccacctaaaagagatgtggagaaaagttaaccaccaccaaatgatacagaacacgacagacaggaaaatcatgtgaccagaatgttgcaaagatcaacaatatctcactgaattattacatggtaaacctgttgttcagatctatcggagacaagtccgatttgatttagttgcacacttacactacattaatactagctccccttctgagtctaaaacactctacagaatatcggtagacagaaaaggatgaagacaaaaaaggcacagcattaaagtcttaaagcatatgatcctagtagcaaaccaccctgataaaattatgatgctttccagagcacgttactaactacctacataaaaagattagataagttgtatcccttatcctgtactcttctcatacagtataatttctgacaatgtttagtggcatacaattcttaggtgagcatgaacagtacaggcaaagttatgcctttgtaatatagatgaaaaaaatagtgcattgtagttattcgaacgatggttaccttgttcagcgaggagttggtcaaccacctttccaaccttcagtttaaaaagacaatgtaagtatacaaattgggctctatataaaagcacaatatcaatgtagaagcaccagcaaaccttgttaaaatgctcgtactgcctatttccgaggccaaagaccccaaaccgaagattactcaaccattcacctctctcattcccctgcactccagccaaacaaacaggccgtcaacagaaaatacaacgctcacccatgaaagggccatatgaactgtggatttgagagcaaacctctccaaaccatttatagaacctcgccgcattgtcagttggttccccatccccataccttcaacgagaacaagaatgcaactcagatattcattggaatcaaaattcaaccattctagtttctcctgaattaatcaatatcccgtcagaagtatagtaaaaagtggagatggcacctacgttgccacgaagaacaaggcgatgatctccttcttaagcttctgctcatactcctcatcatccgcagcatactcatcctgaaccccagaacgaaacaggcatgaatcaatcaatacatagaatgcaaaagcacatgaaattctgaagcagcgttagtggcaaatcgtggcggcttaccagatcgagcaccttgaagacggccttgtcgtacctcgacttggcctcctccgcaagcgcctgcgaatccgcaaccaattaagacccagggttttgctgcacgagaggtgacagacagagagcgagaaaatctatccaaccttggcgaagccctcggcggtgccggtctgcgtgccgaagaagacggcgaccctctgcctgccgtcgtcggggtcaggctcggcctcctgcttcctcttcgcgggggcgggggcccgcggctgcggctcctgcgccctcacggcgggcgcggagatggaggagcggcggacgagcagcgcgacgccgcagccgacgaggacggcgagggaggtggtgagcaggacgatgaggtggcggttctcggcgagcgagggcggccacccctcctcctccggtcgtccccgccccgtgagcagcgccgccaccaggtccagcgccgacggcctcagcgccccgccgccgccgccgccgccggagtccatagcgcgcgatgggatcgaggcggaggcggaggcggaggcggcggcgcgcgcgtgcggggtggtggccctagtacgtgggagaatttgggcgaaatattttttgggtttttgtggagttgagcgaaacggacggtgatgtgcgatcgatcggtacgtggtgtggtctgtggtggcgcggtgtgagtgtgtgacacgtcccgtcgggttgaggagagcgatgcacgtttcggcgcggccgcgacgtttggtggtgcgagtgcgagtgcgagtgcgagtggctcgtgcgccgcatggtttcactgttttactatagaacgccctcgaagcctctcgccataaccatcgccgtcaacaacaacgtacaacaaccacaaccctgcgaacgccttccagttgctcgtcaccatcgtcttgattctcgagccgtcgagcgtgttcgatcctaccaaattttgatggggggaaaaaactgaacatgttcttaccaatgctattctgttaaattttgctaattctaaaagttttcgctcttcagaactatacaaaattttgataagatttcgaatcaaatatattcaacactacttaaatttgataatatcaaaatgtacctaaatttaatattatcaaatattggtttggttgaaagctcctataaagtaaacaagaccactatctctagattcttgttggcgctgacagtaagtacactaaagcattggtaggccgcgttgctcggtgagaccaatatgattatcacagtcacctcttgttcgggcaaaattccctccacatggagtctttgctttcagcccattgcaacccaaaagtctaacaaatatgagccattgatttatgccttgatcaatgatggaaattgtctcatctctttatgatggaaagaaaaaccctaccttccattgggggagagatagtagcggcgattggggtgaagaagaaactagcaaaacacaagagagggaaaggagaggggagaagatgtgcagtttgttcagcttgggagctcttaccctatcttcatcaagttagcgattagaggctcgaacgtggttggattggcactaaacttggtaagtttgtttctcactttgagcacttcaatctggtcgatttgtataaggatgggttgaatatagcaccggatttgagtggtggtttgtcagctcgagttactgcagttacagcttgcgcaacaattggtagaatgtcagtttgaggggtcaaacagtgtccggttggactgtttttttggatagcttggaagggactcgtataccatcatttctgccaagtttcgtgtaatttgcatctgtggtttgggagaactcacctgagaaccgaagatggcctcttgttagctttgatggttaatgttgatgatgccaagtgtgtaacttaatgttatagctgctgttataatatgcctctagatttttcagagaagactccatgtatatcctaattgattatagttgaagcttggagtggaccgttggttccgtggtttttttatcctcacaccgaggaggtttttccacataaatcattgtgtctttatgtgcatgtgtttattattgttccgctgctgatctgctagtcgaaaccatcctcaaagtttatggcaagataagggtttgattgtgtgaaatatgtttatcagttggtgaattgtaatttgcacattgaagagatgtggttgagctccaacacctcacacattaacacaacccattcgttgttatttgtagcctctcagttaagtaaaagcagatatcttaatttcacatcttgactttatgtttttatttttacgttatttgcaacctctcggttaattaaaagcaaaggccttaattcaacattttaaattagtttttaactttattgttttttctttattatttgactccaccacaatacgagaattcactattgccaaaaggttgggttttttttttcaagttcttgtggtaaccatagatgtgtcgtggttatattcatgccacccagcatgaataatgaactgttccaaaattactttaaatgcatgttgaataaagcatgctcgcaatgcacctgtgttgcaccaacctggccgtactcttttttttttttttagaaaaacatggctgtactcagccgaacaaacttgtgctgtctgagtatattttcgcttggttttcctttgaaaactctgaaataataaactgctaaaaaaatcgaattgcatgtgtatgtccatgctgaataatactcctacatggtagtgattccaatcaaatcaaagagatttaattaagagtcgtgtttaactagaggaggagacctcggccaggtcggtctcgaacgctttgacgaggttcccaaagtattgccgcgtcaccctggtgagcccggcgagcttctccctgtacgccctgtacttgtcgaagtcgacggcggccttgtcgtcggcgccggcggcgaagagctccctcctctccctctcggcgcagccgtgcagccgctccagcgacgcgttggcgtcctcctgcaggtactcgaacagctgccgcttggtgaagtcgcggtccgggtcgaggtagtagccgtaggcgtgcgcccagccgagcacccgccgcccctcgccgacctgctcgtacgcctccgtcacgaagcccatctccgtcgccggcacgcccgccgccgaggccatcgcctccagctccgaccgctccaggctctccatgtcgcggagcgccacgcgcagcgacttgaggttggcgtcccaccgctcgtagtggtagaggtacctgtccagggacgccttggcctgccgccgccgctcgtcgtcggcgttggcgccggccagcgccaccaccgtgccgttgggctggtaccgggagcacgccgcgtggccgtgccatggcttgaggcagatccagcagaactcgtggaggcacggcggccggcatgtcatgtgcatgcacccgaggttcttctcgatcggcagccggcacttggggcagtgctttgtgtgggcgagcagccacgtcgccgtctccgactccgagctgttcttctccacccacttcgccaccgtcttgcacgacaccggccggtgcgcctcctcgccgcaccgccagcacagcccgtgcccgcacgagcagaacacctcgctgctctcctcgccgtcgccgccgcccacgaactccacggcgcggctgcacccgggccccgggcaccacctcatcccggcgctctcctccacgtacgaccggagcgcgaaccagccgaaccgctccctgtcctcgccgtcggccaccgcgtcgaccagctcgcgcacgacggccgccgggcacgacggatccgggcaccggagcgacaggcaccgcgcgccgtcgcccaccgccgcgcggacgtacccgcgccagcaggagacgcagtagaagtgggagcaccccgccgacctcatcccgccggtgtcgaacacgtcgaagcagatggcgcaggtgagccgccgccggttgacccgcgcgggcacctcgccgccgccgccgtccgccggcaggaggccggcggcgtcgcgtatgcggcgctcgtccaggaaccactcctcctggagcaggacggccctccacctgtacagccggaggaggacggcggcggcgcccggcgagagcgagagcacctcgcacaccttggcaatgtcctcctcctgccgcgcgcgtacgtcgtcctcggttagaacaacgtacgtcttctccatcgccggcgcctccgtttcctcgaccacctgcccaccatagtcgtcgccatcgtcatccatgtaatcgccgtcgtcgccataatcctcgtcggagtcgccgaagtagtcgtcgtcgacgtcgctgtagccggactccatgctagtagctgtccgagatggcgacggcgaggacggattaattatcgatcagccagggtttaattaaccctaaccctcacaatttggcctcgcgcgcgagcctttatcggatcgagatcgcctcgtgataataaactgtttcgtttttaaagattgcttgctaaaataaatcggaatcgccttttttaaataaataaattcggaatcggcttcttagctaaattgtacttccggatattgcacgcgtgtttctgtgcggctgttatgggtggccgaagattggaaaggcctaggcccttagcccggcccattactgagaattcgattacggcccctttgttctcatgttattaggacgtcttttatacaagtacatacaaaacataacgagcctagacacctcccggtaaaaaaaaaagcaatattttaaattttctttataatctatgacgtgtgattttttttcatataataatttaagtgattatgaaagcaccttcaaaatccaaatcatcacatgctgtttttatgttttcaaattaactttttaatattattaataatcaacattttaaaagtttaatcaaatcgcatacaaaatgtcaaatactaataactgaagggagcattggtgatacacgcttataattggtagccaatgagcctttattccaatttaaatagagtaatacctagagaatttcgtgctataatctttataattttgaaaacattatttcacttgatcattttattggcagaagttagggtttatccaatcacttcttttttttaattccttctttttcatttatgggacttgttggctgtgtgcacatggccacttgggtataaggagcatattgatccatgtatttttgaaagaaataaaccatagtatttgttaagtgtaccttataaaatatgaattcctaattcgtaaaaaatgttggcccaaccaatggatcaaggtacaaattttcctgatgtaattgagtgatcatcaagtattctagtactacaaaagtgttgtcgttaatttgcacgtgatcctacgagctgtcgtcttgatgaagaggctgaagaggatcaacaggatcgtcggagctctcggccggacctgtagctacggcggctgcggcggcggcggcaacagcaggtcccacctccaacaggccgtcctggaacgtcttgacgaggttacggaagaagatcttgcagacgccggtgagcccggagagcttctgccggtaagccacgaccatgtcgaccatctcgccggccttatcctccatcttcttcttcgactcctcgccgtcgttgtccttgaggatagcgttcaacttgatggttcgttccacctcggcgaggagctcctccctctcgtgctcggcgcagtcgtgcagcttctccagctgccgctcggcctccccctgcgcgcactccaccatggtgcgccgctcctcgtcgccgtcgagccccgtgcccaggtggtagtacccgtacgcgtacgtccaccggagcagccgccggcactcggcgatctgctggtacgcctccgccaggaagcagagctccgtcaccggcatggccaccgcggcggacagcttctcggcgcaggcgtcgaggccggccatgtcgtccaccgcgctctgccgcgccttcccgtgcgccgcccaccgctcgtagaagtgcatgtacctgtccagcgacgccatgccctgctcccgccgccgcttgtcgtcgctggcctcgccgttggccttggccgcgtcgtagacgttgcagttgtagtactcgctgctccggtgatcgctccacgggctgaggcagagccagcagaactcgtgcaggcatggcggccggcacgtcatgtgcatgcacccccggttcttctcgatcggcagccggcacttggggcagtgcttcgtgttcgccagcacccagctcgccgtctcggacttcatggcgttcttctccgaccacgcgtacaccgtctcgcacgacaccggccggtgcgcctcctcgccgcaccggaagcagaacccgtgcccgtgcctgcactccacgtcgtcctgcttctcctcgccgccgccgccgccgacgaactcgatggccagggtgcacccgggccccgggcaccacttgatcctcgtgccctcctccacgtacgaccggagcaagaacgtcgcgtaccgggctctgtccgcgtcgccggccacctcgtcgacgagctcacgcaccacggcggcggagcacgctgggtccgggcaccggaacgacaggcgccgcgtggacgtacccgcgccagcagccgacgcagtagaagtgggagcacccggccgatctcatctcgccggcggggtgctcgtcgaagcagatggcgcagacgagcgggtgggcgttgcgcgacacgggggcgccgccgagcgccacgccggtggcggcgccggctcggtcgccgtcgcagaacagcctgtcctggagctcgacgaggctccacttgtagtgccggaggaggacggcggcgaaccccggcgggatcgcgaagagctcgccgacgttggccgtgtccgcgtcctgccgcgcgcggacttgctcctcggacagattccggtacctcctgtcgatcttggtgaggttgacggcggcggccgccttctttttcttggcctcgtcgtcgtcgtcgtcatctacctcctcttcctccagatcccaactctcgccgtcgtcgtcgacgttgctgtccacctcgtcggtgtaatcgtcgccatcgtcggtatagtagctttcgtagctctgagcgtcgtcctcgccgtcgctcgccatgcctgcgctgcgtgctagcaatctaggtcgacaactgattctcagggtcaaggttgaatttttgtatgcacaattttccgtctattttttccgctaaaaaaattccatctatttccgaccccgagttgggatcagtctcgaactcagatcctgaacggattcgcttcttaacaacaattttaagttctcaataactttagtcaattcaaactgagtacggtttatttttcgttcaacctctctttgaccgatttcgtaaccaagattgatccctgcttcaaaacacaacacagtgctgtaaaaaaagaaacaaaagctacaaatgacttgacatgcatcacaaaaaaaaaaacaaaaaatcagacagcacagcatacaccattaacgtcagaatgtatgattggttggttaatggaagaaacgtccacaaactttattagtacattataaatacctatcacaaaatttattatagattgttattatctgtctcttctgctcccgtgctaagaacaggacaatgctgattgagctttactttactagacataccaagaatgccaatctctaccgtcggaaaacacgatttgtgttccgaacaaagccgcaccggcagacatcaccggcgccggcgccgccaccgccgccgcggcggccattgtgagaccccttgcactgtcccaagcaagcactccacatcatggctctgccattactccttcccttgctgcttgcaccgaagaggatccctgcgacgtgcatcccctgcatctccagcttcaccctgccatccttcttctccagggatgcctccatgaccccgatcatggggtcaccaatggcggcgtacccttgctcgggatccctcacctgaatcaggaccacagagaccatggaatccttcgtcgcctggtgcctccggtcgccgtcgtcgtcgccggcagccgtggacgaggcagagtcagccgtcgaggccatgcgaatctttaggccttgttggaccagtccttccatcttgtccatttccatgaagaggagagcctccaagaagtcgtcgccggagctgagcctcgccgagcggcggatgactttgccgggattcttccggccggcgatgtccttgatcggcatcatctttgacagtaacttgcacaggttctctgcgctcgtctctgtcatcttgtcaagaacctagagatcacaatgccacagattgtcgaacgaaaacaatgtgcagtgcaatggatgatagacttcattggcatccatggatcttgacagcgatcgaggtggctcacctccgacgcggtggcggcgttctcggcgacgacgggctgcgacacctgcagcgccagccgctcccagggcatgcccaccacccgtttgatctcgtgcaggtagccaccgccttccagcctcaccatttcccgcacgccgccgtggccaccgacggtgacgcgcttgttggccgccgtggcgccgatgccgctgcaggcgctgctcacccgatctctggtggccatggcgccgccattggcgctcctgccgtgctcggcgagcctactgccgagcctcctgatctcctcctccaggaactgcaccctccgccggtactgctccgcggatgctctagtggtcgccgccgtcgcgccatcgacgacgttggcgcgcgcaggcggcggccgcggcgcgcggcggtggaaggagaggcaggacgcgagggcggagcagccggtggtcgccacgggcggcgccggctgcttgttgtggccgccgggcatgccaatcttgccgatcgatcggtgtggcggcggtgcggtctccgacccgctcgctcgccggcgccgtgcaatttgacgcgtttgtttatcttgtataggcgccgcgccgcggctagctagtgaggttagttgcgatctatgcgtggggaggccggatcggatcatcggaggcgcgattttggagtttgaattcgaaccccaaactccaaaggtgtttgtcttggccaacttcatcttggagcagcaaatattgcgttgcgacgtgacgacgcggtgcattggatcgtgtgttgtacagccgcggtattcattgcatatcagttatcaccagtacaaatccattggatgtatccagtatccgtgcctgtaagggcctgtttagttaggctgtgtttagttcacaccaaaattaaaagtttagttaaaaataaaatgatgtgacggaaaagttggaattttgtggataggaaagttttgatgtgatggaaaagttaaaagtttaaagaaaaatttgcaactaaatacagccttggtgaaatgaaaatttttgggtgtcacatcggacgtttgaccggatgttggaaggggcttccattgtaggagtaattacttggggcttacgtgtatactaccgtgcagtaccgcactgctgctgatgccttgttgatacaactgtgggaacagtttcaaaagtacgaagagaacaaaaatctctaatattttgtatgtcgaagtttagaggttgcgatcttgtagattttcggtctcatcatttggtttttttccctaacaagtcaaaacggtttattagggaaaaaaataaatttataggtaaaattatatatatatatatatatatatatatatatatatatatatatatatatatatatatatatatatatatatatattgttggtgacttaaaagttaatgctaaaaaagaaattacgttgaaaaaaaatctcaaaatcaatgtcaaaattaagtttgaaaatttaaaatttagctttctatttggctgattaggccatccaataggagcctttcaataatcgttttagtctcatatgttgattttattattttagttcttattgttgtatgagtatttgctctctttgagataattttataataaatggttgtaccttctttgaagcaaaggtccgaacttttatttcattatcttatcttaggccctgtttagttcctaaaacaaaaattttcacgttgtcggcttgtcgcatcgaatgtttaaacacatgcattaaatattaaatgtatgaaaaaactaattacatagattgcgtgttaattgcgagacgaatcttttaagcttaattgtgccatgatttgacaatgtggtgttataataaatatttgctaatgacaaaataattaaacttaataaattcgtctcgcagtttcctagaggaatctgtaatttgttttattattagactacgtttaatactttaaatgtgtgtccgtatattcgatgtgacaactaaaccaaaaattttccacaacaaaaaaaaaggccttaaaataagacaaaaagtacaaatacatttactactagtagtacatagtacacacgatgataggagatgtgaccgtatgagtggggccgtgtttagttcccctccaccagcttcaaactttcaactttccatcacatcaaaaactttcctacgtatataaacttgcaacttttttttcaaacttctaattttcttcaaacttcactctttttccaccaactaaatacagcctgaggtgagcttcctaaaatagggaaaaaagaagataaaaagaaaaggtgtaggacacatgggctttagtgttgcaggactttggtccttgtgggccttgtaatgctgagctcaggctcatccgacacgtgtgcctcgcgggccttgcaatgctgagctctggcccatcacggcgaagacacatgcgccggggagcggcggtggaggggaggattgcccgccgcgccgcccgccgcggccgtcttcctcctccctccatctctccctcggaccctcccaatggcggctcctcggcgcggagtgcagcgagcaggcgcagcagcttttgtgtgtgggcgaccgccgtggggctgcacaaggccgtctcccgcatccctcgagggctccgacgccatcgatgatcgcccgcaccaccaaccccaactccggcgaccggccaccgggccaccaagtggtactgccatactctcctctcctctcccctcccgattgctggtcatcgatgatgagcaccaagctctccgcctttgtgtgtacctgtaccctcgatttttttttttgttggaaggactactctggaaatcccattgttgactgttgaggatactggctcttagcatatgcttctccaagaattgttcatgtttgatgcaaacatatcttgtgtttctgttcatgtaattactggtaacttgatgccttgctaaaaaaagagaactaattaacctgagatagttttaagtaaacgtatggatatgtttctgctcccaacatctatgtccttataggaagctttattgttttctggaacaacactgctttagaatcatttagatgccaatatgccataatcaacagagatgttttggttttgaccacctaattcgcatgaaagatgaaatatcttagggcggggaatctgggaacaatgatgcttttcagggataaatgttcaaatattgatgaaaggcttggttttccattccacgaggtgttgttttcttgtgtcctactattggacacacgtgtcactacttcttgttatgttctgaagccttttcaacaatctgaattccttgaatttgagaataggaacatccaagacaagtgcctgacttcctatcttactttcaaacatgttggcttcgtactttggcagatctgctcttactccagaagcagcatgaatccatttttttcaaataaaaatgtatctgttcttccaatgcccatagcaattggtagcctagtaatggatgaacaccattccagatgaagggcttacaatgtccatgatactatttcattaacaatagttttgtagagcatgccgtctcgtttttatttatctcctgtaatttaacctataacttaattgccgtcatatataatatcatttgccatattattttacatgcatttggcatgaattcatccacgccatgtataatatgttccgttttgaacaatccccttcaccgtgtcatgctgtagtgtttatgtgcatttggtatgaattcttccacaccatgtattaacattcagttttgaacaatccccttcactgtgtcatactgtagagtttggcatagagcattagaggctcaatcatggtggaaatgcagcaggcgtggtgggggagcttggaagatgcaatgggggtatggtgggctagtggctggaacagaacggtacatacacatctcaacttcatcagcactttttgctaaataaaatatgtcgtgaggttatcagcttttcttaaacttgttttcccttgatccggggcctttttgcacggtaggaatagagccaggttctgctaactggcagtacctaatctaaatgcaaaggcaggcaaattctttgcgtattcccgggaaaagaacttgtattgccgcagcacagacaagaattaaagcaagaaatggtattcttctagctagaggccggaatacataaattcatcagggaaagaaacacgtacaagaattgctagcaatagtacattagcactcaagatactaattatcactagacataacagctaatttagagaagagagtataattaagagccaactaatttagtactaggaggtaattatgaacgagggctatgaggaagcaggaagctgaggtcctcgccttcgtcggcggtggttgcgacggtagcggtaggctctccttgtactatctcttggctaggggaataaggccccgactttggctctggctcccgctccggctccggctccggctccggcatctggagcttgtcggccaaggtcttggcgcccttgagcgagagaatgagccagacgaaggagaggaactcgccaccttctccgaggctcttggcatgtaggtatcccctacacatgctggcggagtagaagagcatgcccacccacacacggtacatcacttggcaccgtgttctgcggcccatcttatccatcaactcctctgcgagcctgcatgcgtcatggacgagagggtacttggggggagggggctcatccaccctgatttccctctcttgttctcttaccatttctatgtcgatcgcagcattgacctcagcattgacctcagcttttgccttgtcgatgatcttctttgccaggatgtctcgtccgagcttcttgaggctatgcggctgctgctgctgagactcaatatccttcaagatgagctcaacctcctccattgcctgcgtgaagaggtgctgcctgctgccggtcatgagcatgtcagggcggaggttgagaaggtgggccatgtagtccgatatcgcctccgtgcactcgagaaatttcctgtcaatctcgtcgatggtgttttcagccatcatgcggcgcatgcaaaggtcagtggcgatgtgccagaggatgacacccctatcaaaggacccacgcaggctgccctgtacctctaggccgcataccttgcgcaggttctcattgagcacccagttgcggcgccccggcgcgaagcttcggtagctggtgaagtcgagacccttggcattcgcctccactaggtcggagaagatcaacccggccagcatgtggtacaggttcttgcgttggcaaacgaagaatccctgtgtgtagccgacatgtgcggcacacttgagcaagaccccagcaggctgtgtcctttggagagctgaccggatgaggttattgtattgggggactgtctcgcatagcgctgcgacatccgccatggacatgagcttgaacagcagctgccggatgggctccgcaaggatgtccagcgcggcggtgaggcagaggagcacgtaggtgatcttcacgtcgatggtgttgtggtggcgcttgctgctggcggcgaagagcacgatggcggtgatgtgaaggaacggcgccaacagtatgtggtaggccaggtatgcaggggtcaacaccacgttggctctggtgtagatgagcgcaaacgctctgcgaagccaacgcttggagcccttctctgctctagggcttagggtccccagcaagtctccctccacctcctccttgctgtcatcttctcccatcaaggattggcattgacggcgacgacgttgttcctgcttgaggtcagagtcggcagctagcagcgacatgtcggagagtatcagtaggaccttgtctctatctgtcaagatgtgctgctgactcctcttgacaacgtcagtgcctacccctggaggaggggtctccttctcttttttcagctggcagcagcggtcgagtatgtctctcttgtccttttccagctcggtgaagcagtatctccacttgctgacctccttcctgccttgtaccatggacgacacagctgccagccggttgatgctggctcgtcggagagcccacggcttctcggtgaagctgaacaccccaatgacgaagagcaggacggctgacaccagcagcttcctgtcaccgccattggcgggccatgacttgtagaaggcgtatatggcgaccgtgacctgggacaccagagtcacagtgtgccgcctccacagctcgttgtcctcgatggtgtaggcagacatctcctgctgcccgccaaggtggatgaggaggaccggagcccataggacctccagggcgctgccattgacacaatgctgtttcgcggcggtggtcgtgttggcgtggcggttgaagagggtggcaagcgcgtagatggccagggcgtcgctgctgatgtaggccagccagatgaaggtcctgaaccagtgagggatggtgtacttgcgcatgggggcagccagcagaaggaaccactggatgcccaggctgcacagcaccaggatgcgcagctgccactcgtcccaccactgcacagcggctgacacattcgtcattctatcatgcatctaatatctgtttgttactattttttttgtttgtgcatcgtaggttcccgacaatggacggttagtttagcacacctatatatcagaatgacacttgttgaacacagtttttctgtagcccagctgaagacttgctttgctagtgaagctcactttaattattactgctacacatgtgcgtgtgggagagagctaaagtgagggataagcattacatgataaaagccgaaaaagagaatgaacatagagaaaaatataaatgtacattacaacttttatcgaaaataaaggaaaaatataagatgtacattacaactttagactttatttatttacagtcatgcgctgcccttcgcgcacagctttgtatgatctctgcaatattcctaaatcttcatatgttagctagtgtggagctattgatgatgtctaactctttgctttgtttacgaggtggtccttactatctttgcatttgcatatttgcgtgcatgttagcgaaataaaccatttgttcttcagccacccaaacatcatctgtcttatcaaaccttcaaaataagagggacttttgttcatcttgcaccgaaaccttttcccttgcttgttttcctcttccttcttgtcggtctgttttcctttttcttttctccttctttctcatttcctttttcttttcttgggccacacctcgttgaggataagattttcttgggaacagttctgttgagtgagagcagtgcaaacacaactttggttcatgttctgctagaaggctagtacagtgtaaacacaatcttggttcatgttcataattggagatattactgctgaaggaggtgcccgcaaggaattgcagtcctgcagataagagatgccatttgctagttgcctccttggtaaaagtcttcacttgagtttatttatttgctttcctcttttccttggctggatttcccacaagtctcgttttcttatcagcaaaaccttttgttgacaaaaggtggtgtgattgtttaagtggggtccgaatctttttcttcttaaataaaggagtggaaatggaatagtgaaaggaatagtgtctctgttaagctttccttcatttatgttcctttcttactcgatgctgttgcctaatatatattcccttatttttatattaaaatgtgcatccaggccacacggttcaaattcttttttttagaacttcaattctaaattggtagtattaattggtgtccactagtaattttaagacacacgcgctcagtgggtccatatatatgctccgggaattttaattagccgtgtgtgaagaacatgcatgtgcatatgatgtctgaatgttgttgtgaaccttgtgtaaggtgtgaggattagtcctcttgactttgtttgtttgggctgtgtacatttaagttggatgtagaggttaggtttttaatccattttctaaaaaaatgtgcatatgatgcatgcgagtgtattttctgtaatatatttgtatattattgaatttggaaaaatgagatgacttgaacttcataacaatatatagatgagtgcgttgaaaatagacgcgcatgtaggtttcattagattctcacgtttgtaggcggatgaaaggtccactattcttctgttacttttgggtatgcggtggctaatcaccgagctactccctccgttctttttttactacttgccatataaaatactggcacagtgcatatatttaataattgaatttcctaatattatcttcgtaaaaattactgtattaaagatataactagataaacatatttttcattataactctgtcaatatcatttatcatattttaaatcttaatatgcatatattagtgggttaatgtatagaagtttgactacacattttctatttatgaaacgatgtagtgatgaatgcttttgtgataatgcaacgttcatgaaatatgtcagaaagaataaaatagcataagaaagtaaatagcaacaagactgaacgtgcatgagcatttgcctttttctttcagcatgtgaacttcaatttagtcaggattatcatggcaaaagaaatatcacttcaccctgccaagaaatagataaattatttgttcgccgcaaaattaatatgcgaaacagctaacggtcctagcgcataagttcggagcatatattcttcttctttccttatggcactcattagcaaggtagccaagaaagctctatataaaccatgtgcatcaccttacactgcctttaacctcctttctttccctaggacctacccctcccctaccctcttgagctttctcaaataaaaaaaaaggaacacctgaatttttttggtgattcaaagagaaaaagacaaagatttgatgggtaacatgcttttatcccctgttaatttcttgtgaccattatttttttctgccttggtttttggatttcatacagaaagtgtgttggtctgtgctaatcttttcctccctctgcgacagcatcttcgagctctaccatgatggcaaggcccggcgctgtgaagaatattgaaagctgggacgagtttacaaagcattttgtgaaatcagaggacaagctggtaaacatatatacatatataatccaatccaattcagatttacatgtgatgtgatcgatcgacgcattcatgcatgcatgaaattaatatattgaaatatgaatgatcaatcaggtggtgctggtattcatggcgccgtggtcggagccgtggaagctgatgaggccggcggtggagaagatggcgtcggggctgaagagcgaggaggccgaggtgtgcacgatcagcgtcgaccggttcaacacgctggggcggctgctgcgggtggaggcgctgccgacgttcgtgctggtgaagaggcaccgggcggtggctcgcgtcgtcggcgtcaaccgggacgatcttcacagcagcatcaacaagcacctcgcaccaccctcttcttctccacaacccattaatatttcttagtgctgttgatgattcttggttgattgcatgatataatcgagtaatgccatgcgtcttaattatgagttgtaattgtttatcacatactgtatttgagacatattcaaccttgtttcgagaaaaaaaaatggagatgaaaaaaaaatctattcatacttatagattttctttgaagaatttgtcttgatagggttgacacgcagttagcacgagagaacttccgtagcttgccttctgtacctgtatggctgtatcgatatgtatgcgtgtcttctacgcagctaagatatgaaatatatcatatgaggctgtggagaaattgactaatttatactcctacgagaaaaataattaatgctttcagaattccatttttcagtcttatgttaatgctatgcttgccaatttaagcactttgccatttttattcaagaaaaaatagtggatgctatgccatgtgtacccataaaaattaattaaaatgagaggaattaatgtaaaacaaaatattatatacacataggatagtatattcatctgattcctaatcctaattctcttcgattgattgcctccatctattcctaggagcctattatatggttctattctagggatctccaccactcagctccaaagagattgaaccatagatccgtggaatagaaaatttcagtataacactgttacattctagtgtttttaagtgagaaattaggaatttaggggggtcaccccccaacataatatagcttcgccaatggaggcaataaaaccatagatccatggaattagctagggaataggccaaggtaatacaagagaattagggcttgtttagttcccaagaagttttttccaaaaacaccacatcgaatctttgggcacatgcatggagcagtaaatattaattttttaaaaaactaattgcacagttagggaggggaatcgcgagacgaatcttttaagactaattagtccatgattagccataagtgctacagtaacccacatgtgctaatgacgaattaattagtctcaaaagattcgtctcgcggtttccaggtgagttatgaaattagtttttttattcgtgtctgaaaactctttccaacatccgatcaaacatccgatgtgatacctaaaattttccttttcgcgaactaaacagacccttagaagaattagattcaggaagtagaataacatgagaggaagtacaggggaaagacaaatattccctccgtttcatcatattataagttgtttttgacttattttcctagtataaaaaatatttggttatagaaaaatgtagcacaaaattagttttatcacatgtaacattgaatatattttaataatatatttattttatgtataaaatattgatatatttttctagatgtttggtcgaattttaaaaaattaaaaaaaatcataacgactcgtaatatgaaacatagtattatgaatataaaataaaacagagagtactataaatgaaagtttgttcaacacattatcacaagaacaacagatacaaccgacatgaagggggattggattctctgacttacatatcaatgtcttaaagttagataaaagtaaatcgaaaattaaaaaccgattcccacaagagctagtatatgcaaacacgcaaacaaatgctcaacacttgcagcatgaccggtccccagcagcgcagtaaaacaaggaatgattacaacacatgttaatgacctacgtcaaaagacagcacgtataaggagactcatctgaagtagggttattgtttgattttacttatttaaccagagttcaaacaatcaattaagtgttgagatggttaatctatcccgagcctcatcggttgacctaataagtcaaaacaaaagccaaaatttaaattttctaacttgattttgaagttacattttaagatgttttaaacataatttctttatagcattgggttttaaatcactatgaacaaatatataaaaaatctacctacaaaataaattttattacctaataaactgttttaacttattagaaaacatagtcaacggatgaggctgcccgttttctaaacagaggcagtacatagttgtacaagagacgtatcccgtgtttagactttctctatactatattcattctagtatatatcagtacaaattaggcatacataattaatttgatattgtactgtacatcgacgaaattcaagcaaaaaaacaattgatcttgcaatcaatcgatcagttagctcttctagctaaaaaaaaaaaaatcaaccgtgcggaatcggcgcgccgccgccgccacggcggttcgtgtccggcggcggatcgacgtacccataatccgtctcctgatcaacagcgacgccgacgacgccgcgcactggccgcttcgtctccgtctccggcaccgcggcgtcagcctgcagattcactccaccaccacttgtcgtcgtcgtcgtcgttggcgacagcactactattgatgcaccgagctccaccggcggcggtggcggc

SEQ ID NO: 10455 - DNA, 1723 bp, Oryza sativa
tggattttactttgggacaatgaacaagtatctgtagtttcgaagtagtaggttatcaccttcctcaaagtaacggatcatatgtaccgtatgtccagaggaagcacaaaatgcgtagaggtgacttgtcttgtcaaacatccttggtgtgaagcctcttgctgtgaaagttctgtattcccaagttcccaactagtccatatctactgggaattgaatctctttcttgcagagctggaactttgtgcactagttccaacaaaattagattcttgcaaatatggaaatattgtattgtaggagtagttccaacaaagttcgatgaaatttctcgccctttgaacaagtctgtcggtcagtgcttttcatgtccgttggtgaagagccccgttgtttcgcttattcatatgtttaatccattgttttgcttattcatatttttaatcccaaattgcttattaataaataaaaatcatatgttagtaaaacttttatatatatgtctctttagtaattcaaaagcaaatgttgtaaaataaactacgatgagaaaaacaaaaaaagttaaatttaaaattaagttataaaatttaaattttgttctataatcatagatgacatatcgggttaaaacgaggtaagtgtggggaactcgtgaaaatcaaatataattcatgaaaaaaattattagaaatatatgtagatatgaaatacattctgacctctcaagttcagacttaactttattagagtaaaaaagataaatttcgaacgcatagtaacatggcactattcacttgaaatttgctatctttgtctcttttgaataaagttgagtttggacttgaaatttgatgagaacatatttcatatatatatatattataataacatatttttataactttataaaaattttaggtataattttcatgagcttttaacccttaactcccttaactcgttttcacgagatatttccccaataatcataatcatgagcgaaataattaggccagaattcgggctggacctcgcaagttgccagacacgcaagcatacgaagtggcccaataaagcaaccagactcgagtcagaggcatccgctccgctccccgcaacgaacacccccgctcctcctcctctccagctcggtcggttgcaggtgggaaaggggaagagagactcgccagctcgaagtccaaaccctcaacccccgcgccgcgccgccccgccccgcccatggccgcctcctcctcgcgctcccccgcctccacctcgcgccgcggaggcggcgcgcggcagtccccgttcttccgggacctcgcctccccgatcccgtcccaccgcgcggcctcccgcttcgcctcctcggcggcggggcccaccgccgccacgacgccgccgccgccgccgctcttcaccctcgacgaccgcgccgccgccgtggacttctcccccgacgccgcggcctccgaactcctcctccccgtcgcctcctccccctccccgcgctccgccgcggccgccgccagccgctccccgtcatgggaccgctcccgcggcagggcctccgcccccggatcccccatggatggggtcgtggagccgccccggaaggaggtgcttgctttgccgcctccaccgagccctggtacccggcgcctccgcctccggccgccgaggcacagtcgcctgttactccggcacctgtgtcgactgg

SEQ ID NO: 10456 - DNA, 621 bp, Oryza sativa
aaaagggcattcgccgcgaaatccgccgaattgcggaagaagcattgcggtggcgaggtggtgagcacagcgaaccagtgcgtgcggcgggggcaagaagaagaagtggagcgagtggtggtggtggtggcggtggcaactcacccttctggacctggaagaactggagcgccaccccgagcgcgtcgccgtacttggagtcgatggccccgggcgggccgggcaccggcagcggcttgagcttgcgcccgctccccccgccgaccttcttcttcatgatggccaccaccgccgccgtcgccaccagcgacgccaccagcgccacgatcagccacccgcagcaccccttcgtcttggaccccatcgcattcgcctcctgcaacccaccggagacgacgacgcctccgcggcgctgctcggctcggcgtctcgctcgctcgccgcctcctcttctactgcaggggatgggctcgcgtgggctttcggctgggttggtggtggtggcgctcgtcgcgtactcgcgtgtggtgcggccgcgggggggttggtgcacggtcggggtaggggtgaggtggaagtctgggagtcgctgtcgggtggggcctaggcgtggtgggccac

SEQ ID NO: 10457 - DNA, 722 bp, Oryza sativa
ttctttaacggccatactttagagggctgcataaccaaattgccacacatatgaaccttacataggtgaagtgttcatttcctataaattttcttattttaaaaaaatgaccataaggttggcatttataaattgcagcatgagcaaactagaggtttctcaatcgttgataggaacatcatgtaatttgtggcatgacagactaattatcggtcagccagacagatcgcaatagcaacagggtaggaggtgattatctccaccttgaactgaaattccaaacatcacacatgttttcagtaacacacaattgtgttgaacgaaaccgaacaagacttaaaaaagaaagattacaatatactacaataaattgttggatccaataaaattatgactggacagtacacttgctatcatccgtgtgcgtggtagcttgagaaggagctatggtgtgcatcgaaggcggacgatgaacaagagtgaagctttctcccacatcagccgacccatagatttttcgcttgatgtagactgctatcctactatggcctcggctgtatgggaattacttcacaaacatgcagatatcatgctcttgaatagctcatgtagttacagcatgattcacttgcagcatctccaggattagtcttccatatagttcatagatcatacaacctacaaggtttcaatgaatgaaatagttaaaacacgggggatcc

SEQ ID NO: 10458 - DNA, 752 bp, Oryza sativa
ttgagcgtcactaaaatatgaagattttgtctttagaagcaaaggaacgtgatctgataaatctctgtttagagcaacaacagaagataaaggatacttttgctcccattccgttgatactaacactctatccaatttctcataggttgggtttgctagattatttgcccaagtaaagttcctaccagacaactgtatctccctaaggcacaacccatcaataacagcattaaacaaaaagggccatctatcatcataattgttattactcttatcattaggactacgaagaatattaaaatcaccaccaataagaattggtatagtctcatgactgcacatgttaactaattcttcaaggaattgatctttaagctcattctgtgcaggcccatacaccaaaactaaagcccatttaaaattatcagccttatttcgtaaatgaaatttgatataaaaatccccctcatcaatcaaaccaatgtcaaaatttagaagattaattcctaaaagaagaccaccagatctgcctctaggagatttacagtgccacaaaaaatctttactaacacaaagattattcagagcagatgtagaaaattccttcttaaccgtctcagataaaacaataaaatcaagttgatgttctttggttaaatcagaaacaaacttatgtttttttcgggtccttgaacccgtcacaattccaaaaaaactttgccactattagacctaacgagccacatgctcaa

SEQ ID NO: 10459 - DNA, 515 bp, Oryza sativa
ccccccccccccccccccctcccctcgtcaatccccaaaccctcctcctcctctccggcgatccacccatcgatcggcgatgacgctggggagctccggcgccggatcgagcgtcgtcggtgagcgatcgatcgaatccccccttcccttcttcccttcccccccttttctcgcgagtgcctagggccttcggatcggaggaggctgaggaggagaatccacgcgggtttcgctccgttccgcgcctcgtaactttggcgctgtgtcccgccatggctgtgctgtgctcgatgtggttggtgatcaggcgagacgccgacgcgttggtttgtttgttggaattagcgatctgcggtttttgtaccatatgggttccatccatctggtgatttagcttggtttgcatgcgtgcagcggtcatgggatctctctagatggcctggtttgctcggtttgcgaatttatttacggcatgttgatgatggtttggctttggcagtaaatttgtggtatcc

SEQ ID NO: 10460 - DNA, 560 bp, Oryza sativa
tggatcccccgtgattcttttgttctgtaatgcaggttgggccttgcagcatatggtgatctgatctccagtgcacatcaagcaatcaacttttaacgctgtggtttattccatgctgccagttcaccaagctctgcatcaacttgcaaggatatcataaaaaaaataaaaaataaaaacaggtgccacttaaaggcaccattttactgttactagtatgagcaaccgctctagagcttagaggtgttgtaagtccgaaaaccgtgtctgaaatgtgggtattttgatgtgtataatctttgtccttttgcatgatcagatttaaatatcctgtgtttatttctacctcttctgcttagatgccatttctttttaatgcttgaatgttccatgcattgctgatgaaagaggagctaatttgtgtcatggattttgtccttgatattcacatatatcaaaccaaaatgctacataagcaacctagatctaagggatcgcctgaatatgatggtgtgatttagaggtttaagtgtggcctgcagtctcagattttggtatct

SEQ ID NO: 10461 - DNA, 48466 bp, Oryza sativa
atctagtggaggaaaacacaaatttcctctcactttatttcagccacaatgtgagatcaactaggaataagatccctcgatacgatgatggttcctctacatttgagagttcttgtaaccttcaaattttccagtaccctggtcggtgttttaatcgtcgcacatgtcgtgatctaacagtggaggagtacaaggctgctttcttgtatattcttactaatatttctgagatggacactttgtttgagtaagtattcatattaaaaaattgttttaacttaataaattcctattattttccctaatccatccctacatatagacaatttgataaggaacaatggaagagcagaattgcacctagtgataagcaacgtcatgacttaagattaaatggttggaaatattaccgtggaactaaacatgggccaaatttctttgactggttcaagaaacaagtaattctgcctactttttaacttcctctccttccctttatttgaaatattctaaactagtaactttcatttatgcagtgcatggcaaattctagtattgatagcaccttgcggcaaatttcttatggttttcctagaagaataaccacttatggatgctatgatgtgaatggatatagatttcgttcagagaagtatgagagtgcaaaatcaggattaagtactgtcaatactggtgtttgtgtgtcttgcgttgacgatgataacaatgttattgactactttggtgtcatcgaggacatcatcaaaattacttgggagggcagcacgaacctagagttggttttatttgattgccgctggtttgatccaacaaattctggtgttaggcgaactgaaaatttgggattggttgaagttaaccacacatctaggctttcaaactttgaaccatttgtgctggcaagtcaagttactcaagtttattacttgccttacccatgtgattccagaccagatttaaaagattggtgggttgtacataatgttacccctcatggttggcttcctcctagtaccacgaatgagtctgctcctcctaatgatcagccacaaattgacacattctatcaagaagaaggattggaaggtcattttgttattgatttaggggatgacattgaaatagcaaccacttacatatctgatgagataactaatgagaaagatttggactatcttgccaaatgtaactctccaacacaaggagatgaagagctggatgatgaggaagatgatgaagaagatgaagaagaagctgaacctgaagccatcatttatgatcctgaagatttctgattgtgttttatgtcttgtattttttttccttgcttatgttgtgaacttgtggtcagtgtgttcttatatgttgtggacaagacttgactaagataagctggatgttggtatctttgtgttactgaaatatgctatatctgatgtaatattgtcttaatagcatttagtttatgtatttaattatactagtaagttatttaattagctgtatgtgcatgtgcagatcatgaacaaccttcgccatcggtctcttgcttcaaagaagcgcccagctagccaactttccaatacaagtagtgctaatggtgctagctcaaggagtgtgccttctacaaatggcactcaagtgaaccctgctaactctaatgctgaaggtcagagtcaaggaagtcatcgtgcaagtactgagcaagctgaacagcaagctacacaaagaggacgaaaggagaggtcaaggaccagcctggctgtaccttgaccgggttggaaggtgggccttatacctaggggtgaaatgtaagtatacattcataaattttttaagcgatgcaagaaaaattcagaactgctatactaatttagtcatttgctactagttcatttgaaccaattatgtgaattgagactaagtgtgctaaccttgtatacaggcaaattcaagtatgtgaattggcatgctgcagagtacaagtatacctcacagcttggggttattctgaaacgcgaatactcaggcactgtgaaggaccttgacaatgatggtagaattattcgtagccgccctgcactccattgggcagattattgtttgaaagaaaatgaagaatatggagagacatgtgcagagcgagtggtgaatgaattttgggtaaccgtaattctttcctatcctagatttcaaagaagtgtttggttttgtttttttaaatctatttgtatacctgtaacacatcatgcagcgattgttttctacaagagaagaattaaaggcagaggctaaccgtgtcttacaacaatatgcaaacaagcgcgtcaatgatatgatgtatcaacttcgtgttgatgctgtcaagctctacttctttaaagtgcgtggggaaaagattaaagacgaagtagcccgtacaattgaactctcagacgaggaatacctgctggctcgtgtggaatgggttagtgaatcagattggccttctctctgccaccactgggacactgagcaataccttgagaagcggaaaaaagcccaagattcaaggctacaatctgaagacgattctcggaatagaggaggatcaaggccatttactgagacacaacagtggctggtagaaaatctgatcaagtaacatcatttcttgtgtattatttcctatttgagctttggttgtgtaacacattattggctgcatttgtaggcacatgactttggacctgagaaggctactggactaaacacatttggtgttatgaaatcaggtgcaaaaaacgtggacagtactggaactcatggacggatcgacaaccaaaaggcagaaaaaatcatggtataaacacagtgatctttcctaactatgtctatattttctttctctagctactttatctccatcattgctgcacaaacttagaaaaggctattgttcttgtaggctgactatactgcagtgactagctcaggaactcaaggagattcagatggccatgaattagatccaaaggcactttattccatttgcaatggactgccacatggacgccttcccataggcaatggtgctatgtccaagtctactgttatagcggccggtaaagagacagcacctaggccatctaccccatcagccaatcaaactttgcgaaacgaaaatttaaaactcacacgcgaaaatgcagaacttcgccgccgaatggattccaatgaacggctgatcagggtaacccttctaatataactgtacaataatatgtgattctgcattctagccttgtctaatccctgtcccattttagtttctttatgaaaagacaggagtggaaccaccatctgaggaagatgtagtgccacctgctaatgaagatctaatgtctcctgcgcatgtccaggtaagttgtgtaatgaaagaaataacactcatttgtctcagtatattaaaaaaatccaacctaagcaaccatggtacccttttttttcttttattttgttaagagaactaatcgtttttggtagcagaatgtcaacaacacatgcagcagttcacaagcctcatgttgagaactgtaacacctgggcataacctcattcttagttctaaattatggtaaggtagccaggaatgtcacccctattagaggtttggaaatatagatgtctgaagcttgtgacatagagagcttgattctagtaactttttgctattctagctggattcgattttgttttacatgaagtttggatatatggtgtctgcgatgggatattaaggatttaagtgtaattgttttattgctgccacaaccgttagtgttgtagtatactgatttctgctagcattggaaataatggtttgccacaactgtttctggtcatgtcatccaaagtcaggcatgcgatttctggcattatttcatttcaatgtttgctattacttcagtggaaagtctagctagccatagatgttttttttctttataaggtatatgcatgttcattggatagatacttctttcatcagaactttggcatcactgcagtgcatacttccaatcgcatgacttaatgttcggacctatttattgcagcgaactggttcttctcatgcgggctcacagcaggaagctgaaaatgatggaaccactgacaccaacatgggcagtgaggagaacgtggtctgtgaggtgaacatcggctgcgaggcgaacaatggatgcaacagaaatcaagtttgcagcagtggacgggctatcgcagcctagcttcttgcatttgcacaatgcatcggtgacgtggacatggcttttgtttcgcacatcagtacttagcccatatattattttggtagcaacttagtagatagagacttcggtaatacttcatggcctgtttggtggtgactaaactagatgagacttaacatagtttatgctcttttggtagcaacaaagtcagattacacatgctcttctgaacacttaagtagtggctcacaagtgtattggttgtaagtaatggctaagtagttgtgcaatgtcagttagcatgtcaaggtgatatggggacacctattggttgtaaacctgattactcctatagaatcagtactagaacttgatgtactgcatgtatggtgatgcaagtatatgaaatggtggctatttgaatcaattggtggctgagatgatggctatttgagtcagctgtgatttggcattatttgaatgattttgtgatttctgggcatgttatttgtgaagctgttgtgatttcattgtttggatgcattctattatgtaagtgaaatgaaatcagatctttttagcagcttttattagctgtttttttttcaatatgctccaattattctgacggttttattataaccaaccgacagaaataatataattctagccaaaaaaaaacaactgcgacggtattttcctgtcggttcactcacaaagaaaaatattgtgacggtattttcctgtcggttccgcgtcagaatttacaggtgaaaaacctgacgccaatacattttcctgtgttccacccccagggaaatacccacagaaattattttcctgtaggtaacccgacaggaaaattgaatttctccgtggtgatttttctgtcggcaatttctgacggtgaaccgacaggaatataatttctgacggttaaagctatttttctgacggttttgcttctacaggctaggcctggagtctggtagtgaaagaccaaaacaaaagttgtagatattgatgatttatataactttgttgttgatgactttttcagttgaaatcatttagtatttgaaaatgttatttgaacatgtcataatttgaaattcaaattcaaattattgaaacagagtcatatagcaaaatgaccaaaacaaaagttgtaggtattgatgatttatacaattttgttgttgataactttttcagttaaaatcgtttagtatttgaaaatgttgtttgaagttgtcataatttgaaattcaaattttatataggtcagttaaactcacatggagaaaaaaccaaaataaaattgtttgatctcaataagaaaattgaattgaaatttgatgttcgaatcaaataataattgaaaagtagtaattagaggtcacctgtcattgtggtttgagaggctggccatacgtctaccttggcttaacggataaccatatccgatcatcacgatgcgacgtggtttctacgcgccggccgtgcaagcagactggcatagcgaaattggacaaaggatgtatgggtcctcaatgagatcgatcttgcccaaatagtaggacagtgtctgtaccggctgctagcttctcgctggccgccgccgacgcgtgcaatggccgtgccctcctgtatacatgcatgtacatcaaaaccaatagataatctagattagattgtggccaatatcaatttaattaggctttacagagcctatgagtctacggttaaaatattataattaatcaaatcaacggttaaatttttataattaatgtgagagcttctacagtatccgatttattgtagatagatagatatgtaagtagttacaagagcctcagtagtacctgaggtccagggttcgacttcccatgaaagcgaattttcaggatttaatggcgctgtgctttcagtggtagacgacgtacccgtcgacagtgaggcgcctatggtgacttcgtcgatctctccaagatttgccggtccagttttcgaagatgctcatatgggtagggtttgcgtgcgtgtgtttataggggtgagtgcgtgtgtgttgtgggtgtgtgggttgtactgtgtaatttagaaaaaaaagaaatgtaggtagataaaaaaagggtgaaaatatatgtttttttccttgaatttgcaagaaaatactggattgaaacgtttggcaaaagtataccgtcgtcgtattcctggttagcgaaaccgtcaaacggggcgcggtctcgcgcatcacccaccgacaccgctgcaagcgccacgaaaacggcatggacgcttttatcaaactaaaggagcagtctcgcttgactaatcaggcattagttaattaattaatgatcttggctcattagttatttaattgattaatctgaattaattaactactaatgatactacaccaattaacttagcattaattagatgtttgagtggtctcgcttgactgacctgcaacatgaccctttaatcagattataattagttaattatcttattaattcgttaattaatatgaattagttaattactatgatatcaattatgctaaaggggtggatgaaaatgttgatattcgtggcatgtttttcaaactgctgaataatgtgttttgtgtgaaaacttctaatgtgaaagttgctctaaaatatcagattaatctatttttcaagtttgtaataattataactcaattaaccaccgtattttacgtaaaacactcaatcttaatcttcatctttatttacgggagaaaaaaaaaacatttgaagcccacctgagttcatcgccctggtctcacatggaggagtgcaggcgaacagtgtggcggagtggggcatcgatattgcataacggttccgcgcgaccacgcctgtctcttgcgtgccaacactatgacatcttggggccgtgacaacgtcgtccatttcgcgccaacgcacgacaccacccatctcgcgtcgcatcacacaagactgtggtgtgacgtcattttcgtataatgatttagcgataacgatggtatatttgtgctaaaagaattacatcccagaaatttatgagaaaaatataaataaacagtatatttttaaatttaattctagatagatattggtaagcaggagcggagttataacgaaaaggaggaacactactacttcctccgtacttcctccgtttcaggttataagactttctagcattactcacatttatatagatattaatgaatatatatatatatatatatatatatatatatatatatatatatatatatatagattcattaatatatatatatatatatatatatgaatgtggacaatgctagagtaaatgttaatgccaaaataataaggaagtatttcttgacaccgcataaacgctttacacgagcatttttgacccggctctagccaaggacccgcatacatcatgtatttccgtaaatgcatttaagcaccgcctaaaaaatatatttacgcagcagatatcttcagattccacctacaaaaaagttttttcacaggcttctattgaaggcatccacccgtgtaaacattaattttaacatgcggatctagcctatgaaccagctgcgttgttctattattgaaaaaaaaaaccagcagctagctatgcaataatgcatgcccttacaaaacattagcatttttcttatcaacataaatacacatcaatcacattacaaattcaaagccatatcacatagatagagaggtagtattgctaactaagttgatcatacacattgaaccgcatcaacagaatacaaattgacatacatagtttttagtcatacaaattcagagtccaacactggcttgctaatgtaattactatttaagatgtcaactccaaacatgcgctcagcaataactaatgcatatatgtaaggccatgtttggatcattagtcccgggactaaggcggtgtttggatcctttagtcctcggactaaaatactaaacactttagttcatgcctgtttggatacagagactaaaagggacttaaggtactttagttcatgcctgtttggatatagagactaaaaaggacttaaagtcattaattgcactgtacaatgactatgttacctctaaaaccattgaaaaagagacgcaccatgcccatgtgtgggggtagcgggtggaaaggaactactttagtcccaataagctcctcccatatatagggactaatggactagtgcactttaagtcctttttagtccctcctgtttgggactttagggactaaaagggactaaagtgaagggactaaagttttagtccctccaatcagatagggcttaaaattagtccctggactaaaaactttagtcccttactgtttggatccaatgactaaaagagactaaaggcacgtggaccaagggatagagaagagagaggctgccactttagtccttttagtcatccctatttggatttttagggactaaaatggagggactaatgctttagtcccatgaaccaaacagggcataagcactttgcgtgcattaagtcttcgtagaccgtgaagtggtttaactctgaataaaatatatattaatgaacaattcaattggatggttagcacattaggagattcgccctacatactagacaattatatataatttatttttagataatgagacaattatatagaatgtaattggaaattagaatattaatgaacacttcaattggatgggtgttgaaaagactgggagacgtaaatgacacatcattattatcttccagcccttatgtgctagacgcaatggtgtaattcgattatctttaataactttcaaattttcatgttagaaaaaaatatttttctacgatctgtgcgagctttaatccaattaattaatgttgtacataattaagatatattttacgcaaagtacaataatatgatattgtgtatcatattacaataatgtgtatatcaataagagaataaccactttacatatcatcgataaggctcacacgtctaagggtatttccatgcatttaaagagccacctgttcaagtagcaacatgtttgttttagaaccttttctgttcggaacttcagagaccaaatatctgtgtaagaaggatatgatcacatcaacataaatggtagcaaaattcgtttaaaacctaatcaatgtgggtgatgtacttgatgcttacttagaaaacctaaactgaccctggaaactgatgatatatacatgacactgaatattttcactaacatacagtacaatatggtttcagacataaaaacaaaaggagtaatatctcaattcatttcccaaattggatacgtcatgcatgcaatcaaatttggaaattcatttatcagttcatcatctcccaaattgcattatccactctttcagagtacataaataaacaacaaaataagctccaattattacatattttacctctacctccaacagcataaatatcatttcatacgacaatcgtcggacgagcaaatatatatgcatagcttccattcatctaaaaaaagaatattacaccacaattttcattcacacacagtagagtagagagttaagagaaataaaatagcactaccaggcatgaaggaacatgttctgcagtgcaatcggtcccatgacatacatggccttctcttgtagttttgacaaagagaggaaaacctgatagaagctcaattgaaaccatttggaataatagaggtgataaactgataacatataaatggaacatccggcgtcagcctccacatccgctgcgcctcgcgtccgctggcagaaatattttcgatatcttcagatatccttcagaacttggaccacttgcagaaatatatacatgcatgaatgattcaaatatatgttctagctaaatgaaagatccaaatattggttctctagtgcttatacaatatttggatgaagagttggatgaagattaagattttcgtggcacgcattttaaactgctaaaccgcacgtttcgtgcgaaaactttagatatgaaagttgctctaaaatatcatattaatctatttttcaagtttgaaataattaaaactcaatcaatcatacgttaataccacctcgttttgcgttaaagacttaatcttcatcttcatcttcatctttaggagaaaagaacaccaatcacaaatgaacaagtcagtgatgcataaaccaagaagtggttcctaaaatctagcttcatatcacataccaataagagtgatgcataaaccaagaagtggttcctaaaatctagcatcatatcacataccaataagcggtttagggtgagaacagcgagggaaaaagttatggatttttatagatgaccgagtgagaaggtaccgaaaccccacctaagagcagatgtcggtgacggtgaagatggcggccgcggcaacgccgttcgtcagcacgggccacgcctcgatcggtcgatcaatattagccactgcatgtttgtaatttctcacttttagactttaaaaccaaagttcagactttcagagttaccttttgtcaatgaatccaaagttcagactttcagaatcttagccatggtaacttataacttaaactgtcttatcatgtgctttatatctatctatttatattaaaattccattaaactttctacaaacgctctcaagccgccatatggcgctcctacaattgctcctaggccgccacgtggcacaatctaatatctcaccgtcaattttcatttaaattggtggtcccgttattttataccgttagattagacctatgccgttgattttcatttaaattggtgtacccattattttgtaacaataaatcagatctatatataatatacctttcttccatatgtacagtttgccggaaggaagaaaacatagttacgtacgtacgataaagataaaaacttcctcatggttaacatacagcgctactactgtacgtatgagttcatacgtacgatacaaatactaatacttccatacgtacaaacgtgcataatcttttctaattttgctggaaaaaaaaacatacacatgaacataaaaagatagaagaaacatacatctataaaaatcaacgaacggtctttaaatatgattttcgataaaatatattacttcacaaatataaatatatttagttaaataaagatctataataaatatccaatcaatgttctttaaacatcttctaaatctatctattatatatgaaaagtatattaaactttttacaaatacttttacaccgctacgtgactctcaaataaattagagaaatcatagaaatatattatatactaaaagtctattaaacttcctgcacacgcttctatattttcacgtggcgctctaatttagagtaatcctggaaatttagagtgaaaaaagaaaagcatccaaccttcaatgttcacttaaattagtggacccattattttaaacaatggattagagctcttaaaattcccattgctaatctctatcaaaaaaacataatgtgcttatgtcgtactatcgtctccctaccggaaaaaaaaaacaaaatttaaatacctacgccatatacgataaaaaaaaagatcaagccaaaaaataaaaagaaaacatgcacacgtacgtacatagtagaatcgaaaagaaatactaataaggaaaaatcatcaatgctggcacagatttattatcaacaacctttaatttacgattttaagatctttctctccaatctaaaattatagtcccgccggtgtagatagaaattcctttatggtctaattccgagcggtagtaaataccatgacttagtaatatttgattgatcacaatttggtatattgcatttattataaaggttgctaaggaattcattataggaatgcttccaatggaaatggtttgctcttgcacatcgaaaccaaaaattaatcgcgtggatacgtataattcagaagaatagatgagtgattcatacacaacattcctttcttttatcgaaggttctagcaattgatatcaggattttttatttaaatctaagagacattcttatcacataagtagtatattaaaatctatcatctattttacagtaaatatatttcttttttcattgtaggataatctaaattcccttacagtatatacatagtgatgtatgattcctttgagcatttttttaataacaaataagatgcccgtgcatctatgtgaaattcctttccgatttatattccaaaaatattctccaatttatattctgtcgttatagtgtttgaaaaacaaactacaatacatgcccccgcgaatgcgcgggctaccttcctagtttaccaaatactgtgaacattcaattgcaaaacctctgaaaaaagtaggaacaagcagtcaacaaaattcagcaatagatcttgagtatagttagagaaggttgagatgtatactaacaaaataaattgctttgctagcatgttcaggtccatagccagtgaagcctataagattgtaatacatgttaattatctgagaagcatattgcttaacgaatataacttgaaatatcattacatcagtgcagttattaacagtgaaagcttcttaaaataaacggaaaagcagtggtcaatcgacattatttcttacccaaaatccatatcctgctaaaaaaattcagtagacgattagctctatcaattggcacgctcataaacaaataatggtcatatcttccaatggaactagaaccagaaccaaaatcaaacaggaacagagtggaccaaaaatcaattggtgttgacagtgaatcagagagcgtggggcggggtggagctaaaatgatgtacaggaacaggttgaagtgcaactcaatgtactataatatttgtcattgtttttttttattttggaaaataaaaagtgtgcatagatgccctcacttatctttagaaacaaaaagggtggacagtcgcccttaaaaatgaaaacgtaaaatgatcaaatacatgaattatgcatctcgttctattgttttggttgattctttaggatgggaataaagagaacgggggaagagagggagggggttaaggatgatgatatatgtaccttccggttaatcaggtcaaagcgggagatgttgttgaagaggccgagaccagtggacacgcagaggcggttgacgaggtggagactgggggcggccggcgtggtgggatgcgtggagatcgcggggaggatggtgtcaactgtacatcattgagcacatagccaaacaaggttatgaggtttcttctgccagtaactagcaaactgctgcccacaacagcaatggtacacaccagaataaatcaacaacctgcttccatgcataatatttattttgagaagcataaaatcaagggccagtgttgcctacaatatagttcaacataaccatccacttaaatgagaaacatcccaaatttttcatcctaggaaaaaaactgcaaaaaagaaaacaaccccattcccttatctcaccaatccagatgtattagttcaccccattccataacctgatcttcgtggaaacattgtatatactgaactgtatgtactgaacaaacgacacaacaattggaattgtggaaacagtataaatcaagatagtttcgtacagaaagattgttcgtttcccaccagttatccccaaaaaaccaagactggctattgtataatggaaaccacaaccctccagatctcagtcacagtgttagcgttaggcataaacttaccggtgggcgcgcggaggagaccgagatcaggggcgcagagaaaaccgacgaggcgggcgcgacggcgggacgatgttctggtgacgaagttcgaggtggagatcggaggcggcgtggagaagggcgacgacgagagatcatggacatgccaacggcagggttgtgggagcgcgggtcgaggcgtgcaacggcgaactggctgcgtgtagctgggagtgggtcagggtggcaggcagaagggagaaccggcggcgttgcaacagtggttagggtttagagagcgacggagggggcagtgggtgatgcgggactgtggggggtgatacggaggaggagggatggggtgtgtgtgcacagtatctaggccgttggattatacaattgatgaatatgagccgttggatctgtatgatgtaagagtataagagtgtaaggatgagagatgagtaaaatgagttggtgaattatagggttgatgaaataactaaagttaggcaagagtacgttagtttgtgcctcgagcaagttggtttctttcctaacaacatctgccaaggatacatattccgacggacatactccacctatcgcttacacaacaattatggccactgctacagaaaggcctttggtgccggttgcaaccccatgtagttgtcggatttggtaaccggcacctcgcaagtggctcagttgtgaaaccaaataggtgctgacggtatagaaccggcatctataaggataaacgaaccaaaaaaatgccggctcgactcaaataaagccgacccaagcacgaatcaagccgagcacatcaagaacaacatcaggaacttcaagaacatgtcaagaacatcatgaacacagcacagaacacagaacacatctaagaacacactaacaacacaaaacactttgtgtcgcaagccgtcacatcgccctctgacacaggatcactgatatatgctttcttgcatatatgtcttaaccatcctggagggtcagtacactactagatacataatataaaacaattcctaatttgtcaacgtttcaaaatttgtcacttactattttgcatattatgcttgattcgtaaaactatttgtaattagttttgctgcaaaaacaatcccaatacgcatatcatatttttttttgctgcaatttggtctttaccaaagttatactttgtctaggagtatagtcttcacaattttttattgatattcatcaaataaaaagaatattttttaaagaacacagcaggggaagcccccactgtttaagagattttattaattaaataagaaaagaatacagaaaaagtgaaattacaacaacatgatccaactcttgactacatcttgatcactttcctttaacctaaacaacaagagcagaaagactccgttaagaagttgcttccaagagaagaaagaaggttgcttattatcaaaattaggaccatttctttgcgtccaaatattctaggctcctaaaaggaaatttctccataaaacatctgccttgataagaaactttagactgcctcatcatattatccataggagctatcctagatagtgccaaaagcattctagcagttcaccaaaaaaggacattgaaaaaatagatgcaaaagagtttcaatgcattgttaatgacataggattgtttatgatccgacataaactttgtattcaatctatccatgagtaaaagccaaccaaaaactttaaccttcaattggactttgtttttccataaccaaacaaagcgctgcggtggttgcaagcttcaaacctccccaactgaaagtccaactatgatgttcctgcgaaagatgaagatcactaaccatatctgacaaattcacttagtcattatatgcttgttgagataaaggcagatcaaaattatcttccagctgtgctgtcatagagttatggacataaatgtttctatggacaaaaagaaattccatgaaacatggaaaataaatctaatacaaacacttagacaatattgaatcggctagcttagcctgcaatggctctacatcagtgtcggcatttcttacgatcacagataaatccacaatcacacggtagtattcctaagggtatcatatttacattctgtaggtaaggcgatggtataaagatatgatttttcttttatatctcttaatcaatctataattaattcaccaaagcctaaacatgggctaggataataattgataaggtagtggacacacacaggagattcacctctataagaatatctagtagggaattagtatgaggaaactacgattcatatgtacttctatactaatcatgttcagtatacacttaacatatacatgcttacaatataggactcagtgccaggcacccaagtactaccgagagaccactccctgctggtctgtgttgacggtcgttagcgatcagtttcgaccgtcaatattactaaaatagaggagaactagttatgcttgcaatgcatatccatgttagaataataatattccactagtatttggttcaccaaccttttgcagagaataaccataaagtggaggagaatcgacatcgaatcagacgataaatcaatcggacgatgtcgagaactagacttatgtatgaatgggccaagaacttagaattgacataatggattgggccaaaattcacaagtctgcgaaagagagcaacagaggaggccacctgtcgattttgggccagagcggcccgacccatggttcgggcgaaccccctacaacgccattcgatctaggtttttcctggatggctgagatggctccccaatgacgggtggtgagtattaccgaccttttcaactgtcataaccgtcattctcaagctataaaaggagatctcatcctcacttcacctcacacacctcaagcaagagctctctcatattctttcaagttagtttagtgttctccagctagtggaataggaatagagtagaaatcggagtccggaagccttcggaagagttcgggtatggctctagtagctcttctcttctcttttgtaagctttgaacttttattagaatactcttctttatacatttatgatattgaaatactttccgagaatatgaatgccaactttacattatgttcatgttatactgattatactgcttagcctatctagaagatgctttggtacgggtatagtgtttgattatgcaattactctatgtcatgacgatgatattagagtagtatctggtagtttaggcgtggtgtctagattacatgatatcattatttggggttatatgctgcgaatgagaggtgggccgctgatggtgacagctcagtacgggtattcctctgcgcgtgtgttgacgtaaaaacacgaggcctgggagatctgcttaactccagtgcaggtccaaaactcgccttcggatatgctagcgtgccagttgatttgatcctgcaatcaagaagaaacgaagacaaagaaaccgtggttaaatccataaacaatagccaatcggctgggtgctgatgacatatcatttatctttgagccgatgtcatatatgcatcgatcggcaatcataaataagtaagaaagaactaagtctactcgatcggctgtagatattaacaatatataatcctcatgtcgatatatacttaaaccaagtgattgggatagatcggtcgccatgccgagacagtataaatcacttagatcgaaatatatattaacaacaagactatatacgttcatagcatagccgatcagatagatctagcatgtatcggctaatactccgataccactctatattaagatattaaagcaagtagaatatactaaacaaaagcacaatatacttaaatgcgacaagatcttaatataatgggcagatttaacatgtcaatcaagcatatggaataactatagttaaatcaggtaagatcggctgaaaccccgatgctaccctaatcgacaaccagaaggtaggctaaaggttgaaattctaagcacgacttaatagatcaaactcaactgatgcagcattaagtatgaaaagaagaacaatatctagacaatcaagccgctggatgtgtcatagagtggtagatatcctatataatctaagccaacatcgttattttacctaatcggctgccctctattagcagatgttagccgattatagattagatgacgatattgtcgaagattatgtaagatatgtgataactcgacgaattacataaacaagattagagtatcataaagatggaagcactaatctcgagaacgcaagccgccataacaagttttacctcttgttgaagatcgaaaccgatacagctcaacccgaaagcaataactcgtcaaaacaaaacgaaaataaaaagggtggcgatgcgccgagattgtattgaacgtgtgtttatttgattacatggggcttgggatctatttatacccgagaattacaaaacatgtccatatcggacacgactcttatctctaacaaactctaagataccataagtctttgcggcagacttttgctcaaacatatctctaaggaaattacataagatatcgtaattaatagatacaattgccttctcaggactctatccatgcatggaaatcatcttgaagcatatcaactcgacccgctgacgtataccgagtcgtattgtcggaattggccatatcggcttacctagtctgactcgaactcagtcgatcctgatcgtagccgatttggactcagtcgattcttactctgtttctgaaacgatcttcgtctttgattccactttgatctaatcttcatcttcgatactgatattaccaaatttggttgttaacagcgtgtatattatcctaagttaatttcctggggagggtactcctccgtatttagccccggttgtatggtcatgacgggctgtcgtaatgaactcgatagtcaggggtggcttctcaaagtaccaggagggcattagatagagggtattagctagtatatcagataactaggatgtatgtatgctatgtatactagaagtataggaatagattctctttctattttctttccacttagcttagtgttgacgaaaaaattgaacacactggcctaggaaatctgcttaactcctgtgcaggtccaaaggttggtgagatgcgggcgtgccagtcagtttgatcctgcaactgacaagatatgtaagcagcaggtaaaacagccgaccggctgacaagccgatggagtagttccagccaatgccgataccagccgatagccgatgccagccgatagcgatagggttctgagctatcggctttatgtccaatgtagatgatgatataaaggcaatcggctgatgataatcgatataattaaacaatataatccagtagaaaccagtcagctaataatgatatgatagaataagcactgatctgaaggttaaagcatacatcggctgtaggtctgatgtcataaaatccacaagattagattaaacgatgaaacctttgttgcgatcggctaaatccaatatgtatacaatccttttaagccgaagcaacgtccagataactcatcggctgaaaccccgatgaaacccttattagcaatcaagaagcatgctagatattatggttctaagcatgacttagtagatcaaacttaactgatgcagtactaagtatgaaaagaaacataatatctagacaatcaagccgttgactgagttttcggggtggtagatgtctaagctaatctaatctagcaacacgatttagctgataccggcataaaccctaaaacgagaagcagccgatagagctaaattgatatgctaagactagattaacagagacatatgataaataggtaggcaaatatatcatccaaactagagcaatccaacaggtcgaatgtaccgatgcagccttaaacgacaccaacgtagacgatacaattgcctggaccggcggaacattggacttaccccttcgccggagatcgaacaccgatgcagccctgcatcaggtgccaagtcccgccggatgataatataaaatagaaaaggtaaaaggtggcgatacgccgaattgtattgatcgtagccatagattacaatgaccccgggtgtacatatttatacccatgggtagatactagtccttgtaggacaagaaagaaactttcctaaagataaaaggaaaacacaaagtccttatcggacactaaacacactataaaagaaaactaacaaactattcttaattaatagatacacttgccatgccgcattctctttgaactcggtctcttctggataagcttcctttagtatatcaatttccttaaccgaatatagcaagaatccaacaactgacgacttgataactctcatcggctaatctcaggacttcgaagctggtgctgactctaagctgatgaatactccgggcttaccaaatttcactgttaacacttagatattttagtatgagaatgagtagcttcatgcttgtgtgtcactctacccttggattatcttaacccctgcttagactatggttattgcaagtaacatataaattattagtcaggttctctctactatgatctttccacgggattaaataaatacgataaccttggaatactctcgggtgaaatgctacaatggtatatccgtgcgcttgcgaatgaactctgtaaccataatataccaggagtatttctgcgccattgctgggaattatatttctagtaatgtcgttaagaaataccaaaagtctgccagcgtggttatagcatttaggtactcttacgccatacccgaacatggaggaatacaaaggacggacatggctatcatcacctgccacctacctcactttccgtgggcacacccacatccaacggtatttatctagcctaagcaccatgcctatgctactaaggccctgtttctttcagcttgggattattataatccagattattgggagtaagctgaaagaaatagacaacttattaaagtagcttattataatctggagctcagcttattataatctgataagctcattaaggtgagctttttctagattattgggtgaaaaattacccaccatgccaccccactccctctttagacttacaaacccaataatctaagctctaataatctaggaaagaaacaactaaccgcttattctactataatttataacaatcaagcttatagtaatctgactcaataatctagattataataatcccaagctgaaagaaacagggccgaaataatatcactaactcccctaggtctctcaccctatgaatgaacaagttagagctagatcaacctataaaggtcattggactattaccgtagcatgagactagcctaggatgatgcaaatatacgaagtatctactactcagaacatatattcaataaagaaatatataaaccatgagcataaataaataaagaagataattctattaattcaactatagtctttcccgaaccaccgccgcttccactacaggaaaggggagggagttggaagagaaggagaggggaaagggaggaatggtggtggcactgtggcggccctcctcgctgccgtccgcctcctatgctgccagccgccatagacgcggcaaccgacactcgtgtcccgcctccgcaatgccctccagccgccacccgtcctacccgttgtgcccgccgcacccccagcggcagagaaaagaaaagagagagaggggtgaggtaggagatatgacaagtggtcccatagttttttattatttctttttctaattagattgccacgttggtgtcacgtgtatgccacgtaagatcaaaacagctacggattgagccaagggggtaatttgtccggttttaattgtttagagtgtcaaatgtctggttttgtggtttaaggggggtaatttatactgtcgagatagttcatgggggtaattcgtattttttccaattataaacttaatcaaacttaagtttgacttgtaaaaaaacaaaatatcttgtaccccctccgtttctaaatatttgacgctgttgacttttttaaacatgtttgatcattcgtcttattaaaaaattaagtaattattatatttttttcctatcatttgattcattgttaaatatattttcatgtatacatatagttttacatatatcaaaaatttttaaataagacgaaaggtcaaacatgtgcttaaaaagtcaacggtgtcaaatatttagaaacggagggagtatatatgcaacggatatatgtacttgccaggtcgcggctactcatattcccaagttcccaactgggtcaaaacatatacgcgtgcgtcattggccgttaaggttcctacgtcacatcctgatctatcacatgtgtgtgcttaagtagagaaccccacgttgtagcgtgtgctataaattgatgggcgagttgtattcgaacgtgttctgcaacagctgctcagaagaatataagaaatcactacaaaatgccggaggagcgcaacaaggacgacgcaggaaaccccgagatgcatgtcaattttgtcctaaaatagtactcactctatctcaaaatataagcatttttagaccctgacacgatcttcgagatgctactttgaccaacaatattaatgaaactgagatgttttaaataaaaagtgttgcatattatgatagtttgtttaatgatatatttaggaatgtaaatatttacatgtttgatcttttttatttttttttaattaatgattaaagttaaaaatatttgacttatcactatattaaaaatgtttatattttaggacggatagagtattaataaggaaatgtacgtagtatctcagctcgaccgctcaaactaaaaccgattataattactacatatggggttattaatattgtccaattcaacaagcataccaagctagataatactgtcgatcaggaaaggccttgtttgatctgggaacaaattaattaatcagatctttcgagaaaagataattaattaggtacagttaacgacagtgatcggcaatggcggcacgaaggcgatcgtcatcgacgtcgaaccgggtgatgattcatcacccaccagcaatggtagccctgctgccccggaggcggaaggccaaaggtattcgtcgcaagaagaacgcggtgatggaggtggttccagctgcggcttccatgtcgtagatttaaccagcaatatggtggtgcccgacgacacgacgactgaagatcaacctcgccccgacgccggaacgatcaacggcgacgactgtccgtgccagatcagaagggtccatggccgtgtccgcgatatcgaccccggcgcgtacgaccccatggtggtgtccctcggcccctaccacgccgaccgcaaagacctccggccaatgcagaaggagaaatggcgctgcgtagagtacctctgcgacctcacaggcaccccgagctacgtcgattacttgccggtgatggatcgcgtctgtcccgacgcgaagacttactacttggatgaaaccggccatggccggagcagaggaggaaacggcgccggcggcctcgccctcgccgtcgagcatgccaacttcctccatatgctgctgcgagacgccgcgttcctgctcgtgtccatcggagcgctggacaagctgaagaaagccgacgagggcggcgccgaacagcggagccaggaccggtggaaggacgtcgccatcgcccacgacatgcttctgctcgagaaccaagtccccttcgtcgtcgtcgaggacctctaccgtgccgccatcgacaccgcaggccgccgtggctgcgacgttccctccctctcaaccgtcatggggaaattcatccggggcgtgatacaagaggcggaagaacaagatctaccactgcctcatcatctggatggcaagactccgcaccatcttctgcatctgtgccacacgctactcgagccgacccccaaagaacctgcgtccccggtcccggacaacgtcgccgcccgggtgaagcggcggtggcatcgcgcggcgcagtaccatgtcaacggcgttgggttgaagaagaggctcttcagcggcggggtagatcacagccaccacagcctgctcgacgtcaagttcaaaggcggcgcgctggagatccccgtcctccacgtctacgacaacacctgcagcctgctccgcaacctgatcgccatggagcaggcgagctccgactccggcgtcggccactacgtcacggcgtactgcatcttcctctcccggctcatgtgcaccgccgaggacgtcacgctgctcgccaagaagggcatcgtcgtgcaccacctgggcagcgacgaggtggtggccggcctcttcgccgacctgtgcaagaacgtcgtgttcaacgaggacgacgacgagtgcaactaccacagggcggcgtgcaaggcggcggacgagcggtaccagaaacgtgtctggaactggatgacgttgctcaagcacaagcacttcagtaacccgtggctggcgatggcgactgtcgccgccgttcttgtcaccatctgcacggtggtgcaaaccttcttcactgtattcccaaggaagtaagaactacgaacaagtactacgatgggattaagaattatattgtattcactctatcctttttattttcatatattcattctatctttaacaacatcgttgtttagaattttatgaagttagttcggacatcctcgattaggcctgatatctattatatctataaagtaataaaaaaaaggagtctccacgttcgctctcacacgttcgctctcacggcgtagaaattcttacattaataaaaaaaaagaaaaaagaaaaatagaactagattaggattaggatttgttaaaaactgaagaaaggaaaaaaatgcatactaagaaacttcaatcggacaacagtcaaaaactaaaaaaaggaaaaccgaatcatatcatatatactctggaaatggacaatgttttgggaatccgcatgttcacactcactacactggccaaggtcacctgtgacgggcccaaaccctcatctttgacggcttcgcgcatggtcagtgatcagtggtcactggtgagtccagtcacctttgacgggtagccggccgtcacaggtgacacccacctctgacgggcaagttactaaaaggccgttagaggtgttggtctccgcttgtctagggcgagttggcacccgtcacaggtgactcatctctgacggccctttaaataaaggccgtcagatgtgatggtctccgtagttagaagctgtcacaggcgatctacctgtgacggccccaaaagtaaaggcccgtcacaggtaggtcacctctgatgggcctttatttgctagtccgtcaaaggtgatgttacctttgacggatttttgttccgacccgttactgatgagttaattccagaaaaaaataaatgctaaatattggctagcctcaggatttgctagccatgccctctgaaacacagatacatcacagataaattccagtcaaccccccccccccaatataacatcacagatccatctcaaacatcacagatccccaacaacacagatccatatcaaaaattgacatcattcacatatgcagttcaaatggcacaattttgcacagcaaattcacaccccttgaaagccacaattttggtcgttgctcatataaccgcatatatacttaccaaatggattaaagccataatgtcctcgacctccacaacctgtcaataaggaaaaaaaaaggagaaaacagataaatagtacaacgtaaatcgtagttgatcaaatttgatgagaatttagtaaactaccataaatattgcacatatgaaagtaaattacattgcacttcataaaaacatatttttttacatcacaagaaattatgaaaacatcttttttacatcacaataaattatctagccaagttcatgagtctatctgacgtgaaaacgtcctttcttattcattatttctgccagaatgaagacacacacttcgcctctgatagcggggggttgatgggtgagatcttgaggccagctctacctttctgtttaataaataagatgttagcacgttttgaatagcaatgttggtattgaaatgagcttattcgccattagcaacaacctcagggtcgaaatctttcacctctcttagaaatgttgacatgttgtggcacacatggaaaccacattggtctccgatctgttgtgcgcatgcgaacttggtgtcatggtaaagttcgtccttgccctccttgtgcctaccacccttttccacatatgggccccaagccatatttaaggccttggtgatttcagtgaaatcataatctttggacttattggagttaaggtaggtaacgctactccacttaggtacgatgactaggagaatccaatgtcgcttgcgcagtggttatgtagcgttagtactaagaaccttaacttcaaaaataatatacacgaaggtaattgtcctcttactcttggttatgtgcgcacatgatgtactccttgtcttgatgggcccataaacaccggttgacatagtcaaccacctcagtgaagctctgtcgtaaattaacctcgttcaccatggatggatcaaggaacccaacctgattactaaggcgacgactctcgatccaatacaaccttaaaacatttacgtattagaactaatttaattaggagatatagtccaatcatatcacaagcatagaaggtatgcacttacaaggagtagcattttagaagaccagtgtccaacttccggatcctgaaaaggtcgaagaggtcatcaaagcctatagttatataggcaggcgatgataggaacggctggtggtcgtgatgtccaactatggatgactccctcattttccgcttagcattgcttagctccatgaattgcttatgtagctctcggcaagcaatacccatcacggctaatacattgtcctccaccaatggcatgcctagctcaaattgggctggcgccctcccgaccttccccgctttgctcaccggcatcgacatcgtagccttgcccctttttggctccggcaccaacttccccttgccgcgttcacgcttctggcctttgacaagtggtggggagctatcggcctttcttgtggtctttattggagccaagctttgagctatatctgccaagtccatatcagctccaccaagagaatgaggtactgacaatgccggtccacggggagcctcaattgatagcttagacttgggaggtgtaagctccgtcggtcgacttggacgaggagtcatcttcacaactatgtcttctttgggccattgtatgaacgtcttgcgcgcatcgaccaaagtcatgatttcatcattgggggcacgggcagcggatagcctgaccaggtgtcttttactgtatcgatggacaccttggcatacccagctagcaggtctgcgccatggaccttgtctgtaaccgagggcttgaaagccatgccctcagcgacttcgggagcgaaagttgggtggaccctcgccagtaggacacactgtgctacgccctgcatatgtgaaagtctgaatttaatattggaacgtgtaaaggtttttttattagatatggattggataacatcaattacctctatgtggtccactgcagctagtggtgcgaccgggagaccaggggccggcacctctgtggatgcacaactactcctatgctgtgacggactcgcgtcgtgttgtgcacaaggagttggatgcacagcaggtgttgtgtctcggggtatattcatgtcggcgaggaccttgttaaccctttcttccaccctagcgttcatgctagcttctagttcttgaatgacctcaaccttaagttcggccttcaaacgagcgtccctctctttcttggagactttccgtttcctgtattgggagctgtactgcgagagtccatgcttcctgtcatgaccgaaaataacccaacgggcgttccttacgtgcgtgtattattccttgtcccaggaggcaaggtaaaccaaaaattgatacatttcagagtttatcaagcggaagcgtaaataaataatttattacatgggcggcgaaggcccagcacacacaaagacaaacgggaaacagcggaagactagggcgacgaccacaggcgcttgacggcaggcacgagctagacaccaaagccttcatcttccaggaactcctcttctgggtttgggaaaaattgagcaagactgagtacaaccaccgtactcaacaagacacacccacaagtgcagaataaatgcaagggagtacaagggggttataatataaagggttagggtttgcagtaaacaccattaaaagacacttagttgctcaaagctattttgtaaacacgattctagagctatacaagattattaatgaaggccgtgaacccacacgaacctgccttaacccaaggcctacgatgattcagaccgaactggcaacccgaccctgggtcccagctcgtcccaagccaacccaggccaaccattccacattttagttgttaagcaggttttaagaattaaaacactaacttgggtacattgctcggcttgcccataaccgagggcgcggctattcgaataggttatactctgatcagaggtgtacatctttacccacaagacacatcttcctcacgtgtaaccacgtgccacataccaccacggtatatggacggaagatgtgacatagtttccaacccatcctagccatagacaagagtaccgacccaaccccacctacggccgggacctccgggacaggtaggcaggactgagcccctagcagcaggacaccggccctgtgccatgacatctcgactaccgggccgcagctcgtgtagccttcatttgccctagagatgtccatcgacccccgacttcgtccatctccatccgtgtacttttgtttataaccagactgagccacaaactaagccttacccactagacatgtggaagtacggtagtgctttgcaacagaggcccgaagaccggtccttatatggccgagttgctactattaaaaccatgcaccccgaacccagcctaaaaccattttgaggattttgaatagagggggaggtgtgaatccaattccacaataatccatccatttcatagtgtccaggtgatgagaatattctcaaagtctagagttgtaaaaccacctaatgttgcctaattaaccagcgaagcatctacctaaattcatactagtggtaccatgagtagagtgtccactagttggggttttgtttaatctagggtgaacaaggtaataatatcaataacaataataataaggtcataacaaaggtaaataggcatggctagataaaacagtgataacgcgggaatttaagtaaagcgataatgcaataatttaaatcaaaataattttataaaatgggatccaatatgttcaaggatgatgtgacttgccttgctcgctttcccaaacgtcggcttcaacctccacgaagagcggatcttccgaagctgcagcgtctacacgaccaacggaaaagaaaaggcttttactctaataaactccatataacaagcaggaacaaagcacaaaaatgggttcttgacttcttaaggaaaaattagagacttgaatggtccaattccgagttcaaatggccaagttatggccatttgaagtttatatgctctttaaatggatatttgcgaatttcttcatttaaatttttaatttaaaaagggtttattgcgtcagccgagggggaggggcgcgcggaccgggtccacgggagtggggcccacgcggcagcctcacggtccacggtggaccgggcgcacccgggctcacaccggccggcgccgtgggccccacacgtcagccgcacctgagggcgcgggcggctgacggccgggctccacgtggcagccactcggcgcgcccgagggcggccacgccggcacggtcggcgggaggcggcgcgcccgcgccccgatggtcaccggcggcggccatagacgcggcggagcggcggccgagagaggggagggaagggggaaaggaggcgacggtccacggctcaccccggggtgacggcggcgacggaggaggcggccggagcggagggaggcggtggcgcggctcaggtcgacggggacagcagcgctcaatcggtcggcgaccaaaacggagaggtggacgaggtcggcgaggatgcggcgaagccgaaggaggcggcgccgaggcgggagacggtcccggcgagcgaagaaagccggccggaggtcgtcgccgacggaggagagagagagcgacagcgcgagctcgattccggcgaggaggaagggcggcgagaggcggaaacggacggaggaggtgcggggagggtttaaatagagttggaagggggaaagagcggccggaggggaaggaaaccggcgcgggaggtcggccaccatcaatggcgccggtgagatttgcgggggcaaatccgcccgtttgaacgcaagagagagaggggaaaatagggggaaagggagaggggatcacggggagtgattccccccactttattgcatgcatggacggcggaagcggcggtattctcggcgccgccggcgctaggcgcggggaaggccgggatcggcgggaggaaggggatgacgggtgggccccacccgtcagcgagggtggcgggcgggcctgcccgtcagcggcgcgcgcgcgggtagggaggccgaatgggccgcgggggagaggagagagagaggggggagagatgggccgggccggcccaagggagggaagggggacttttagggtttttctttttataaaactttttcaactttgtttatttcttaataattattatttgtgctctgagaattccattaaaatttatttacacattttaggcttttaggaaatatacaaaaatcctctaagccttgtttgacttttactttgcacattttaatttttggaggctttcacaaagattttaattattctaggcataatttaaaggatatattttagagtcgttttgggacgtgacaaacctacccccttaaacggaatctcgacctcgagattcggaagaactggcgaagagatcgggatgggctgccttcagctcgtcttcacgttcccaagtagcctcttccgcagcgtggttgctccattggaccttgcaaaaacggattacccggttcctggtcctgcgctccatggtgtccaggattttcactggcctctccacgtaggtcaagtcttcgcgaacttcaatttgctctgaatcggcctgctcggatggcactcgaagacatttcttgagttgcgacacatggaacacatcatgcacgttgcccaaggaggcgggcagctccaactggtaagcgacttctccgcgtcgagcaatgatacggaaaggacccacgaaccgaggggcgatcttccctttcgtctgaaacctatgtacgccccgcaatggcgtgacccgaaggtacacaaaatcgtccactgcgaattccaggttacggcgtcagttatctgcataactcttctgccgggactgtgccacctttagattatcccgaatggttctgaccttcgcttcagcttctctcaggatatcagtcccgaacatttggctttccccaacttggtccatacaacgcttcatagggtgtcatttgtatgctggcttggtagctgttattgtaggagaactcggtataggggagactcttatcccaggtcttcccaaaatctagaacacaagcacggagcatatcttctaggatctgatttagatgctcggtctgtccatctgtctgcgggtgatacgcggtgctgaaatttaatcgggtacccaactcttcttggagcttcttccaaaagtgagaggcgaattggcttcccctatcagatacaattttcttaggaacgccatggagactcacaatcctagcgaagtagagttcggctagtttgttccctccataggtggtcttcacaggaataaaccgagctaccttggttagtcggtccacaactacccatatagaatcatatcagccttgggtttttggaagtccggtgatgaaatccatcccaatttcatcccatttccattctggtacttggagaggttggagaagtccggccggtcgttggtgctctgccttgacacactggcacacatcacaaagggccacgaactctgcaatttcccgcttcatactaacccaccagtatttctctttcaagtctaagtacatcttcgtactgccagggtggatggaataaggactttcgtgagcttcctgaagtatcaactgtttaagttctctgtcgtctggaacgcatacccgatttctgttccatagggttccgtgttcatcctctgtgaaaccaatggctttaccctgtttcatattcttgaggagtccacgcatatccggatcatttttctgagcctcgcggatttgatcgagcaaggtaggcttggcttttagcgtagccaagaatccacgaccaactatgcttaggttcagggcttccatctgttgattaagttcacgcggaatgccacggacgccaagagtgttgcaatggctttttcgactttgatggtggcggagaggtcgaggtcgaggcggtggagaggagggcggtggatctggatcgagagagtgaatgagtgagagtgggtgccggatctggatcgatctagaagatgtccaaccctaggtcaaccctagtcaaactcacctgtgacgggcgccaactatggggccgtcacaggtgtcctcacctgtgatgggcgccaactgtggagccgtcacaggtgaggccacctatgacgggcccaatactctggcccgtcacaggtgatgtcacctgtgacggccccacagttagagcccgtcacaggtgagtttgcctacaacaattttattttattttatttcacttagttcttttattttccttaacgtatttccatatacactatatatttttgttatacttaattattttatttcactaacagtagtaattgcacttcattattttactatttgtattattttatttcaaatggttagactaatttaattattttatttcacttctagtgggtgcttcacttaattattttatttgactatttcatcagcaatatactattgatcattgcgaacatattagagtcatccagataacagagacaatattgcgaacatattagagacataacctacgtacataaattacaaaaataatccttcctcatggtcgacgcgtgcatattgaacgtcatcttcttcttcctcctcttctagaggtatttcttgacctatgccatggacgtgctggttgtaatcatcctcgtctgcaatattgtccaatccaacaattctccttttcccttcacgaataacatgtagtttcttgttacacgggtcaactatgtagaacacttgaacaacttgtttggcgagaacgaacggttcatccttgtacgcgttgttagccaagttgacagtggtgaaaccttcgttgtcaacttttacattgcgaagatagacccatcgacaacgaaacaacgggactttgaacttcaagtaatctagctccaatatttgctcaactctaccatagtattgatcacgacgaccaccgtcactagcagcctcgatgcgtaacccactgttctgcactgtgcatttgttgtcttgctttaccatgcgaaaggtgtatccatttatgttatatcctttccaggtggtggcactccattcaggaccctgtgacaaccactgaagtgtttcattagacaagttctgcaacctggcaattcggttcttcagccactcgttgaaagaagacatgtgcttatttttgacccaactctctgatcggcctgggttctcctgtcggagaactgcaaggtgttcgtcaacgtacggcaccacatcagtcatatactgcagtaccgtgaaatgagctttatcgtacaccttccgatccaacctaacagtctttcttccaacagtaccaacatcgtcaagcctcccttcatgatgagatcgtggtaatccaattgaagaagtttctgacatgtagtccacacaaaaatcgatgacctcttcggtggtgtaactctcgatgatactcccctcggggtgtgaacggttccgtacataacccttaaggatccccagatacctttcgcaaggatacatctgcgtcatcaatgctggaccacagcactttgtttgcctcacaaggtgcacgggaagatgttccattatgtcaaagaaagttggaggaaagtacatctcaagatgacatagagttctcacaagttctgcctgtagttcatctagtccctcgggatcaatgatcttctggccgattgcatggaagaaggaacacaaccgctggatcgtgtgtcgcaccttaggaggcaaaatattccttagtgcaatgggcaacagctatgtgataagaacgtggcaatcatgcgacttcattcctaccaacttaagatcttgcagtgaaacgagcctactaattcttgatgagtaaccagatggaacctttataccactcaaacatgttagcaaatcaatcttctcttctttcgagagagtgtagcaggctagaggaaggtaaaccctgccggatttcgtggttatgggatgtagttccgagcgaacacccatttcttcaagatctcgtcgggcgttgagaccatcctttgtagtacctgggttaagcagtaatcccattaaactctcacatacattcttctcgacatgcaccaaatctatgcagtggcgaacttcaaaatccttcctgtatggtagtctccaaaatattgacttctttttccacatgctcctctcttttgtcttttgtttttccacatgctcctctgttttttccttcgatgtgctcttctcttttgtctttccaactttcttcttttttccaaactcgttggttattcccatcaccaagttgtgcacctctgtccctgttagctctgccgggggtccggctgtatctctgtgtccattgaaattctttttcatattcctatacgggtgataccttgggagaaatctcctgtgacccatgtagaccgtcttgtgtgaatgcttcaaccatttgcttcttgtttccttcatacactccgaacacgcccatttccctttcatagtttggccagaaaggttgccaagggtcggataatcattgatggtacaaaacagcatcgcatggaggttgaaatactcttgtgcatatgcgtcccatgtccgtgtgccctcattccatagcctttcgaagtcatcgattatcggttcaaggaacacatcgatattgttgccaggttgtctcgatccttgaatgagcatggcaagcataatatactttcttttgaagcacaaccagggaggaaggttatagttaacaagcagaactggccatgcactgtgacgactactcaaatcaccaaatggattaatgccgtccgtacacattgcaaaacgcatgtttcttgggtcatttgagaattcctggtaaatcctatcgattgtcctccactgtactgaatctgctgggtgcctcagcatactatcgactttccgttcttcggcatgccagcgcactagcttagcttgttccttattcacaaacattctcttcatgcgctccacaattaagagataccacaccacctttgctgggcctcccctctttgacttacttccttcaccttcactctttgctcgtttgtatcttgatgccccacagacagggcagacatccaagtcagcatattccttgtaatacaaaatgcagtcgttcggacatgcatgaattcttctgacctccaggcccaacggacataatacttgcttcgcttcatatgtcgtctgcggtaaattgttcccctctggcaacaggtcttttaacagctcaagaagttctgtaaaactcttgtccgaccagccattactagccttaagcttcatgggttccaacacgcatgataacttgctgtgcttcgacttgcatccatcatacaagggcatctgacaatcttccaccaacttactaaactactcaaaatctctgtcgttgtcctctgcatcttcaatgtcatgcaacattgtagatagacattgagtgtccaaatctatggtatctccacctaaaggagaaggtacgaacatgccttctcgagctgcggcgccggcggtgttctctacatcctgatccaacacttcttccgctgcgacatcaggcgcctcttgctctccatgcttggtccaacaggtatatttcttcatgaatccattcattatcaaatgagcatgcatttcatcgctatcttcgatcatctgttcattcttacagtccctacatggacacaacatgtgcatgctcatcctactttttctatcattatccgcaaatgtgacaaattcagtgaccccctctctatactcggtagacgaacgatgcgcatagtacatccatctacgatccatctgaaatcaacaacatacgaagaaaaatatatgatgatcgatatattgagaaggaatggagaataatgtgttttttaccttgaattttagaaaaaaatcgcccccttgccctcccaaccgatttgtgaacagtgaactggtcgggatggaaagcggttggcggtttgggggggtatttatagacccaacacacctcaaacaggttagattaaaaaagcccgtcaaaggtgttggtcatacctttgacgggcttcaattgagttgcccgtcaaaggtattgacctacctgtgacgggctgtaaaaaaaatccgtcacaggtggcggaccaccacctgtgacggctcatagtgccacggcccgtcacaggtgaggggataccagtgacgggttgggaggaaaacccgtcacttcctcacctgtgacggcttttccttctggcccatcacaggtgatggatacctgtgacaggccacggccggatgccccaccgatgacggcaaacctagcaacccgtcaaaggtgacggtcatctgtgaccaattcataggcccgtcactggtatgctgtcacagatgcagggttctggcgtagtgactgcttttagaaacattgaaagacaaaccaatcctaatcaaactctgccgattccgaattgtatcgttcgcactcgcgcgctagaaattctcacaataatcgaaagaaaatataaggaaatatagaaaagatctagaccataaaacatattttgcttcagattatacgttgtagattgctttcgtaggatacaggaaacggacaaggtttctttcgatttagaaaacgtattggacactaattttgaaaaccatgtgagacactaaggtggtgtttagatccaaggacttaactttattccctgtatttagacactaatttagagtattaaatatagactacttaccgaactaattatatataaatgaaagctaattcgcaagacaaattttttaaacctaattaatctataattagagaatgtttactgtagcatcacatagactaatcatggattaattaggctcaatagattcgtttcgcgaattagtccaagattatggatgggttttattaatagtataggtttaatatttataattagtgtccaaacatccgatgtgataggaactttaaagttttagccccatctaaacaggatcttaaaagacagactaaaaaaccatcatcgtcagagtcatgcaatctaaattgtacacaaattacatgccatggtaatatataaatagtacgctagaaatcttctctccacaatccaccgcaacaaaaagaaaggaaaaaaaagattgagtacaaaacagtgacgaaactctctaccagccaaaaagaaatcaaaagggatccgacttttagcgatgaaaaaaattgtgagatatttcaaggaaaatagcaactaactgatgctctaaaataccatagagccgaaacgatatcaaaacaagaaggcaaactcaatctattatcttaataaagaaatagaaataaaaaaaggagccaccactctcatagactaaaaatttccacatgaattagagagaaataaaaattctaatatatgaaaaaagagcctagatggaaagtataatagaaaaagaagccaccacgtttgctcttacggcctataaatttccacattaatcggagaaaaagaaaaggtagagtccatataggaatacaatttaaaaacagctgaaattcggaattaaaaataaggaatattgaaagagtagactagagtccataaaagcataaaatttagaattaattaaaattcggaattaaaaaaaaaggaaaactaaaattagaagttagagtccatatagaaatacaatttagaattaacgaaaattcaaaataaaaaaagtaagattaatgggagaagagtcatagtccatatatgaatacaatttataaataactgaaattcgaaattaacaaataaagaatactgggaaaaaaaagtctagcgtccatataggaataaaatttagaaataactaaaattaaaaaaaagaaatattgaaaaaagaagtctacagaatacagtttaccaacaattgaaattcaaaatcaaaaaaaataagaaatattgaaagaagagtttagagttcatatagaaatacaatttataaataactaaaatttagagttaagaaaaattaatattggaagagtagtctagaatctatataggaatagaatttatgaacaaaggaaattcaaaagtagagtttagataggaatacaacttaaaaatagcttaaattcggaattaaaaataacgaatattgaaagagtagactagagtccatacaagcatacaatttagagttaattaaaatttggaattaaaaaataggaaaactaaaattataagttagagtccatatagaaatacaatttagaattaactaaaattcaataaaaaaagtaagattgggagaagagtcatagtccatatatgaatacaatttataaataactgaaattcgaaattaacaaataaggaacacttgggaaaaaaagtctagcatccatataggaatacaatttagaaataactaaaattaaaaaaaagaaatattgaaaaaagaagtctagagtcaatatagaaatacagtttagcgataattgaaattcaaaaataaaaaaataaaaaatattgaaagaagagtttagagttcatattgaaatacaatttataaataacttaaatttagagttaagaaaaaatgaagattggaagagtagtctagaatccatataggaatagaatttctgaacaaaggaaattcaaaatttaaaaataaggaatattaaaagatgattcttaagtccatatagaaatataatttataaataactatcatgtatatacaatacaataaaaatatcacacatttgttagtccaaccaagaatttaaaattatgttgtcattttaatatattttaataataaaatgtgaaaatatttaaactattgtatgagaaaataaatctaacaatgctagccgcgcaatctgcgtgggccgccatgctagtttgtctaatattgttggtttagattgatcaatgagagaattccttatatgccactcaaaatatagcccattcctttacctgccactccaatttgacactttccttctatgccacaagctcaaatttgtccaccctcctgtgccactaatgtcactccaccagctgttgacttatttcgaacccctccaataggtaaccacgtcaagccattagaagcccatgtagttattgcaaatcgctcccccatatcggttcaagggccgcatgcagcctcttaagagccccacttgtaaaagtaggagatatttttccaagcaggcctcttacgcagccacatgcgaaagtcagattttcacaggcacctccttaagaggcccgcttgcgaaaatcactaggtactaaatattaaaaaaatcttctccgctcctcctccacctcccctctctttctctctcactctcactctcttattcatttctccccctctctgtctctctcactcattctccctcttgtgtggcgctaggctagagcggctgacagtggacaagagcggttggcagtgagctggagcggcaagcgggtcggcgatcggtggcaaggagctcggcgatgaatccgatgtggaggacgacgggagcagtggtggcgggctcgggtagctggagcgacctcgggcagccgcatagatctggtgctggctgcccttccctgcacgggtccggtggtggggacccttggtagcaacgacgccggacaacagcgaggatagcagatctgacgggcggtggatccgacgatgacttattgactgctacgaaggtctaccacaagcaccacgatggtgatgaggaggtcaacaaggcggcggtggctggcgtggggacaaagaggtgcgggtccatgatgaggcagctgtcacaccctgaagttctcctcccaagcctaaaattcaatttataaatgaccctaagaaaatgccggtgcaaatcaagagaaaaccgtaagaaagtaatacaaataataatcgaatatggcatgtggaatttttcttgagttctacatgtcaaaattcactaacaggatttttagtggaattttcaaagccctagaaataattttaaccaattaaaattgagcaagcaatattttaattccagggaaaatccttttcttcctttttctttttccccttttcttttcgagtgggccgccagcccattctccttcctcccctcccctccgctgggccggccgaaggccaaggcccagctaggccggccgcctccctccttccacccgggacgccgacaggtgggccccacctatcaggcccgtcttctacctcgcgcccgcaaccgccgacgggcccacacctacggcttctccgggccacgtcggcacgcccgcgcatgcgccgcaccttccgcgcccacttccctctttctctcgtccgcccccgcgcccgagatggccgggattcgattttcgaatcccgcctctctctcctctcccactccccacgttggccggcggaatctcgcccctaccggccacgtccgggactcccctcccctatttaagcttcctcgtcgccccctctcgctttttccctatctcgccgaactccctcgtgctccccatcgctcccgcgccatgcaaccacccgcccgccccgcttccgttactctggtcgctgctagccgccgctagggtcgccgccgcaccgcgccgtcgccgccgtcgggttcgcgaggccaaactccacctcgtccgccccttccccgtcgggattcgttgccggaattcgcatcccctcacgctccggtgagttctacctctaccgccgccttcggccatggatgccggctgccgtggttcatctccctctctctaatctctctctcctccttccttagggcaccccgaagcccgtccaccggttgccgtcgtcctcccgtggcttgccgtcaccgttcgccatcgtcttcctccgcgccggccaccctcggtgaggcgtcctctcccctctactcccctccctctccctcctagagccgcgccgccacttcaagtcatgcgtcgtcgccttcggccgccgccgccgcctcccgtgctgccgatcgccgtcgccgtcagccgcgtgccatcgccgctagccctgaccggccggccggctttgatgccgagccgagcccggcggcctccactatcgccaccgcccaatcggctcggggccgatctgggccgttggtcccgtggaccggcggtggaccacccgcgtggtcccggtccacggtgcaccggcccccctttgagctgctgaccagtgggacccgcctgtcggcgccgccccccccccccctcccttgatgacgtcagccctgggaattattgcgcaataagttatttaaggactttttgttatcgtaataaacacagtgaatcttctaaaattcataactaattcatccgagctccgtttaagcccattcaagtctcagtaaatcaaaaaaaatgtgtagaatccattaaaaatggttttgttctctgtttcagtagtcttatagtctgtttgcaatgtttgccttgtatgttgctagattccggttcttccgacgctccggtgtacttcgaaatagtcgccgaggttcctccagcagcagagcaaggcaagtcatgcttgtcacttgatcatgttgatcctatattgcaaatgttctaatgttttctttcaaatactgcatttgttttgcaatatcactatgggatgtttacctattgttacagccatgctattttggtaccttgctcctttgttagctcgggttataacatgaatagacgttggactaggagttgcttagccatgcttagttcaactagcacacaatggggaaatctcatttaaaatatagactgtaggttcatatgataatgttggtttagtaccaccgctttggtgttggttagttaaaatgaatcacatggtgggctgtgggtgcatggttttgcttgtcgcacccatagcaattaaggaccggttcgcgggaaaccctggaagaatttatcgtgcttaccacaagccagcgtgggcaacggctgggcttgtagtgtagcttttctctagctgacgcatccaggcaagggtgggcatgatggagtttggatgggccctgcgacggcctatgcggcttccggattcacctaggcatgagaggggattgtccgtcgcccgctggggacgggggtgaaacctgaggtatggtgtgcttggctagagggggttatgcaaagggtcctgtcacggcctctttccggtatgtcgtggtggcatatcggcgcacggaaacgtgtcgtggggctgtgtcttgtgggtacagttgtacacctctgatcagagtaaaactattcgaatagccgtgcccgcggttatgggagatcaaccagattcaccgtgattagtctcaccctagtttagtctaatgaaattggatagtataggtggatggttgggtctgttgcaacgtggtatagcgttggacagtggatgattaatattgattaattattacaactgtttaattctttcaacttctgtttataaatgcccgctttatgcaaatgaaccactctagctctcctttgataattccctgcatcatgcccctattccggtatgacttgctgagtacagtgggtagtactcagtcttgctctattttccccaaccccagagtacgagtatgtgtcagatagtggtttctctgaggagtaggcttcgtccgtgccgtcgaggatgcctgtggagtggtgttcccgctgcagttcaagtcaaggcttagctcctgttatctttcgttttttccgctgcatttatgtaaggcttttatgatgtttgtaagacgtggatctgaatgtcaatattgtcgtttgtgtaccccggccagtcctggacggggattttaatgcacattctgcttggaattctattcgggaatttctgggcatgacagcaacggtggcagcgatgacgactttagggttttggccggtggcgggcatgggtttggccggtggtgagctatggttcggctaatttgttgttttgtgatttttatttttttctccaaaattattttcacattccattgatataggtgaggcatgcgaaaataggattttttttcacatgtgattgcaatggccacatgcaaaaatctcgattttcgtataaacctgggggcaggtagaccacccaccgcatgcgaaaatagattttcgccgcatgaaaaaaatcgaatatgtagtagtctaaggcaacacggcgacgtgtggcggcaggacgaacatgttggttagactccttgctgttggactatattattggttagggttgttgctgttattgggctgggctagatgatgctatccaggtaatatccagataatttattgggtaatatctatattctttataggatattcgtcggatactgccatcccgaacccgatctcacatccaccaaaaagtacccgaattcggttcctatatctgtacaaagatccagataccctgattttttgatccaaaattgtcccaaaataatacgagtggcgggcagacggaaatatttgtcccgttttcatccttattactagagaggagcggcatcttcgctccactcttgcacttctgaaatttacactacacgggaggagtgtcagctccgctccagcctttaagtaggagttgtatcaaacgggccttatatatcatcactactgcagaaaagctggtgtcagttttaaagggtttataggtgctggttttggtgccgacaccaattatccggcacccaagtcatcgctgccggtactataggtgccggttcaaatttagaaccgttttttagttctgcgggtgctaaaaaaacactataggtgccagttcaaatttagaactttatttatttttccaggtgctaaaaatacgaaaaaaaatatttggtattttcattaggcactcacacttcatttcccacatgtcacttgtttttttagcccatattcgtagacatggatcaagtaagattcactacaagataattgtgctattgccaccaaattattacaacaaaaaataattcgtagcaatatattatactattgcaatgataatttttctgtggcaaataattattttttattgcaacgatctgttttatttagtacttttgttgcaatagaaaatgagatatcgccacaaaaaatcatactattgcaaaaaacatgttctatcaccacaattttaatttttgtggcaatttatatagtacaattttaatttatatggtacttttcactattttttgttgccacgatcaacaaattcgttgcaataaaaaaattgttgtttcataatttaacttatttttttcatatggactcggattgagacaaattttatatggaaattatagctctcgacgagatctacaattttataggtgataattttttcatttgaaatcttttagatattcaaatatatgatttaaatctcagttagctaggctcaaatggaactatatgtattttccaacagaattgatgtgtaggtgagttggtaaaggagagcacacctaaaggacaggatttgggttcgaatcctagcaaagacacaaaataaaaaagatatctagataaatagataggatgatagattaatatttgaaattttaatttggtacgtaaaactaatactacatatggagtggtggcaataatttttattacaacaatgtgaagtgttgcaatatgactttttgccacattcattccgtagcaacatctaaatttattaccacaaaataaaaatcgttgcaataacctattaccacgttgtttattaccacagctagcaacgattttacaattgtggcaacatatatctattgccacaattttagtattgatgccacgatttttttcatggcaacaaatgattttttgatttttctagtagtgatttaaactcaagacctctctctccatccaaagcctccataccaactcacgtacaaacatctgttgtgttggaaacaaatgatatcatgagactcctatcatccgaatttataatccatatttaacatcgttgatgagttcaaatgaaaagcttgtgaactacaaaattttagatcttagatttgcaactttcatatatgtttgtctccatccgatatcgttaagagattttaaatatttacttatgcaaatagatctcagaccttgtaactcattttcagatttttaaactaccttaaatcgaaaagtcataaactacagagtggaaaagcttgctaggtaccggttttaagcaaaccggtacttataagatcgatctctatgcgttgttttagtaatgcatcctatcaaaatttcagtgtaaaatgacttgtatagaaacaaataaaataggataatatcgttcgaaagcaaagtgaaccattttgaaaatagtttatgagtaaaatgggccgagaaatattgtagaggtaaagtactctgaatggtttgacggagtaaaacgattttttttctttgaattttacgtgcccatcaacttgcgcacacttttacgtgccgatcgtaatttaccgatcggatcaagacctgctaggtcaattaatgtacgtatctggaaacttactgcgcatataatattattaagaactttctacaaatttaattttatgctcgcagcctagttggcatgccgcagttatcttgtccgcatgcatgggcaattggacaattagcacgttaattggaatttagacccacgtgttagtttcactgactaccatccccaaggtgaaagtgttggtttgtccccttggttaatatatacaaattgatcatctcaaaatagtttttctattaatatataaatacatactgataaaaaagagtgttattgacatccaactattttataaataattgatcaacccttatttggataaaaagtaaacatccactcttgaatgtgatgtgcaaattgtcacatgtgagcatgtggcagcctagctagatagttgctactagtacagtagttagcgtgagagccaagagtagtttcatcgtggtcaataaaagtattagatcccttctggcatgcctgttccttaacaagtacagttcagtgcaattagctttggaaaaaactatttagtatagtcatgcaactaaacatgagaagtaattgcacacttgcgttgttttatcagattattcaaagttattttccttgtattaagcactacgccagatttgctcacttgtgatgggttatctgtgatgggccaaagttctgatgaccgttacctttgatggctcctacgggatgccatcatcggtgagtcctcgactacggctcacctgtgacgggctgacaatagaacccgtcagagaaacacctctgtctgatcccactttcgacccgtcacaggtgacttgatacctatgacgggtggtgtagctccggcccgtcagaggtgtagtttagtcaccagaaacaggttttagccctaacccgtttgaggttagttgcggcctatgtaaaacccccaacaaccacctactttccttacaacctagtgcactgtttacatttcgtgtgggagggtgcgaggagggcaattttttgcccgaaatggaggtaaaaaacactataataattatttttttctaacgtgtattatgtattatgtttttattgatgagaaaacacggcgcccgggaattcttcttagctacagcgcatgtccaaatctcgctttcgggttaaggacgttgttgacgagaaacacgacggcctgggagttctgcttagcttcagtacaggtccaaagcactttcgggttcagggcgtgctagttggtttgatcttgcaaccaacgaaaataaacaagaaaatctagtgagaatacgatagctgatcggccggtgagccaatgacgtatcgtgttagcctagccgatgcgatctaaccgaatcggctgtgagaagtaagataaatgaaattaagtatacctaagatatgtttcatcggctgtagatgtaatcaacatgtaatctatggacagagattatatctttttatatcatagccgatgacacaatacttagggtaaaatagataccgtatcggctaataccccaatacagctttatacaagagtatcaatctaagtaaatatatcaagagcaagcttgaattaaaggaatttaacaaagctaacactactacatatgtgattatcctggacgccggcaccttttggttccaggtgggccataagtggctccgcctggaaccagacgaatgtcagggtcgg

SEQ ID NO: 10462 - DNA, 12123 bp, Oryza sativa
  unsure (1)..(12123): unsure at all n locations
gtaggcgaccgcttgcgatggtcagggggcatataagcccccagcccaaccgttgccatgaatttccggcgtttctctctcctaaacatccacaaattagggaggaaggttttcgacctcaaatctttgattgtgttccatataaaagatgtagagcttgttctcctccttcatttgcttccatttttgtcagttttcattggtggatacgaagaaacttgcacttttataaatggaatagtgtaggcacatttttgttttttatttttttagcaaataaataatgcaatcttttacttgtttaaaaaagtatttagtacctacattgaaaagttgggtttgcctgtattaaatttattttcatttggatgaaaggacgattatttttattttttagaaatggacaatattatattaatgcttaaaattgttgtgcggttgtttaaaaagtccgtaaaattttaaattactaggtgattagttccctccaatttaaatacattcgtgtttgaatcggtcatggatgtattaatgacaagctttattgtaggtcatggatcggacatggatgcacaacacgaaaagagctcatccaacattcttgaaggaagcagccaaatttgttgagctcgtaaaggcacatgctgtgagggagaatttgaggagcattttttgcccatgcaaagtttgtaagaacgaaattttgctgtaagatcccaatgaagtattgtcgcacatcgtagaacgaggatttaagaagggctacgagatatggacttttcatgcggaagtcggtggtcgtaacgaagagttagatgatttctgttatgatgatgcagaaaattttataatcgaagacatgtcacagggaaacatcccggaatacggtggctcaggtatagagaatgaaggtattgattttgatctggaagatatgttacggcacgttgaaccagaggtcctaactggtacaagacgagggttggacagttgggaagcgttgaaaaaaacagcgaaggagcttctgtacgacgaagccaaaggatgcgacaaggactattcggtcctacgctcagtgctcgaacttctcagattgaaggccagacatggatggtcggacatgagcttcaatgatttgatggatcttttgagagttatgcttccaaagccgaacctgctaccgacgaacacatatcaagcgaagaaattgatatgtccattgtctctaggtgttcagaagatccatgcatgtgaaaatcattgcatactataccgcaaggaattcgcggatttagactcttgcccaacatgtggacacacacaactctattggaacaaatcacccacatattttggaacccctctattaagggaattcgttccattatttgttccgccaaaaatgtttcatctagtgtactaagaatgtttcattatgtatagacctaatgttgtagtgaacgaaacattcttttgcaacaaatcacctacatattttggaaaccctctattaagggaattcgtttcattttttttccacaaaaaatgtttcaccaagtgtactaagaatgtttcaatatgtatagatctaatgtttcactgaattgaaacattctttcgctatttgttgaaatattgtttttatataaggtgaaataacgcccgatttaaacgattgtttgatctacctagtgaaataattccgatatacttggtggaacatcatgcaacatttaaaaataattcaataataagctaaaaaaattgttggaatatatccatgtgtggtcttgttttgaagatttaattggaacgaatttaatggtgcaatcggatcatgatttggataaataatttaagagaaaaattagtttaaagtagttttgcacgtatatctggttttttacggttgaggaataggaaagaaactcgggaaaagctagttagcgcgcgccggcggcgcgcgttttaggcccagaaggcccagcgcgcggcgccggcgcacgcgtgcctcctcaacgcaacccattacgagtaagacgagaatccaagacgaagtaaacgtgattagcagcatgattacttccaacctttttaattaagccgtattagaaaatttaattagcgacatgattagtcctgaattattttttcatgtaattgcaccgtttagaaaacgtaattagcatcttgattagttcctatttttctgtaattagaacgtattagggtctagttggtttttctttgaaatataatttaatttaagactttgaattcaaaattaaaaaccttcaacactaatttaaaaactttcaactctaaatttaaacttttcactcaattgaaacttttcaaattaaaatttgaaaaaatcaaatcaaaattttaaaactttcaacacaaatttaaaaactttcaactctaaatttaaacttttcactcaattgaaacttttcaaattaaaatttgaaaaaatcaaatcaaaattttaaaactttcaacacaaatttaaaaactttcaactcaaaatttaaaaactttcaacttaaatttaaaaactttcaactcaaaatttgaaaagtttcatctcaaatttgaaaactttcaactcaaatttgaaaactttcaattcaaaattcaaaaactttcaactcaaatttaaaattttcaattattcttttaaaacttttaactaaatatttatgttttttaaatatttaatgctaattaccatagttagccctaatttactgtaattagtgttggctatgtaattagcgcttcgtgctcttcgcgcttagtgttggcctagaaggggtgccttcgtgctcgctgcttctgtaaccggcgcgcacgtgccgagtaggaacacccaagaaactcgagctggatatgaagtaaactttttccttcttgtattccaaccccaattcgaccgactgctaccattgagcccagcctccatccaggccggcccatttcgccctagttggcctcataaagcccaacccacccactcgacctccgcatttcacccctcttggcctcctctcctctcctcttccaccaccacccgccgccgccgcctccgccgcgtggttcgcctccgccgcccgatcccctcctccgggctcgcgcctcgagccggagcgccgcaggtgagccagagagtccccccgtcccccgcccttccttcacctaactctagggcccgagcgatctggtgttctggtgcgctagggttctcgcgtggggggttgggttggtcgaccgtgctctccgcgatctagggtttgtggctagggcggctctgagctgcgcggaattttattctgttagggggtcctgctagtcgacagctgatatgatgtgtgtggttgaagttattacactttgacttgttcatgatgaaatataagactcttcgatgcttcgttttaagttatactccttattactgattgttcatatgtatggcctttcattgttggattagtttgtagtacttgccctttttagtttactgttgattattagtaatattgcatcaaggatcagtggctcgatttaaataataatggtactaattttctgtaattgggctatcagttgggagatggctgggtatatgtcaagaggccccccaaatggctctgtttatgtgtgcaatctgcctcctggaaccgatgagaccatgctggccgattattttggcaccatagggttgctgaaggtatggatgggggtcttcccaggcaacatttttgtagctgattaaaagattcttcaagcctttgtcgcttcattttcatggtaattagtcattttctgttgttgatctcaacagaaggataaaaggaccggtcgtccaaaaatctggatttacagggacaaggttaccaatgaaccaaagggtgacgcgacagtcacctatgaagacccacatgctgcttcagctgcagtagaatggttcaataacaaggatttccatggaagcaccattcaggtccatatagctgagtcaaaaaacaaagacacatatgacaactcggcgagtttgaacaactctgctggccttggtggacaagatgaattggacaacggggcaggcagagggagagggcacggtgatggtccaggaaaagcctggcagcaagatggggattggctgtgcccaaatacaaggtctgttttgattggtaagaggcttccctgtcacttaatttcttttgctgactactatagtagtatggtcatcaccgtgtattcaaaatcctgtctgatattgcttcctctcccagttgtggcaatgtaaactttgcctttcgtggtgtctgtaatcgctgtggagctgctcgccctgccggtgttagtggatcaggtgccggtggtggtggtaggggtagaggccgtggaagtgacgatgcaaaaggaggcagccgtgctgctgctgttggtggtcctcctggactgtttggtccaaatgattggtcatgcccaatgtaagaatacccacataagtttgctgtttcatgacttcttctgtccttaccttatttgtatttgttattagctgttgcatgcctgcttgatgaacccaattgtgctgtgctctctatgactatttatgcctgttcaaatcttcaatattatttctaccctgtgtttatgcaggaattttggagaagcactaaatgttggtaatcaagctgttagaaatttaaatttcataggtgttataactcaatcatcttaaactttagtgactgaaaatcaattttgcaatatactccctccgtcccacaaagactttatttctagcattcaaaatttgtcccacaaagacttcatttctatatgttgcagccaatcaagctaatgcacgcacatttaattggagcctaggaaatacaaccaagagtattaatgaggggtaccatagacattttttctccctactactaatttgtctgaaaatcgctagaaatgatgtctttgtgggatggagggagtagttattagtgaatggtgaccttgtaatctttcattcttgttactaacctactatggggtctaagcttttcaataatgtttcgtcaaaccgttatttccattaacacaaatattttgtaacttcattaggatgatgacctgttggtgtctcctcagtcctatgggattgtagtactaatattatgtattgactaaattgatcaacagtaataaaagcatcatggttgtaccatgtactatattataaaaccgcatatgtgatgataaataatttaatgttttccaggtgtggcaacataaattgggcaaagcggatgaaatgtaatatctgtaacaccactaagccaggtcacaatgaaggtggtgtgaggtaagacatgcacaacctgcatgtggcatgttcattgctttgccagttaaatagtcgaaatgtattatttgcctttgctttggcatgaactatggtgagcaatttatgtaaagcaaagcactacatttacctgtcctgctcatgtctaaattagagtacactcatcacaccctggtttgtggtgactgatttttggctataatttggcagactttggaatgtagttgcctcaaaaactggttacacagttactcattggcattcttttttttttcatttttggcacatacgaatagcatggtaactacagtgctactctgttttcttgtaaacagttttgggcttttggtctcatttgagcaacactagacacaaattagagcgatatgctgttgcattttatcctatttgtttggcatgactgtctgtgaacctgtggtgatgacaattagtgcacctagctgacagtcacacggtgcaccttttgccagttgtaatatagagttatgacaacacaattgggtgcagtactgcagtatgttgttatgacaacatagttggggcaccatcagtggaaacgttccccatttattgatgatttagcacctttgaaattcaacttcaaactcaagtatcgaaataaacatgaaaaggaagattattatgatgcaaagtttttcctttacttttgattgacttcctttctgttaatctttacactcaacatagaatttttaacacaaaattgtacaaaaaggcatggtaaaatgagaagtgcatgtggttgcattacccataaaatcaactcatgtaattgttaattattatacatgaaattgtaagtctttcaatcatgagacttttctcaccaattacatttatttgcagaggaggccggggtggtgggtataaagaacttgatgaagaagaactagaggaagttaaaaggcgccgcaaagaggctgaagaagtgggacatgttatttgatgtcccatgtgtcaagtcatgagttttcatctaaatgttttttttcctgtataggatgacggggagatgtatgatgaatttggcaacctcaaaaagaaattccgtgctaaaacacagcaaactgaaaatgcaccaacccttcctgggtctggacgggctggatgggaggttgagcaacgtggtattacatgctcatttcagtttcttttgttaattaattccgtttgaatttgtgtgtagtcctatcacatgttcttggtaaattatttttgtagaggactaaacatttgctatgcttattaacataggataagttcaaactacacctactttatgatttgtacttgtgcacttaacaaatcacaaaatagatacacatagttctggacaaacaaattactttctggcacagaaatctgatttaccccctttttgtattggacatgataatatttttccatcatcattataggttcaactagaagagaaagcagggaaaggagcagagatcgaggcagagaccatgactacatgaacgggatagcaggaacagagatagaggcagtcatgggagagagcggcgccgaagccgaagtagaagtagagaccgtgagaaggaaagagggagggacaggggcagagaccacagctatgagaggagctgggagcgaggagccgagcgtgaccgtgatcgctataggtgaatactttatgccaggacatcacacgctgcatgccgattnttggttttccgatacttctgttttgtggctgatagctatgctgcttcagctatttcttgtggatgcggttgcacattgtctgtcttagcctgatgacangttatatcttcggacttctcgatgaactagaccactaagctctgattaaatgtgctatgtaccttgggagtattttcatgtaagatttaccgtgaatgctgtccacttgnanctgggaattatttttaaggatattggtttggaatccacntcgtctcaccggttgttgggtatatcatgcaagacttaattttactggtaatttggattttcgtctagtggattaacatactgtcacagttagccaattcaacctcgagttggtaacttttccctcttgttttattgctgatggagtcacaatcttggagatgaaaccaggaaatgaataatatgacactagtctctagagccatcatcatgcattgacatttccaatggtttgtgtccttgtcagcagcagtagaatttgaattgattgggtggttcttatctatcatgttaaaaattttcaggtgttatatcggatgtttgactggatgttggaaggggttttcggacacgaatgaaaaaactaatttcataactcgcatggaaaccgcgagataaatctttttagcctaattaatccatcagcacatgtgggttactatagcacttatggctaatcatggattaattaggctcaaaaaattgtctcacgattttcctcttaactgtgtaattagtttttcttataatctatatttaatgctccatacatgcatttaaagatttgaagtgatgtttttggaaaaaacttttgaggaactaaaccgggccttaatacggctcctatcatatccaaattacacttggcaaatgtcaaaaaaaaattacactcggcaaaccaaactgctcggagaacggataattacacctcctattgccaaatgagggttaaatacaaacaagggttttttaggctatgttatgtcagtttcctgatgccacgatcgtgatttgtgatttgtgcttgaacagttcaaaagtactcgtagagaactactgcatgatgacctctatgttcctacattccgaaatcgccaacttgcatacgcataagaaaatctagcatgattcacggaaaataatcctgtatataaagattatatatctagatggtcttaaaaagcattgttgacctttgtttttttatgtacatattttagtaaaaaataattatataaaacaatttgaaaaataccacaattccaaatactatttctggtattgttttgttcaaagttaataaagtttgattataacattatttgttgaatctgtgtatatgtcccatatacgccctattcttttcatattatttcatcggattattgaaatttaaattatttgctctaaagcttcaaaagaaatatgtttttttaaagaagttctattcaattttgaccacttgttttaagctacttatgaagtttataatttgaaatatttaatctatccctataatcaaatagataatccctacaatggctaacaatctttccatccagggagctgcacaataaatcataattaacaagacatttccaagcatcctttcctagagaaaaaaaaatagaacccctgtattgtatttctttaataatgaaagtggtttatatctcaagccctctacgaatctaccatgagacacaactaatattacctcaaaatatacttaacaatttaaaggtctcatttcatcatacagaagacagagaaacccacaccttcgctggacgttccaagacaataggcaacagttccccatccactcacatgccaacacttttttgtgtctttgtccagcttgctcaagtgcacaagcaaaaacagccatcatgcacacatgccatcgccatcaccggcatcatcagcaaattcttaaatcataataacgccgagagtttctgcttaatgataggaattagattctctaatgcatccttaaactgttggatgacagcatgagtagtcatgtgctgtgatgcacacaaccacacggtttatttttttctgtcttccatgcttggaaccttcattggatcaggagctttcgttttgtgttgggttggaaacttggaatcttgacatcaacaacagtagccagattgttggacagccaattccacagtactgtgaaaagttgattggtcacgaatcacaaatgtcactgattttatatatcaaaattttggtgtaagattgtagatacagtaggtaaagtggtgacatgagcaaagagttatattgctgattagtttataacaaacgaaaaggagtcgatcgtgtgactatagaatccctatttaagaccaagagttcaatttaaacgattggagattcatgcaaacatgatatatgattgaagaaaaaaagaataaaactttaatacttctcttagaagagcaaaagttaagtagttatgaaagtaaaacatctttcaggggggggaatggttttaatcaattccgttttaagcgggatagctatgttcatgttgtctttctttgaggttcctaaaggtattctcaagaaattggactattatagattcctttttttttctggcaatgtgatgaacacgggaaaagatataggttggctaggtggagcatttatgccaacttaaggaatgtggaggtttagggatacaagatttagaattgcaaaacaaatgtctacttagtaaatggttgtacaggcttttgttgaatgaggatgtgatttgacagaatttattgaaaaggaaatatttgatgaaaaaaaactttcactcaagtgaaaaaacaacccggggactctcccttttgatcatgacttatggcgtctaagaacgcttttctttcatgtggatccttaaaggttcacaatgggacccaagtgagatttttggaggacagttggtgtaggaacatctctttggccaatgaataccctaggtcgtataaccaagtgagaaataaaaacgcttatgtggcagtactcatgggaaaaagaccgcttaatgtgtcttttagaagggctactgtggtggttaaccttaaggattggttggaggtagtggcaaaagttttgatggttacatagacataacaaaatgactcttttgtttgggaggtacataaaaaaggtatgttatctgttaatttgatgtacaaggccatcatatatcgtgatgttgtaccaagaaaagaggtgatatagaagttaatgttgccattgaaaatcaaaaaaaaatttatagtacctaaggaaagaggtcattccaacaaaggacaatttggctaggagaggatgggaggatagcactaagtgttacttttgtaattcaaatgaaacaattcaacatcttttctttgattgccctttggctagatttgtttggaatgctatttttatagcttttggaatccacctgcctactaatgttgctaatcttttgggtaattggttttatggagttcttcctaggcttagagctcaaatacttgttggtgttgcggctttatgttgggcggtttggttatgtagaaatgatgtggtctttaatagcttcaaagctaacttatttttgcaggtaattttcaggtagacattctgggcgcaggaatggtccttgcttcttaaagagggagatgtaggatcataaagggcattttccaccccaaaagctagccattgaggtgagagctcccccacttatatcttaggtccttttcccttccacaactaatgtgggactattcaacaatctctcccttcacacattagtgtccctcagcccttcatcgccccttcactgtatacgggccccgcccacggtccatcaggtatacgggccccgcaggcacccacgatccatcaggccttgacacactgtgtccatcgggccagagatgttaaattagccatactctaataccaattgtaggatcgtaaagggtctttcctaccccaaaagctaaccattgaggtaagggattcccccacttatattttaggtcctttgctctttcataaccaatgtgtgactattcaacaggagatggtcaacttgtgaaagacgcgtgtaggaagctggaattgacaatgttagatttctttgctaaatatgggtggaatcaaagaggaagattggaagtttaagacttttctttgtttggatgttgctttttatgctttttgttgcattgtgcaagatgttatgtggtattgttgttagttgagtctaagtacttgtgtgaaaattttggttgtctttctccttatgtaaggggatgagtctaagaactattgtaagtttggttggttgtatacatccgtctctagatgtagaggccggttattccattatctttaaaaaaaagtagtgatgaaagatttgtttgttcagttcagataaaaacactaaagtaattctaaattatgttatgaattcaaaatcagtcatatcacaaataggcatgcccaaggtcaccagattcaaggcctcaccagttcggttggagaatttagattatctaccacctaattcgcgtgcctcaacttttttaccacccaattcgcatgccctctataatatgtcattagaactgctaattgctctatttgataccactttctcagtttttcattatttctcatttcttaatcccatttgattttttctcaaactttatggactgttttgtccctgggcccactgtcaaatgaaaggaagagaaatcctcttctctggatcgatcgatctctcgctgtagcgctagcccgagcgcgacgagctcctccgccggcgagcacctccgtcgccgggcgccaccaccccgccgccgagcgtcgcccccacgccgacgagcgccgccaccccacctccgagcacctctgtcgccgggcgcccccaccccgccgccgagcgtcgcccc

SEQ ID NO: 10463 - DNA, 504 bp, Oryza sativa
tgtttggtagtcttgcatgtatagtcgtgttcttatttaggcatgctaatatttcaaaacaaattttacagggtctctattgttcattgaggcagcttcttgaagaaggctttttccatgcagacccccatccaggtaatctggttgcaactgaaggtggatcactcgcgtattttgattttggtatgatgggggatattccaaggcactatcgtgtagggcttatacaaatggtaatcattgctcccttttctcatgtgtaaccatatggttctgttggtttttcttcctgatttggtttttgtcggttgctaagaactgtttttgaccggttgcagtgcagtctggtgcatttctgcacagttttgcatcttcaaattttgaattgaaaattcgaaatgactggtaacaaacttcgaacgatttggttaccatcatattgtagagtggaaataggttatatcatggtacaaaataaatattaagaaatgattttcataatgc

SEQ ID NO: 10464 - DNA, 58710 bp, Oryza sativa
  unsure (1)..(58710): unsure at all n locations
tatccacaacacagctgggtaaaagaaactgtgctaggtttgatatttctgatgaccgtggtttcactcacaaccgtagtagctgacagattgataggtcttgaggtcagatgcaattcaagaagttccacgtcaggcctattatcaggcttgctcaattacaataccatacttttatatttcaattagtaaggtgctaattctttgtttcgattctactgcaggatacatatgatcctatgttaagggaaatactttctgacagtccaacctctaggctattgtgtgttttcctatactgtgtgattgctccattgtcagaagaaaccatttaccgtggattcctcctaacagccctgtcatcctcaatgaaatggaaggatgccgtaattgtcagttcactcatgttcagcatagcacacttctccataaataattcattccagttgtttgtcatcggatgtatcacagggttagcttattctcgaactggtacattggcagcgccgctcaccatccattcattatataatgctgcaatattgcatatgactttgatgtcttaactttcttagggtttcaggtacatgctaattgtttccccactttactgctgcttcttcacacgtaggagttttttattcacaatccaaattgtttaaaatcagtgtgctatatgtggttaataagatgatgtaatcttagaattattgttccctttaggcctaagtacataccaataatgtcaactatcttttttcagtgacaccaaacgaccgtgcggtgattgatgacatatctttctacccttctttcagttaggctatgagaagtgctattattctgagttccacacatgtattttctagttttcggctgaatatggataatcttcatgatatgtcctggacattctttttatgccaatacaccataaccatctgagaaaaagggtactcttaaaaaattcaaaagcaaggctgaataactaaagattaggaaaatgatgcaaatgtttgtagcctttttaaatatcaaaagaagaatcagaaaatctacgaatgcatgtggatggctaaggaaagagtaataattcagaagttctaagagtgaattgtatgtaaggataggcatatttaccaaagtttcattttgggctacccctaaccaataattttcacttatggctaggtattggtaccaatgtattgcactttgaaccagtgagccatgtgtcggcaggactaagagataaaatatgacactagctagatggggaggagtcggaggtgtggtcctcttctccgttctcccacaccaatgagctcctttactctcaggcaacttttctttcttgtgcagtttcccactgccccctgcgctttagccacaaatccctgcgccttagtcaattaatcttgtgtaacaaacatccttacacacgcacaatgttaaaaaaaactgcaaattttagtacaaattgagtgtgacttttaaatttctttgtttttcatttactacattaatctagatttatttttatgcttatctaggctatattttcttttaccaaaaatgttataatttttttattagcatgatctacaataaagtaccaattcttcagaaaagtaacttgagttgtttcaacccaaaaaaaaaatcgacatgtaagatgttgaatgttgatatacaagttaaaaaatgaggttgataggtaaggaaaaaaaacaattactaacaaacagatgcccccttatccagtacaaatgatatccgccacaccagaaatgtttttgaacatttcatcttgcttttctctatagtctaaatattgagtcaactggagttataaatgactgtttttaggctggtggtctaattgtctagtgctagtctagctgaactaaattgtggtcctgaacttttaaaagtttaactgtggtcagaccacaaggagggtcttcaagttaactcaggcttggtagtttgattttttttcttttttgatttttgtaaccgttctctccctttggttattgaacaaatatatgcaagaaagattaattggaacatccatttaaatgaaatgaagtctttggaccaaatcattgccaaacctcaagccctttaatttgatactgctgaaagaaattacaggagcaaagctatatatggaagtgaaaaatagatgtaacaattgagatcacagcagcagtatgtgcatcagttagcaaaaaaaaaatatttattcttcatcacaagggtgcatatcgcctatcaatctgcagcttgggacaattagggatcgtgtcaacagaaatcataatggcattcactgcagcttcagcctcctcagcggtcaagccataacagttaatataggcatacaccttggtgaggcagtagagatgctgaatcccaaaatcaaagctgccatcccaagacttcacttgaaatgcactgatcaggatatgaaggtactcgagctttgccatagatcctgcctcaaaaaccaatcccatatgatagcagtgaatcttaaagaatgttagagattggaatccttggctactgatggtgagcttctctttaggggcctcatcggagaataggtatagagtgaggagagaaggtatgcttccaagcatcctcagatcttcttggttaattcttttgacatatatatgcaagtactgaaggtttgcaagggattcagtccagtttggtatcctggaaatgggatgccatcgaccaatgtataatttccggagtctacaaggagcaagggtccacaaatgtagtgagaaatcgtcttcctcgtcatgtccatggatatcaagagaaagagactcaaggtagcatgtgcctagcttggtgagagaaatggccagattttccctgtaagtttctgcatttccttgaaagtcgacgtagttccaaactaccctcaacacccttagactggagatctttcctatctcttgcagaaatgttgaaggatacatgaaaacagagaaacctgttagctcttccaatgcttgcatatttccaattccatcaggtagtttaacatggcaatcaacaagcagatgcgccaaccgttgaagctgaacaattgctgaaggcaattctttcacatgagttgatctgatgtctaatgtctccagatattgaagttcccgtatctgacatggcagatcacttatatctgtccctttgatgttcagatacctcaactgaattagtcttcctatacttttaagatcatggtttttcaatccactacaattttcaaggtccaacacacgcagaccataaaaacccagaagaggaggcacctgtccagcgtgcaaaaatgtcgtcaatgaccggacatgggatctgagcaggtatgttggcattgtgacacttccttcactgtttttatggaatgataggcgacgaatcttgccagttggagtagatgtgagatctgaagcaccaaccatagtaacaaaattttcttcatttgatctggacacgacgaaatcaaggatggtatcgtgcactcggcaagcatgcacctgaccatcatcctctatgtctactggctggagcaagctcctattgatgagctcattgaaataattctctcctatctcatataggctttccccttgttttgcatgaatgaatccttcagcaatccatctacctattagacgctctttctttatcacataatcttctggaaatatactcaaatacattaaacatgtctttagatgatgaggaagatcaaagtagctgagagataaaacccatgccattgtttcaatatctggactgttttcttgtgtataattaattcgacttttcaccttatcccactggtctaatgattttggtttggtagccagcaaacttgatatagaaataatagccaatggtaagccaccgcactttctcaatatgttattggcagcttccctcaattgaggagggcacctttcatcagaattgaaaattcttctgaaaaacaatcttttggagtcagtagcacaaagagctttcatttcatatacttgatcaccataagagcagcagcaagatttagctatttcatttatacgtgttgtggtgactattctgctaccttgactgttcttgaccaatgcacactcaattattctccaagtttgtgcatcccatatatcatcaatgacaagaaaatatctgtttcacatgacttttaattatcaaccaaggatgtattgatacagaaaagtttgttccaaaaagcaatagaaagggaacatcatttgagcctgtattgtttctacaacttatcttctaaggatgctaattgtatcgtttctacatttcggtacctcaatacttaaaaggcaccaaaattaatagtaaaagaaattgattaatttatgctccttttgtcgtaagaaaacattggttctagaatccaaaactgaaacccaacataccttttatcctggaggtattctcttagcttgttgattaagtgatgttcatcagccaatgcaccaccaatggccccggaaacatcagagaggaattttgccagaacatgcttcacgtcaggattttgcgacacggtcacaaaagcgctgcaatcaaactgatttttaacttcaaggtaaacttggtttgcaagtgtggtcttgcccaaacctccacacccaacgatcgccattgttctgagccgttgtgagatgcctccttgcgtatccattagccatttgatgatcttatcctttggtccatcgattccaacaagtctctccgcctccgtgtagagagcggacaatcgaggatcaactgatctagttctagaaccggaggcatctctgtgcagatgtgcttcagagctcatgctggagatgttcatcgtgtcgtaccttctgtaccgatcgctctcgtccatgacacgagccttcagctcttgtatccgcccgctgatccgatgcgacaactgtagccccttgattctccatgccatcttcttgatgaccccggctttcccggtgagggagccgaggtgatgcacgaagaggtcgatgcaatcctcgatgtcgtaggccatctcccgcaccctgtccctctactcctttgtctgggcatcgatttcctccatgtctgcgagcctctcaagcatcgagttcatgctgcgaagctcgctctcgaggaacctgatctccccccttaaccctttgagagatttgtgttcgcttccgagcaggtcattgagcttgaagagaagagagttcagtgcccccgtcagagcgcttaccatggctccctccatatcgctgctgagctgagatattctgcaggtaggcacaatgttagagttgtcctagcaagtgttactatatgattactagaagagactatgcaagtctctcttcttgagatgcacaccatttgcaagtctctcttttgcaaacacgttattgctaacgtttctttagttgttgttgactttggacaagtacatatttggtacccaaaaacttagcttaatacgcctctagattggtgcatgattaacttaacaattttcttttttctgttacacgcatacagtacaagataaaattaacagatatactttagggaaagtggaggatctcctttagagtggactcaaggaataactagtgcaagatgttaaatgttaggagttgttttttctttccattattagaaaaaaaatgttgtcttcttgtacctctgcctgcctgagtacttagcatttactgaagccctaaatggtcagagaaagagagagaaccatggctttaaaaggtcacaaaaggcatgcatactactacacattattaagatgctaccagttgcaagcatagttaaaataaccggaccagcagtcaaatcagtagtgctttcattggttcattggtctgaccggtgggtcaaagctcaaccgcggaacaatgttttaatatatgtacttatatttaccacaactaacaatcagtagctcatggggtcctactgagagatcacccgcactcccctccccctatgccgattccttcctcttctccccctttctcctccccatcttttcttcctattacagtacaccataatttttttttaaaaaaacaaaagttagaaaaaattatggatagaaataggatgaatagctaatttagtccttcaagtttcatcgaaggctcaatttggtccttcacgtttcattttgtccacataactcctctaaatatttgttttggcttgaaatcatccttgggcccacttaatatgccatatggctatttgtagtcaatatttctattagaaaatgtcccttttgcccttaatttgtatttagctatatactagatagaaaagagaaaaccaagatgaataaataacattgcagatgtttttcctattatttcaacatgtgcacatgaaacttaagcaattactatcgtatacatttgctagtacataatttattttcgttttacataatttactatgcattttctataaaaaaaaatcaagcatgcaattttctgttatatatgtgaatgatgggggtataagtgtcatttatcaagagagttgttggttcaaggataagtttgaactaagatgaaaacttgaatgactaatatggatagattgaaacatcaaggactaaactgagctttcgatgaaacttggaggaccactttggctattcacccatagaaatactatatataaaaattcaaattcaaattcaaattcaaatttgaatcgggtatgtaaacttttgacttataaactttggatctataaactttaggtgtataaattttagatgtatagaaatactatatatagaaaatttttgaattcaaattcaaatttgaatcagatataattcaaattcaaatttgaaacgggtatataaacttttgacttataaactttaggtctataaactttaggtgtataaattttagatgtatagaaatactatatataaaaaaatatttgaattcaaattcaaatttgaatcggatatataaacttttgacttataaacttttggtctctaaactttagatgtgtaaacttgaggtgtataaactttaggtgcataaatttactaaaatagaaaagtaatgcggtgccaaaaaaaggaaaccaggtggagggagggaggggggaatggggcgattgctagccaatagccagggcgattgatcgctcattagagtttccgttgctcatgtggtcactgtaggaagtttgcaatctatcctccacaacctatttttgcaccgatgctcaaaatatggcctttcaactctagtttggggatttgggtcctctacattagagaagctaatgcagagggtggcattagctccaatccagtccatccatctgtatcctctggattagataaggcaaaaatgaaatgggccttaggggaagagcagtaggcccaggttgattttagatgccaaaacctttgcaggactcctttttcctccaatttctacggacttgcttcctatgagtcttttcattttctctctctcatgccatacctcttccaatttctctcaacactgaagtggatctatgaagataaatgaacaggagatggagagaagtacgatcaaccaaactttagagaggcaagtgaagattgctgcttgcatctatttttttttatggttttcttggcttccagtaacaaattttgaggcatatttctatctatcatgtgttctacttatctcccaatttctcttagcgccaaagatgcttccacaaatatgagccaacaggagatggaggaaagtaggatcaaccaaaatgcagagaagtgaaggtttgttgcttgcatctattcttattatttcattggttttcaatagcagtttttggggcatcttccaatcaaacatatgtcacagatggttttcttatttatttgtagaatggatagcacaccatgttggatgcctaggactggaatgaagtttagctgtgtagacgaggcttggaaattttgggttagctatggtggtaagattggctttgatgttaggaagcagtataataacaaaagtgcagcagatgggcccaagtagatggtttgtttgctcaagtgctggttatcgaggaaaacataaaagagattatctaaccaaaaatcctctagtagagacaagaactggctgcaatgttcatatgggaataacattaaacagagttgaaggaaattatgagctatatatatgatttggtgactgaacacaaccacatccttcggttgccagaaacacaccatctaatgccatcacaacattcgaagagtcgtgagataggggagcaccctctttggcggcgacgcggcaagtgccggttcctccatgcacgcgcgagagagtggagccttatccggcagtgacaaaatgggcagcaacaatgttctcggcgctttctctggtgatgggatacctgagtcttgcaatggtaagtggatgttgaggtatgtcaggacacactccgcgctaggatcaccctaggccaaataccaatatttacatcctttaacctactatgtggaatggagaaaagcttggaatagtattgcgcctcttactttttagcccggccagctagggtatcatgcgggtaaagctgggtagacgctgcaaatacgtattgtattcgaatatgacatgttcccggttaatggagatgtgtctgtgggtgactctagagtaagggtgcaagttaaactagttggctattaattaatatggttgaaatgattatcagataaaatggttaataatatcactaaaggtaactagatttgtttaagttagttactaatgatgtttatattaaacgtttaataatgatgtttaatcaaatggttattaagatggtcattccaaaataatgcattatatttgttattacaagcatgcttgctgagtaccttctgtactcataaatgggtttagatcacgatgatatgctgtagatgttggtgatttctatgatttgtttgaaggacctatggttacggtttctaggtcactctatgctcaggctgttcctatggttaagtttactagttaaactgtttgtgagaataagacttatagtttatattcccattgtgttgtgacctctgtggtttgaataatgtataattgaagtttgtgcttttatatcgtttcatgcgtaaatggacttccttggaagttacgtatacgtggggcactttgaccttcttggggtgtccccacaagtattcacatgttgtttttttaaagtacttgtcattctcatattgtaaagcacttttgcttaaaatctccctcttctatccctcatcaatatattcacccctctcattataatccacgtatttagcaaggagttaacaataataaataaaggttagctcggtgatttgccacaacttcatatttcgtctgagctagaatatcttgtcaatcagaaaattcatcgactcaaggaaatcatacggagactaaaaaaatttgtcgattttcaactagaaaattgtcctgccatgaatcaaacagagaaaccagcaaacaagaatcatcggtgcgtgtatcttgatcaaccagagactaccgttcatctcgaggctctcgcataataagggctgacaaccataactctcctagtatctagtatctatccctgttggaagtgcacatgctatgttcatcccagtttactcgagactgatgaattctcaacacctcccattcttaaattcctatggataagtaggtgccatcattggcaattggcaggatatcacagaaattgcagcgaatttgacaaaagcaattggctagcacgaacaagaacataacaaaaagggagcaagaacaaagtctgcaaaagaaaaatggggcaattccttacatacccctaaaagtttgctccatcccttgcatgcccttgaattttgtcacatcccttgtatacctctgagatttcgtcttgatcccgtttatacccataccgttagttcaccgttatcttttttccaaaatggccatgttgccctttttatagtcatgtgatcacttcaaaaggcgctaaataaagcttaatgtgaactttttaaattttgtatagatagttgagcctaaatttcaaaaccaatatttattttttgaaatatttttaatagattttcaagcaagctttaacaaaattaatgaaactcatatagaagtttcaccgaacatttagaaattaaaactatatttaacttgaatttaaatataaataagaatgttttatgaaatttgatctaaatttttaaaattttaaatttaacttttcaaactttgaggtcaaataaacacattctttttgttgtttactaataaaatatttttcaactcgaaaattatgttggtgaaaaagctagcgcataggtactctaagtaggggtaatatagtcattttgaaaataacttaatggtcaactgatggtcaactaacggtatgggcttggaggagatcaaaatgaaaactcgggtgcatataagagatacgtcaaaactcaagggcacagaagggatggagcgaaatttcaggggcatacaaggaattttctcaagaaaaattggggtaattttgtggggttttctcttcctcgaatcaattacataagtaaacattctacatatagaatgaaaagaccaactaaacgaccggaattgtcgttccatcccatgatctgccaaacgcgatctcactacgcacgcaccacgcatcatgcacgcacagaggagtgtcacactcaccataaccactacactttcactatgcgctcaccatggcctgcctcctaaacacgtgctccaatttatcgcttcctgccacaattcgaagcgttgctagggctgcaccacgacttagctccatcaaccaacctcaacatcatatattttttagataatggattttaattagggggctgctatatcaagttatcatgtttggacgagatgatactaggtaggtactagctctagtaccctgtaggtactagctaatacccatcgatactaactgatacccatcgacaccagctgataccctgttgacaccaggctgatactcctttggtatcaggcatgataccgatcgattttggtctaatactgcacctctgacaaatagaagttgctcctgcagcagacaatgggcaacgtctgagtggtgtcgcattcaatggctgtacaacttacggtcgatggtggcagtcaatggatgatgagccaaaggggcttggcgatggccttagccggtggtccgggcatggggccgacgaaggtgtgggtgccggagggagtaggtggtcgagctggagcggcgccttgaacaacaggtcaaagtcatgtggatggagatcggcattgttggcgttgggaaaaagtcacatggagactagagtttaaagctggttcgtgctgcaccgaggacactactttggcttatcatcacgctacactcactattcctctagctcgtgcttttcatcggcagtgaaggtagggtggcggcactgggtggacataagggaggcaactgcaatggtagggatgaatataaggagtgtggcgaggacaggacgagggccgcggagtattatatttttttaaaagaaacaattgtgcgaggcacaacagttaaataacttatttcatctagttataattctatatatatgtcggctcccaaaactaacgatttagaaaccgacatgtttaactgtatcaaaccctggatcagtagattgatacaggttcaacaagctagatcttcatcgcatacatttggtcaagactccaaaggagatatctttatataaaataataggatatttacaagtttgtggttaactattacagcagaagctatatgatgatccaactttgctgttttactatagaattaaaccatctaattatactagacttgaagattaggtttaaagggaactaacttatgtgattgaactcccagcttcggcaacaactccaaatagactctgaaaaagaggggttgaagcaagggtgagtacaacgtactcagtaagctattatattattcaacaatgaatgcatgagaggtaatatctgtgtagaggtagatttacttgcagaaagctgagaataaaaaggtggaaatcctgaaatgtttcatatatgcaacagtatttaagaaaatcttgaattatatttctaaccaaagtaccatatgagtcccaatgctcagatccgtgagcacggctattcgaatagattcaaggatattcattctgcagtagatgtatgctttacctgtagtccataacatgccaataatcattagcttattcatggcccagtattaggttattaacaattgtggtacctgttccatgaactctagtccccatgcgctctgaacgtaatgttatcagcaacgagaggagttctggcgttcccggggtttttagagagaattggatgagagaccccacgtcatctcaaccaggttttcataaattcacacacacatcgcgcgataatcaagatatttacctgcgcctcggtaaatatcacatttgcccttctcggcataagtttgtctcctttgcgaggacttacataagaaccactgtacggaggtaccacattgttaattaacataatatctaggtctgtccccattctagaagctgcggtcgtactcgtttgtttgacataagtacttggtaaacttatatcgactgagacagtactagccacccggaaatcaaccaaatcttgcgtactgtcccaatctaagttcattatattttatgcaatttaactaggcagggctaagcaaaagctagcatataactggtttgctatatgttcagattatgcattcaaaatcatgaatggcaaatgcatagaatagaatgtagaatataggataattatggtcaaaggggaggaataataacttgccttgctccaacgcaaataaatccaagataggcaacctgattatccaattcttgaaataccataggttgccatccaaaagacaatagactctactaagaaagaggaagaaccaatttcaataaaaaccataaaataataagaaaacgataaacggtaaagagggcttgggtttaatgtataacctatctcttttatagggtatagggattatggggctagtatttgctagcggtaggtttaggtagtataatacctagggtttagttgtatgggagtcatttgtggagtaggatagcatatcggctaggctctatattttatgtggaggctctcgtggtttggatgataggaaatatacaagatagttgatatggttaaataggtatgtggctaatatgggtcaaggttagctttgatagaatagtggctaggatttagttgtttaggccgatatcgaggtaggataaatatcggctagggttttaggtgtttgctagtcgttgctagagttggacagcataacgactaggtttggtatcatttctagacgtgtcgatagacagcatatcggctagaagaataggaggtgggcgcaggtttagtggggcggaagtgttactccgacaaccgtgagtagcggcggagcggctaggatcacacagagcccgagagctaactgtgcggcgtgcaataaaggtcgaggggatagtgaagctccgaccgctgtacgcatcaaggcgtggggttccaggagcagcacttcgaccttgggtttggtttaggccgggctttacaaccaacggtccgacgttgaggtccgtagaccgcgaacgtccccatggaaggcgtaaagttccaaccggcggctttttagtggctaaagggtattttggaaataaaagaaaatatttggaaagcaaatataagtttaaattgtaaattcaattataagattaaatcaaatatttattcggatggtatttgaataaattaaggaaattcaaataaaatcttaaaatagcaaatttgatattaaaatgaagagtttgaatttagatgaattgaggtccaaatttgactggaatcggatctacggtttaggacatatgggcttctaaagaataggatttgaattaaatctagaaaatgagaaaagtcactgtgcaggggcccacctgtcagtctttttctttttcttctccttcttcctcccgttcctttcttcttctctgttccagagagagccgagagaagagagaggagaaggcaatcggggcggcggcgctccggtggctggagggcggtgacgtcggcgtccacgcgtgttcccgagcacgacgcacccggggaggtcggtgtctggtggagagagaaagggagatggccggaacggcgacgacaagagctcaactctggcgagtaaaagaagtggtgatggtggcttataggatggctaaaggagaggggaaactagaaaaatgggttcgtcggagggaggcaagtatggtggcgcgaggatttggttagtgttgctccggtaaaggagattgggcatggcaagatggtggccggcatgggagagagagaagagagagagagttcggcttgtgtgtagagaagggccggctatttataggggtgagaggcggtggtgagaggcggtttggaggaggagatcgagaaggacacggcgacggtagcgtgagaattcgaacgacggcggccggcttcgtttccttagcggcgacggaagaggagttggcggcggcgtgagccgtgcacggcacgcgcacgggaggaggagacggctcggctgggatgtgggctggtttgggccggctcggcttagctgggccggcagcccaagaaggaggaggaaaaatagaaaagaaaagggattgggccaaaaggaagaaagaatggagtttcggcccgatgacaaaaagaaaggaagtctaatttgaatacttgatttggataactagattttgcgaagaatttgaattcggagagaattcataaaagagatttcttaatttatttgagtgcaatatttagaggtggagtttgagggaatttatttggaagcactcaaataggaagggaaattaataatattcctcaaatatttttgggaatatagaagggaattagttgaagacaataaataggatttgagctctaaaattggtgttatgtatatttatggctaaaaggggaagttgagtgaagaatataaattggaattttcttagcacaagagcaattgttcacaatatttgtaataatacaattcttgtgccgaagaggaaattaagccacagagattaaattggtggctagatcaaaaggaggaatttggatatttggatcgagaatcaaaggatgggtttaagatcaaaggatggaattaacaattaattctaatgagattggaattactttggtctaggttcaagggcaaaattggaggttttcttggaccataattcattatagtaaaaatggttttcaaactaaattttgaataaaagagttttagtcgaaagaaggtttaatattcaaaaatagaattccaacaagaaatatcaaatatgtttttaaatgaaaaacacaaaagagattaaataccagagaggttttatgcaagttagttttaggaggtcctactaattatattttcctaggtttagaaggttattaagaacataagaataagaatcagcatgatgcaagattagaaaatgacacattttcaggatattacaatataaaacaaagtataatgattatatgttctcattttcacaacaaaaataagcgcaatgcaacacatcacaacaaacacaaagtagtattaaaagtaaaactaaatgatttaggacaggcgaaattttttttgatattgtggataccactattttcgaaaataatttgtagcaatagcagtattcaaagttcaatcgagctttagtattctcaacgccggtatgaaccgaacattgcccaaattactatgtcaggccaggcttgcaggtagctctttggcatgcattttcatcaggggcatggcatgctcttctggcctctgcagccaattaggactttagaggcaagcaaaagcgcagtcttgaggagaaaggaggtaggcagtagactacacgtgtgattgccttgtaatagcccgtggggagttctgctttcgcttcccagtttggccaagatctactatgattcctttgccacgaatcatttcatttcccaatacctcccaatccatataatcaaactaaccaagtaacaaaaatcacacggacttctctgttctcactaaaacgttgtcaccttgcaagcgctagcaatggatcgactccctcttatggtgccttatggtgcctgtagatcgaatcataagaactaagccaaccagaggagggggtgaatggttgatacacccaaaaaccgaaaacttttagcggaaataaaagttatcctcgaaatcgacggaagtcggtctgaccgagattgatctgccggtctgaccgagtggatgctgccggtctgaccggtgttgaatctccggtctgatcgccgaagtcgcctgccgcacctgtcgccgccgccggtctgaccgccgcaatgccgccggtctgaccaccgatgagttgctggttagaccgccgaaacccggtgaaacacaaatcgaagaactcttaaagtggatgacgactttattatttctccctgtgtttacaaagtgcaacaacagcactccttacaaaaattttgactaaactcgaaaccctaaaccaaaactcaactctattgctctctaaagcgatataggaagcctcacgctccctctctatttataccaaaaaaacccctactcaaagtatgtgtataactcctatacacaataggactccatctttcagtttccatacgttttacaatttccaaacgtgcagcaaacaaccgaccgcaccagaaatccaaaacggattcgctcccaagctgacgtccacgcgtgaccgtctccgactcgctgccaactgggcccttacttctcctgggccgacttggcatgccgccaacagccaccgaagcccactgagccgctctcctgctgctcggccaaccagtcatgcacacatacatgcttcaccatgcatgtatcgatcacacatacatgtacagcaccgtacatgcatgcatacctgcacgctacagtacctcgtgtactgtagcaccatatactactccaactttacaattctcttcgcgaacaccggcacttgcacgcacacctcgtgaagcccgttgcgaagatctctcccacacgatgtccatccactgtatgctatcttgtatccaacttcgtcaccggtatccttgaccgtctggaactcaactcctccctgagtctagtcccgatccccaccgttgaccgaagttgacctccaagaatccagactctagtcaccttctcacatggtatcccgaccgcaatagacctatgctcctccctgagcatagtcccggtcctcaccattgaccaaggctggactcaagtcacctgcacacaattagacaaaacaaccgtttctgggcacagatatcacaacctgacccacattagtcacacgcactcacaccaacattcacacaaactctcaaaccaattctttgattaaatcatttgcatagccaattgttcgtcacaaatattaattatgacaatgatttcacattgccatatgaagaggttttgtttgttgcaatgtagaggtacacatagccaactacagaaggagttcaggtttcttcatttgagatactcccatgagaagatacaatatgaggagttgaggatcacatttacatccatacatatatatacatctttaaaaagaatgtagtgatggtgacagtgtagttatcactacacctactcccattgtaaatttgcaagttaacccctgaacttattaatattaaaaagattaaatctaaatggatagccacataaaaaactagagtaagatgaatattccctatagcaaaaaagatgagtaacacattaatacgttttcttttatccgtagcaaagcacgggcatttagctagtatgcacaaatggtcggtagtccttttgttttgtgcaagaattgtttagtctgagaaatcaaaacgatatattctcatggaagatctttatagaaaggcagggggcaccattttacatacatagtgggaacaaaaatcctgacctctgcatcatgagatgcagtcatgcagctacagtaatttatattcaaccttgttaagcaagtatgataatttcataaaccttaatttcgtgatttgtacaacttcatatggatgtagggatgaagcaatccacaataattctgatctctagagctagtttgctataccagtcaatgacctttctaatgtggacaacataaaatccgaagaattcacatacacaaactcttcaaaacaattagaattaatgaggtgtgtattgttatttttatcaaatagatactccctccggttctataataattgacgttttgggcaagtttgaggtcaaacttttataactttgaccattaataacttcaaaatatttagtttaaagaaactagaacaacatatatagatttgcctttcaaaacactataataaaagtaaacatgtatttattcattgtgtatattataatagaaaaataaggtcaaaggtatattttgtagactatgtcattgtccaaaacgtcaattaaaatgaaactggagggagtaatttggtgtctcctacattataccatactgtgtgagtgaggcttcaaaatagtaaatactaaaatatcatatgccattatattccaaattacatatcttactgattatctgaatttagttaccaagatatatagtaaaaaaacgtcctatctttggagatataaagtagagtaagggtaatgtcaccaaatctggtaacattactgtaggattgcacaacaagaactaagccaactagaaaggaggtgaatgcaccctaaaaccaaaactttcagtggaattaaaagttaccatcgaatcgacggagattggtctgactttagtagatggccaatcaatttcatggcagacatggcgttgctcggttaatccgatctgctatccaattggcaacaaatttttttttttgcaaagcttatgaagcagtgagaaaacacaattgtttgtgattggcaatggtgcaaaagccttcaagcagcataagaaactgtgatggtgatcatagttgttgtaattatttgttattttttctttttacacagctttaattggatttgctaaagttgattttgttttttctcctaattatttccaggcaggattgtccatagcaattcttcgtgttatgtaccgtgcaacgctggggtattattagaaattattggtccataaccagtacatcggtattaaaacaagactgccgtgatgggagagagcagtagtttcttcaagtggattgctaaaagagacatgttgcaagtttttggggcaaaaaacttttgaatgtaactacgatataattttgagttcgatcacgtatgtagatactggaaatgatttttttctcaaaatgtccagaatgtgatcgagatgtgcaaaaaagaaaaagaaaaatggtttgttgagttaaatggcatttattttcagtctgccagtcgatctgccacttattgcctaattatcgtccacatggggcgttattttttctcacttagcccaacgatacaagctgtctatatatagttcatatagatttgccccactttgcaaaaacctgcttcagtcctgagttcacagcttgtatgctaaaaacgataacttggcttcaaaatcctctttataaacttaaaattccggccgatgatactcataatggccctgatctatatgtcatgtggaattaatgctctctctcattttggagagaaaaaaaatagggcaaccttttacaaactttgagctatcctttagccaatagattggactttgaattagttacttatcgaaccaaagatttcccctttttaatcacaggtattgttagtacatgtcaagctaccatccgagcccgaagtaactgaattcccaagaactccaattcctagcatcacaaacgaaataagatggaaaatgcttcgcgtcggccatccgacgctccagcgaaatattggacgtaacattatctcatcacgtgcatgcctctatccactgtcttgcctccatgcaaagcactttactactcccttgctctatgtagagcactttaccaaatcatgcaccgatgcacgtatacatttttatatttaaatgatctttttttcttaaattacttctccaatttacaatccgattacactattaaacttgttgcaattaaatcttacaacaagatcacacatggctatattccgatgaaaaaatattttttattcttttaaatctgtcaactagtactagtatgctatgtttcactaatacatctgtaaatgttgcacatattgttttttcaatgttccaatttgtattttataatgtttcagatgtaataacttaatgttttatacattacatgaaaatattttaataatatttcatatttgcaaatatattatatctttcatatgggtttttatgtcattcgttttttttatttttatgtctcactcgttgagactcaatgtttcatacagtgattattggtgttacaattagtatttcttaaatgttgcatttctctaaaacattttatagactgagttagaacatttgaccaagtttttttttgtctcactcattgagactcaatgtatcataaaatgattattggtgttgcagttagtattttctaaatgttgcatttctcagaaacatttttatagactaggttggaacatttgaccaagatttttatgtctcactcatggagactcaatgtttcatacattcattatcggtgttgcatttagtatttcttgaatgttgcatttgtctgaaatattttatagactgagttggaacatttgaccaagtggtgaaacaattttttacaagtggtgaaacaacatttattttttctcatcaaaatataaccgtctgagatcttgttgtaaagatttaattgcaagcagtttaatggtgaaatcaaatcataaatcggataattaatttaaaaggaaatttaatttaaagaaataaaaagtaggttgaggcaagtaccgcaactatgcagtcatgcatgcacaagcatataggcttcttacacgtgctactcaactagagtagaaacaacagtcatgcatgcacaagcatataggctttttatacgtgctaatcaactagagtngaaataatagaacataggtttacatgcatgtatagatgcgcggtagtgcagggtcgggcgtccgatatttgcaaaatatcggacatccgacgcgtagaatcctccaaataagatcaataatttttttgccacctgatgtgtagggagtttggccacatcctaataacaggcaatgaagcaatatgagcctaggcaccttggcaaatatagtgtcacattcaggccaaatgaggccttgcctaaacctgcgcagttttgggctgtgacaatatgctcttgcctttggctccctttaaccctcttcctcttctcttgttctccctgtgaatcttttatagtgtactgtccctttattttgtatttactgaaactattcatgttgtcatgagcctgttattctcgtcttacttcgaatattcccagtaaaacttaaaatataattatattatttatgaagatttgattttaaaataaagtaattctcacaaaaaaaaacgacagagacattttatttctaccatatataggttcccttgtctcacagagttttagcaccgagtaggtgttcaatttacagaatccagcgaggaaaaaatatgcactatttcccttgtttttctactccataggactatagtaccatgtaactcctactagagagtaatccaaaagggatcgcaacaattctagaaaagtagagacccaaaatataatataggggtgagacactctttcattaaatctcttcttattcaatagtatacaatagcttattctcttctttatctgtaggcatacataggtagtttcatatttagtgatggacccaattagtgagtaaccgggctaggttttcatgggtcgccggtttcctaacacttcttcttgggctctcattgcgtgatgcctatctttcataaaaactctataaaaacctagtaggaaatatttggagaaaaaagtacatagtatacgcttgcaattaaaaaccttgataagaaactacatgtaaaatttatcaaaggaaaaaagagtacaattcacccaatttttggttcaatttttctacattgattttgggcgcttgattttctatatcaaatattttagaatgagtcagcgaaattctcccatgaatttggcgtttatctaagtctcattattctgattcctcggatatatttattcaagagaagatatcaataataatttagtggataaatctacaagatttccacgtaatctcacaccaactgcacctactagttttctgacagtatcgataccaattccaaaaaataataaaaaaatatattattttcaactgtaaattttagtttctctaatttctttcaattgcatcgtggattcaataataatttggtaattagatgtgatttagtgcagcaacatgcaaattaatgaagcattgcaatgcaataatttgatgttaggtgcaatttagttaaaaactttcgagctaatcaatccggtgcatgaactaatttcactacaaaataatagtggatttctaactagaaaatatcccaccgtcaattgaccggagaaactaacaaatgagaatcatcgactataatgataaggagagaaggcaatacgacaagataaaagaggaggatgagctatggtatgcttcattaatttggctagggatcagcattttatttctgtactagtgtaggacatgatgtgttctccatgatttgcttatcttacattattcttgtttaatttgggtggtagcactgtaacaaggtacgtctgtaccacaaaatgtaaaaccaacagattcaggcaaaagggtaaaagaagatttgtgtagctattttttaacgttattatatttttcagaaaataattatgtagttaattgtttaaccaaccatgaaagttcaatcatgtatgaactttctcctgggagtcaaccaaacgctagcgatcacaatgcctaagagcaagtttaatagtatagccaactactagcttcaattaatctatagccaatctaatagctcattcatacaatagttacatactacactattaatacctggtcccacctgtcatacacacactgtgtcttggagtccgtgctacagctggctaaaaatatgtagcccgctactcttctctctccttatttatctccttaaaatatgtttgtagctggtttatagcatgctattgtacctgctctaactaggcaaagagaaatcattaaaaagttcaggtcctttctcgggcatacatttttatttgtatattttgatgagccaaaaaggagctacgcctgatatattaaggagtaaattaaaagagtaaaccagaaaagcaggttaatgagtataacagtccagatgaaatagaaacgaccagtgaaaaaagaaagagtacgtcagggtggttcaaatatatgctagagtgcgttggccgttggtctatgtccttaatcacaataagatttgcatcccagagatcgttgtagtgatcttgttggaagatacttctatttctttcaagccaaatattccaccatgaagaaaatagctctccgatggcatatattttcatccggaagggctctttcctgcgcatgcattttattcaggcaccctcttctggtcatctcctaaacagagcattgcaggcttgcaaacctgcagcattgcacagaagtgaggtaggcagtggactctacaaggtgtcctagtgattgtccagtaattttgattttgctttccagatcttcctcatagcctacacaaaatctagatctagtagcctcctcaattcccgacacctccgaatccatatgaacaagaaccaaccatgatgagtaacctatagattgatttatacataaaccttgttgtcaccttgcgtgtgctagagatggaccgtgtggtttcatatttgaagggtttggaaagttgcgacgcaggctatattaatagaactcccgaaggagtgcatctcaccaattacaacactcccatcatatcatacaatgaggattacattcgcatctctctcttactgattgtccagattaacttgccaagacagtgaaatgatgtcctatgatctaattatatatttctttcaatgatacagagcagagctaacgttgccagttgtcacaattgtggggcattaataggggtgggaaaaaagctggggcttggctcgagcttggctggcttggctcggcttgtaagtcaatagagccaaacccaagctataggtatttcaacaggaaggcttgcaagccaggaaacgagctgagccgatcttaagttttagcttctttctctaactgagccgggctaagctaagtctaatttgttgcgggccactgcaagctgagccgagcaggctttggcctagctcgtttccacccccaggcatgaacatccaaatgacactctttcaagataatagatcactaataaatttgtacgatttgaatatggttggacaagatccaaatagagtatcggaaaaatatgaacttgataagtattcttgtatttttttcacgaacgcgcaaaaagattgcatgtcaatatattaaaagaaaaagagtttttgttacacgacacaatcagccagactggcttatgccaagggaagtgagaaaaaaaaacaaaagctgaagctaggaaaaaacttctacggcggctaaacgcaactccaaacagcaggaaggggcagagccacggtacactcccaataaactccaaaagcagcaacggtagctaaagaccacaaatggctctctgagaggatggactctataactactaagaccgaagagagcacagagtcgaaaacccatactagtggtagatttttcttctgtaagcagcattacatgtgcaactgatggcctcggcgtatgctgatctacccaggaacgtggcaatcttcctagcgccacccattctcagttgatcaaagtttctttccatctatggacagaatctaagaggatgatataacaccgacaggttaactcattgatgcctagtaattagcatagatacataagaggtgttgacacatgacagggctctctggaggagatgaaggccaaccaaagacatggcctgcttgagcgtagtaataattagcatagatatatatactgttctgtttgagcgttaggcatggcaaattaatgctctaggacgaggtcagaaccaaatactacaagagtaaatgatggagatcgaccatgtgattttcacaaacatatatacgacacacatgaaaagcaatgcatggtaatatacagtggcatacctacattcactacaacataaatggtaataggtgctggttgggaacctcacatgggtattggatttcctaaccggtacctcgtaggtggtacttatgaggaggaattaaaggtaccaatttaggaaccgataacctttgatgttctaagaattcaaaaaaggccagctcgattcatcggttcatcaagccgctactcatcacacccagaccgtcatcgacccaataacattcccatagccggatctgtaggagttgccactgtcgaggtgtggaggggaggcggatggagaggagaaggaggaggcggatggagaggtagaggaggcaaggttcatgtcgacctacagagacagagagagatggataagggtaaggtggatcgagtggatggggagagggttggataagatcgacgctggctcggcttggttctttttgaaaactgacacatatagtataggtgtcggtttttcctctagaaccgacacttgtagttgttgaaaggtgggaaaaggttcattaagtgccagttttaaataaattgacacctatgagctgaagcccattaggagtttgtagcagtggttcatcttcctggggttaaagcacccaccggttttaaattcactcgctgtcaccgtcgtcgtggcctaccatgcttcccgtcgttgtcatccttcaacggagaagccaccggatcacggcgccgccatgcttcccaccaacccaaggagaaaaccacacaccaactgtaacacaacacacagagagagagagagaggggggaggcatgggaaatggaggggaggcggatggagaggtggacgaggcaaggagcatgtcgaatgacggagacagagggagatatggataaggataaggtagatagatagatagatagatatatagatagtttttatatttgttgtcagtataaaaaaaatcttttcagtacatatttctcgaaatgatatatacgtaatgatcatttactactttgtatcaaaatacaacctagggacattgacaaaaaatatatcacaatttgaacctttatatatgttatgaactaagtaatatttcagaaaattggatgtagtacaagataaaattggtgaatttcaaacatccaaataacttcctataaaatacataaacaccaataaacaaatattccatgctaaagaacaccaaaacttaattagtactattattttcaaaatcatctgtacaagtagtctacagtttggatatgatcaacgaaactcgtaatgaccttctatatagcttgtgttgaactatccccaagcccatactagtgagtagaaaacagtggcactattgagcccttacggacgttcatcgagacaatgggagggatattgcatagttgtggtaggccagaccaaacaaactctgctgtcttgttagatgtagacaagcctatgatgccagcgttactagctgaattcccaacaactcctatgcctagctagaaccacaaaagaaacgaaatcaacaaaacttttgccatctaacaggttagtgtggctacatcctaacaggttatacagtttctcatccggctttgtcactaactaaaacctgagccactttgggctgcaatgatatatatgcacttgctctttatcccatttaaataaatagcaaatttggctattgcctatcagatgactgctgcgtcaaattaacttggatgtcatttgctgaaacacaatacaaaattaacaatttcactaacgggctactgcaaaatctatcacaacgttttttttatatattatcttcctcttcttttctctctcttggatcattcattatgcggcctctctttatttctccccgaaattgttcatgtcgtcatgagctaaccccacatgccatactacaactaaaaccaatttgagaagcagtaatacaggcttaattcgaaaattatcgaccaaacttatttacaattaacaaatgacgttttttccctcaacatattgtgttcccttgtctcattgagtgtttatgctccatacacgggtgatgagggaagtcgtcatatagtggtaggaggatcatcatgctgacatgccaaatgaatccaagaagtgatcaataacaatgttcctgataggactagggatgacaatggggcccataaccctgatacccggtggaaaaaaaaatccttttaaggtctataagtactaaatcagtctccacggggctcttgatgggcaaaaaaagtcccctcatcgtgtgggggcaggattagggatgttcacatggtctttgtccccgtatcctcatgaggccctgagtacaccatcatatgtctgcatccccattatctcacagccgaaacagaaaataaagcccaacgaaggcacatttagtgtgctcatatgtacacaaaacaaaccccaagtcccattcccacatcctagtcccagatctagatagaatctacaaccgctgcaaactcccagtcacggctatagctcggcacctcggcctccatcctgcgtcgcacgctcccgtcgtccacgacgtgctgccgcatcagcagggccgtcccgtcaaattcgggggccccgtgcaaagttgaaggataaaaacttaattgatgatataatatgaaaataatttatactccataatatatttcatagcaatctagaatggcctaaaatgataatccaaaatagggattaccggattagaaattaccagaaaaaattaggttagggacgcgacaggtgtcaggcggcacgaccgcacgagagaaagaggtgaggcatcgtttactcctctcgttcgttgcgattggcgattggtgaggtccacagtaggaggcgattcaagattgcgaaccggcgcaactatgcgaactggcaaagacgtaatcgaagccaaaacacaagaaaaataacaaattttcgggactagttaggctaccaatttacttattgagttgtatatctagtgttgaagttttgggcctacggtgcccctgaaaattagaggcctatgcggacgcgctggttgcacgcccatagggacggccctgcgcatcagcatgaactcggggcttcggcctccttccccgagaatgctaatcagcgcagacacgctaattagatatctcgcgtgcgtttccggcctagtcattcgcgtgtgattccgaccggcccaccagcgaaaaagaactcctacttttccacgcaaaaaaaaaaccgttgggaggcacatgccgacgtcggtattggagcaaaaatcgtacttcctataataaccgtattaattaaccttttctttttttattgggaatttgaaaattacgtgaaattttaaacttttaacgcagatctgaaaactttcaactcgaaatttaaattttttgaagtcaaaatttgaaaacttttaacttttcatctaaaatttgaaaacttttcaactcaaattgaaaaatttcgatccagatttgaaaactttcaacttcaatttgaaaactttcaactcaaaatttgaattttttgaaatcaaattttgaaaactttcaacttttcatctcaaatttgaaaaactttcaattcaaatttaaaactttcaacccatatttgaaaactttcaattcaaaatttgaaaactttcaatccagatttgaacactttcaacctagatttgaaaactttcaattcaaaatttgagaacttttaagtcaaatttcaaaactttcaagtcaaaattaaaaactttcaattcaatatttataaagaggtatgcgaaagattaaaaaaatagaagaaaaaaacacatcgtaaaaaattaaaaaaaagaaaaaaaaagcgcacggggcccagctaacgcgcgcgccagttaaattgctggcacttacgcgagcgctaggagcccccctccttcccacggtgcctgagctgtgtccagcggggacaggttcacgccgctctcgccgtcttcagtagagacaactccatgctactgttgctgtctccaacagggataacacgcctccattgcccttcatcctaacatctcttagtttttcttgctctgccacaactactgaacgtccagtgttatttgattcccaacacctccaagccctatactatctaattttctaacatattggcaccaattttctcccatgatttctagcgaagcccttgctagctaggtccagctatatgtgttctcaaaaataaataaaagaaagtagctatcctatcttcgctacactagaaaagggactctctttaagaccatactagtcttatatttgtgcgttgcaacgaaattacgaggaaagcatagatatgattttatgacatactatctggtttttctggtacgttgattttcatgtgcaaactctatttttttttggatgcggtgtcttttaagtgcagttttctgtatgggaactacgatagtggggaaccagaggattaggacgacttcgcttttaaagtagtagagacatgtaaggctatgggtatgttataactcataaaaaaacagaattaatatgtattcatttaactttttttagacaatagaaatggtttgcgtaacctcttatgttaattaggcacctaaccaattttgcaattagtacaacatttctaggagatacaaactaaggaagactatagttatatataagccccaggtgtcaacatatctgaaattctagcttactacacaaaataatctgaagtctgaattttttcacagaaaacctattttatttacgaacatccaaacatccacaacaagaagtaaataatgataactatccacacatcatgcatagatatgctaccataaaaaacttctacaaaataaaccaaataactaatctactaccacacatgatatgtaccattttattgctacgaaaataagtttagttcaaatttgtcataaatgtgaaggtcaaagggtgctacttgtccacgcatgcatgccgtagatacattgtaactaaaaaaaaccaaataaaaaacataagtgtgagtttaaaatactccgcaaatacaatatgaaactagaaaaatatatatacatagtaatttgcagtaaagaacaaatataaactttttcattttctttgtgttcaaaagaaaagacatttatcttttttgaaagttaatgaaacagagccatcttttcaaattgttgagctatgcttcaacaagtaggataactgcatagttattgtgagccacacacccaaaaaaaaaacctagctagaatcacttctgaattttatttggagcaagtcttattagttctaaaaaagtatatcatcctagcccgaagtagctgaattacaaagagctgctactcctagcaccgcaaacgaaacaaaaacaacaaaagttttgccacctgttatatggagtgtggccacatcataacaagcaatatgagcctccttgctggcccttgtatattgtgtctcattcagcccaacgcaaaacctgcctagctttaggctgtcactcctagctttaaatcaatggaaaaaatggcaattgcatataaattctcctcctctcctcttttaatttctccttttgaatctttcattatacgacctgccatttatttctccccaaaattattcatctcaccatgagcctaacattgtctgcttactgccaattttctaagataataattttattacaaatattgaattttataatggagtaacccttttagaaaattggcagacagcatttactaccaaatactccctccgtccctaaatatttgacgccgttaatttttttaaacatgtttaaccgttcattttattcaaaaaatttaagtaattattaattatgttcctatcatttgattcattgttaaatatacttttacgtatacatatagttttatatatttcacaaaattttttgaataagacggacggtcaaacatatttaaaaaattcaacggcgtcaaaaatttagggacaaagggagtatcaatcaggctcctttgtctcgcagagttatagcaccacattgggcttgaattttcaggagccccggaagtaatatgcactctagcatccttgattttttgctacatacatgggtgaggacaacctcaacaggttccaaaatcaatttcagtaagtcgtgcatgattcctctcaatgtacagccagagagaaagttgagcatctgtctaaaatgtttggatgcatggtaggagacttgccttttacatatctaggcataccaatgggtatctctacacccaaggtaatagatttcagtcctctggtggatagagttgaaagaaggttgtctgctacttctgctctcctttcttatggggatagactgactctggtcaattcagtgctttcttttttgcccacatattatatatgtactctttcattgccaaaatatatcattctatctattgatagggtaagaagacattgtttgtggagaggatctgatatcaattctagcaagaaatctttggttctttgggatagagtctgtcagcctaaatctaaaggggggttaggagttattgatctcaggctacagaacaatgccttactaattaaaaacctgcataaattttataatagacatcctatcccttgggtcaccttgaggtcctcttactatgttgataaggtcccacatgctttataccttaaaggttctttttggtggagagatgttcttcaatttgttgatatctttaggggtctctctcaatgcacagttggtgatggcaaaacctgcttgttttgggttgatctctggaacaactagataagacagaccagttatcctagagctttctcttttgcaaagaatcaaaaggattcagttcatatgacctccctaaaggacttaccttgtcagaacaggcatatcaggaatatctttctttaatctttgatgacccttttcaacagctatctaatgaacctgatatttggtcttatatttggggtaatgataagtattcatcaagaaaggtttatgctacaaattttctgcatgtgcagcctcctgcttacctaaaatggatcaggaagagtaagtgtactatgaaagttaaggtttttggttggctccttatgattgacaggttaaacacacaggatatgcttgatagaaaattatgtgcgcttgctggaagtgatttaaattgtgtcctgtgcacctctggccaaatagaaactctttttcaccacttcttcagttgttcttttagtactgagtgttaggcacagtttggaatagtttgggatatttatttgtcttttgaaaatatgctaaatcaaacaaggacctcctatcgatcttcgcatttcctggagaaggttttatatgcatcctggaatatttggaaacagcgaaatgattacatctttgataatattataccttttgttccttcttggatgacattcttttaggaatgatctatcccttcttgctcatcgtttaagtttagatgagagatcaagttttataaactggttgaaccagctgtaattacttttctttaataaagttttaaacaactgtgggggcttcccctaccgtgcttccccctcccccgccccccccccccccccaaaaaaaaggtcctcttgtgcaatatactatatctgttttttaatatatgatgtcattaactttttgagatatgtttgaccatttgttatcatttattttattacgacttgttttattactaaatgttctttaagaatgaattaaatatttttatatttacaaaattttttgaataagacgaatgctcaaacgttgataaaaagaaaagtaaacgacgatatatattgaaatatggaggtagtacgagtggatcaatagataggagccaccgccaatatatgaaacagtgcaatttcctagttttctagctctagcacaactaccgaacgatcaatttctttcatgatggcaatttgactcccgacacatccaatccctatcatccaatcaaacactctccaatgatatccaggcattgccctcgccgcttggtaccacagcagctatatttatagatggccttactaaaaggagaagtaacaccatctatcgtgttcactgcccttaaaaaaaaggcttttgactatgtctttgcaaaacttcaaaaggcacctagtacaccactatttactatttttagacaatggaaatggtgtgcatctctagcctcttgtgttaggcacccaaccaatgtctccaattaacacaatgtggtgggcgacacaaaccaagaactatatatgttcacatcgatgtgtgaatccaaactatgaggactcagtttgtgttcttttctttaaattcagaaaagaggactgtttaatgtgcatgaacaaaattatatagtatgccataaaaagtaatcgtctttcgtgggtagtactaaactatatatgtcccactgaggcatgggatcgccatatattacacaccgcaataaccacgaactaagcttaaacgtagtgtttggcaagaccaactcctttacaaaggccaaggccaatctaaagtagtgaaattactaaagtttctccaatcctgattgtgccaggtcatcaattaaacacagaccgttggatacatataaggaaatcaatagctgccatcagatgcaaagtaaagttgagttgaaaaataaaatctggtcaatggtagaatcctccagattgtggcaaacggcctatgggccatggagccgaagcgtcgtgtacgtatataaagataaagagaaccacggagcaggtaagaggatacaaaaaagaaaaaaaatagcgcagaacccatctcctcccgaaacccatcgccgccgcctccccattgccgttgcctcctctgcctcctcctccaccgcgcccactcgcccccttcatatccacgtcgcttgcgcaaccccaccggctcagatcctccctctaccatccggcgaagttcctcatctgcctttccatccaccccgactcccatgatgtcgccttctcctttccgcccccggcgtcgtttcccctccccctctctgcaaccggcatttcttcctcgcacagtccaccggctcctcccctcacccattgccgccacttcctcgcctccacgcaccctccactcactttctcatccccatccccatccccatcccatgatcccaatcccaatcgcagctccaaaacagcatcggatcacaactaaatattttggtaagtcacaaactcagataatcccatcacctcctatctttgctttctcacactgtagccgggaactacatataaggtcaaaaaaatatcagtaataggatggattgacaaagagcaatgctataaaaatatattaaaaaacacatgtacaattatgtttctgttaaaaaaaaaggattgttgttgtgttttgttcagcaagggaatattaatcttaaaggcggatagccaactcaaatgattcttttttcttggacgatggttttttttagcatcatcagcaatgatataaaggtttggtttgacattaatgtgccttcgatgacagtaaaagacacttggtttcttgccctgcgtcagtctgttgtgcaaatatgcgaatcaaggacatcgatgtattagaagtttaggacacaattaaatgctaagcagatagaatatctattattacctgttcactttaatatttttgccttctgagttttgaagctaaaaaccaagcaaacagctcatggtcactatgttattggttctctggtgtgttcatgaggcctgatggcaccttaaccttaacctgttaattaacaacaaacatcgatggcacctttttagttgtacaccaatcacctgaatagtgtaatttctgactttgcatttagcctatgtaattagtaaatgtcaatcatatctactttctcaggcctacagggaagagttgagaaatcctccttagctttgggctgaagggtttttggttggcaacaatgcacaaacagacaaactacactaattgtgatgactctggattttttattacacttcataacaaaattgtgcatttttattttgggatgtttattatgttattttcttgagatactcagaggtcaaatgatctttgagcaatttgtgttggtttcaaatcatggactagattgccgtttattttgctaatgtgtattgcgttaggtttgactattttatgccttatgcatcatatttttgagtaaacattctcatcttttgatggtatacgggaagaggttgatcctggacatattatttgaaccttcagttcaaatatagcttgagttgaatctatagttctaactaatagtttatcaagttgtatgattctgtaaaagaaaaaaaaatcaaaattaagtatgattgtacattacgggcacccaaagtcgtgcaacgcacgactaagtggctagtttaattgagtacacaatccactttcaacacaattagccaattaaatcactttttcaatatcgcaactacttttttgcttaggtttagtcttgttttgtctatctttgttgatttgtgtctaaatcgtctgccttcactgtgagaatgcgaaatctctatgaaggtttatcccgtaaaccttccgcttactcatgagacttgtgtttatccttgtttcatctaaattgactccgttagctgatttaatcttacgaaacccatcttgatttagctgtctagatcaaggtggtagtgaatacatatcatcgcaagacgtttaggtgtgatttaattatgacataggcgcaaacaaaattttgtgcataccactataatatttttttgtccaaaataagtttgtagtacaagcaatcatgaaagcttaatcatgcatgttttcattttctctacggcaaacaccaccatgtcaaacatgccaagctggcagcgagacagttaaaaattatcaaaactaaagagcaggtagctctcaggcatatactttcagcagaaaaaatttgaatatatatatatatatatatatttaataagttgcgtttatatacatgagtggggagaattagtgaaaatatatctctctggcgcattgggcacgcgggagcgcgagaaaagcgcagcgtgggggcgcggaagtggctgcggattaggtggggcggaacaggggagtgggaccggcttggtcctgcaaaccgggagagtggcaccgggtcggtcccacgccataagtgcggcagtggggtacagcatgggaccgaacatgcaccaacacaatcccgcagaaccgaggcgcgggaccagcatggtcccgccggctaaacgcgcggtaccgagcaggtcttgtgaagcaggcgctgcgtgttcctccgttcccgtgattcagagccacgggaccgacacggtcccgcgctccaccacgttcctgctcgcccactcctcaccaccgaacgggtgccgcccgttcagcacgcggtaccgacactgtgccgcgcacccacccagcgtgaccgacatggcctccaatcccgcacacccacgccgcgcttaaggtgcaatcccacattaccatcgtgcgggagaggtatatttgtgtgaaactttttcatgcaagtatataaacgcaaattattaaaaaaagtatttttccaatttttttctactttcagaaagcagcaagcagtctcatagatcatatgaccaaactggcccatagcgtggcaaccgaaatcataaccatcagcagaagggaggttgccagtgggctctacacgtcggcgtacagtaaattaaatgtggatcaaggaatcactacaagtctgcaatcgccgacatctcccaatccatatgatcaaactaactgatcaacaaaacacaaacagactatataatttcccgttctcagtagcactggcgcctaccatccatacttgaagtgttttgttggttgaaatgtagataatactcatatccagctacactcaaccaactacagaaggagtgcgtgcctccatatatatgcacaaatggcagggtagcccttttgttttggacaagcattgtttagtatgaaaaaaaaaacctacatatggtctggagaactcatacatcattaattacagaggcagaaagtacatttttatgtattggaaagataaaatataattctaacctgactattcgtatcaaccttaatttggtaatttgtagaacttcatatggtttgtaccgccccacaattctgatctctagttagatataccaggcaatgtgaattaaaaaaagatatactctctctatcccataatataaggcgtgcacatatttcaagatttaactttgaaaacatttgaccaacaattattacaatataaattaaattttatttgttaaaattagtatcatttgattgatatttaaatttactttaagatggttataattttgttgcaataaaccttataatatatgagaaattgtaagttaaagattagttttaaagactgtgccaaatttaaccatgccttatattatgagatgtagggagtaacaggcaatggccttaattaaattagcatgcttgaactctatacaagatgagatttcacatgcagaaaaactcctcgaatcaatgagaatggcatgccattttttcaaaaacaaaacaaatggcgggttctatactatggctagttgagttggagcatcccagcagatactccatccagtcctctatccataaaatagaggttgggagaagaaaaatgagcttcagcagatactccatcccagcatccaaatttagctatcctccatccagggagagagaaacgtcaccatcatccacatcctgtaaccgccagcatccccctcccccatctagagtccggattgacctcccctccgccacgacctcccccgatttcgtcgtcgtcgctggtcggatgtgcatttttcactatggactgagggtggagagggagagacatagcagatctggaagctgcaaccgacgccggccgtcgcgcctctgtgcccgtcggccgcggcgcctccgcacccgtcatgccgccacgccgcagcccccgtcggccgccgcgcctgttgtgccgctaggcccgtcgcgccaccgcggccgccagcctccgcctccacgctgggcggagagaagaagaagaagaggaatagaagaggagagaagaagaggaatggggaagaggagagaaaaggagtagagagaagaggagaaaaaaaatatccggaccattaaaaatatatccaattaaataaacttatttagatttcggaataaataacactgttaaaatttagttgtttaaaatatagttcttaaaaaataatacatacaatgtatggttagttgaaaaatattagtaaaatataggagggtgtgatatggaagatgcaatatagattatctgttggactgagaaggaatatggataaggaatctttttagatggccatccatataagcatatggaggatcaaatttaaatgagctgctgggatgctcttaggcttcatatatggaagatactaaaacatcacgtgacaacgataattccaatggacatatcctaccgattatccaaattaacttaccaagacagtgaagtgatgatctatgatctaattatttttaaatgtatatgtatctaggggcactagagatattttttttctgtaaggtgcaggagatctgagtattactccctctgtttctaaatatttgacgccgttaattttttttaaaatatgtttgaccgttcatcttattaaaaaatttaaatttaagtaattattaattatttttttatcatttgattcattgttaaatatacttttatgtatacgtatagttttacatattttataaaagttttttaataagataaacggttaaacataatatttagaaacgaagggagtattatattaagaagaagaaagatgggatagaaccacaggtacaaaaccaaacacgcacattgaattctaggaaccatgcgtatccgcaaacgcaatcccaaacacactaaagaaaaaaaaatgaccacggcacaaaccacccagctcttgtgcaataaaaaagaaatagtccacgagcctcggctaaacaccacaactcagcatgcaaaagagcacgtgccaagttaggagcaggtccataaaaaacataacagttttgaggtatttcatctcttatgcacacaatatataagccattgagacccaactcaatggaagttcaattcataatcccccaatctcttatctcaaaattacaattatatatttctttgcatgatatagagaagagctaagagtgttgccactatcgggacattgatgcaactcatttgcactatggccgtgtttagattcaaaagtttttcttcaaattttcaacttttccatcacatcaaatatttagacacatacatggagcattaaatatggacgaaaaaaaacaattacacattttgcatgtaaatagcgagacgaatcttttgagtctaattacgtcatgatttgacaatgtggtgctacagtaaacatttgctaatgatgtattaattaggtttaatagattcgtttcgcagtttacagacggaatctataatttcttttattattagtctacatttaatacttcaaatacgtgtccgtatacttaaaagaattttgacacacgaactaaacactgcctatacctcctttctcttgatggtccaagttcttgtgccgagtgggcaactgtggaagtgccggcatccttctctcacatctgctttttctctcccacgtcagattgaaacaatgtgtagtggctaatctcgcttgcttgtaagccttgctcttagtgcaaacgctatgcgagaagacacttcaattctcaacacctcccaagtcatatggcctaacttgatagatacaaaatttgctcattgttcttatggtcccatgctattagaagctgttttttattatctcataagtcacatggtctaacggagagagttttttcttatccctttagataattaaaattgagaagatagttaggccaatttgcacatgtatcttaggactcaccagaactgccttccctcactcctttatgttttttaatgggatggaaggagagctgggtgttggtgatatgccctagagacaattatagagcaaggcaccgctatatataaaactatatgtatacatataagtatatttaataatgaatcaaatgatagaaaaagaattaataattacttaaattttttaaataagacgaacggtcaaacatatttaaaaaagtcaacggcgttaaatatttagaaacgaagggataattttcttttgatctaccgggctccttgtttcagtagttgtctcttgtctctgctctttctgctcctccatacatccctgtggacaggagatcagagatccatatctgtggcatgatcgatcgatatgctgcccaactaaatcgatagaggaagcgatgaagccatccacacataagtgtctacagactacagaaggactctgggggccaaggaaagcgagtcgccattacgcattagtccagtgctctagtcaccactctcgatcgatgctcacaatacttcatcttctagcactgaaacaaattctgagcacttacttagcctcatggaggcaattcgactcccaacacctccaatccctatcatctgcaactctcaagtagaaatttggcacatatttgctccactgatgacgaggcaatgcccttgctataggtaccagcagctatatatagatgctctgcaagacttcaaaaaaaaagagaaaaaacagcagctatatcctcactgcagtagaataggcttttgagtatgtcataactaaacttcaaaaggtagagtatttctacatttaatttttttatacaaaggaaatggtttgtatctccatattcttctattaggcacgcaaccattgtctccatttttaaaaaatatattgataggacatacaaattaagagtgtgtttagttcacgctaaaattaaaagtttggttgaaattagaacgatgtgatgaaaaagttgaaagtttatgtgtgtaggaaaattttgatgtgatgaaaaagttgaaagtttgaagaaatagtttggaactaaacttggcctaaagatgactatattcctgtgaagttatgagtccaagctatatgaaatatcagcggagggattcttttcgatccacatgtagtacatgagaaatgtgtagtttggtagttatgagtccaaggttgtgttctttagcctaaacttctcaacttatgtccctcgttttccatgtatatgttttccaaactgtgcctaaacagtgtatttttttcaaaaatttagaaactcatattaatccacttttcaagttttatactacctccgtttcacaatgtaagactttctagcattgcccatattcatttagatgttaatgaatttagacatatgtatatgtttagattcattaacatctatatgtatgtgggcaatgctagaaagtcttatattgtgaaacggaggaagtaactaatatttaattaatcatgcattaattcatcgttctgttttgcgtgtggaggggagtagggctgtcaatgagccgagctcgtctgtctaggctcgagctcgatacaagctcgagccgagagattttataggctcggcccgagctcgatcaagctcgagctcaactaccgagcttgatttctaagcaaaacaatatatatttctaagataatctttaaaaaaaataattaatttatagttcatcatattaatagaagaggaaaaaagaataaaataaatatatgatgtcacaaaataaatatatgatgtcaatataagacacacaaatatcatatttgatctcctaatttattaaataacaacaaaaattatatattactaggctcgttagaagctcgagctcggctcgacaaagctcgcgagcttagggagaggctcgggctcggctcgtctggagctcgagccgagctcgaatcgagcctaggacgagccgagctcaagcagctcgcgagcctcaagctttttttgacagccctagagggaaggtttcctgcaaaagaacatggctaaaaagaggtgggtaaaacttataatgttcttaaatctccttcataacattgaaagaaatcttatcaaacattgcacttttgcaaatgaagaagattttgtgccgctgaacatggctgaaatctacccttgactaacaatagagaatgaaaagtgcgaacctaaaataacacaaaagtggtctctcatatcccttcatatattagaagtctttgcaagtgacacaataacaccaaccagactttggctaaacagatatgcatgatattgcaatgtaaaatagtggaccaatattcattttgcactcacattcaactagtgccatgtaagaactttttaggagctaacagcccctagaagttaatcgattttgctataaatctggcgacaaagatttttgaaccgttcgataaacctcgggattcatgcttatgtttctttcgacgtccgcaggccacaggcacgattcattcatgcgtagtagatgacagacgaagggcaggcataaagtggcacagggcatagccgaacatgtcctcgtttgatgtttcatggcatgcatgaatgatggccaagcactgtatgctggtagatgacggcaagcattagttcgatggcatgccgcatgcacaagttcagccaaacaaacgttgcgagttcatgattcctcttttgcgtgagcggtgtccaagcggaagttttctaaagttatatcttacttacatgcaagttacattgtagttacattgtaattatatgtaagttacagcgtaattatattgtagttacagtgtagagttacactacaattatatttgacaaatttttagaagaaaatttatcgacaaatgtatagatttgggcttatgcccctaccaatctcaagtgggcccaacttgtccggatggacgggcccatccatccaagttgaccgcgaccatgggcctcctctcgacggcggcggtgcttttctcccttgccgtcgctgtcgcgccgcccctcgtgcggctccaccagtggtacgccgctgagttccgcggcctcaactgggctggagctcctcctccactggccgctctccgtcgccaccctctacgtgggctggcgccacctccctcgtcgccggggtctccgtcgtcaccacaatggtgagtagtcgtgatcccccgcgcggatgcttggatgtcctcagattcaacattcaagtacatgttcattagggtcttcagcttagtaggtatgcgtatttgttgtaatttggtattgcaagaagctgagatcaaatactcaaattcatgattttctcctttgctcctttgtcaattatctgagaatttagggcaaaatgaggaatttgaagaggaagaagggtacgtgtcatgcccggaatttctatccaaaactccaaacgcttacatgtgtgtaaaaccctcgtccaggaatcagccgagagacacaataacaaattgataatagagtgcaattattaatctaattaataggcgaatataaagtcattacagaggtagatagttcctctcaaacattaaatatctaagcagcggaaaataagagaaacaacgcaggcgactccaacccacaagcagcttgaccaaggctacgcctaatcctccacaccttcagcatcactgtagaactcctcctctgatgaatgattgcaaggtgagtatatgacatactcaacaagccatgcagcaaatatgcaaatgcaagggataacaaaggatggcataatatagtctcatttgcataaatggcatttaataaatacttcagaaattaataaaacagtaaagtatttaattaaacaatattaatccaacgctatacaatatacccgttgcataggcccaaccattctgaacaaccaatcccggctgcacagttctatctccaaaccaggaatataccattccaaaccaggagctaaacaaattattatcatcataatttattatggtgagagatatgagactaatcacgaaagacattgttagacccgccaataaccacgggcacggctattcgaatagttttactctggccagaggtgtaccactgtacccacaagacacaacctcaacatcatgtcaaccatgcgtcgcgatacttaacaagtacccgaatagagattgtgacaatactctctgcataacacaattcaaagtagtgcacctttctgttgacagaaaacacgaggcctgggagatctgcttaactccagtgcaggtccaaaactcgccttcggatgtatgagcgtgctagttgatttgatcctgtaatcaacaagaaacaaagacaaagaaaccgtggttaaatctataaatgatagccgatcggctaggtgccgatgacatatcatttattttagaccgatgtcatatgtgcattgattggcaagtattagtaagcaaatcagaactaaatctactcgatcggctgtagatattaatgacatataatccttacatcgatatatacttaaatcaagtgattgggatagatcgatcaccttgccgagacagtataaatcacttagatcgaaatatatattaatagtgagattatatatattcatagcatagccgatcagatagatctagcatgtatcggctagtactccgataccactctatattaagatattaaagcaaacagaatataccaaacagaagcttaatatacttaaatgcaacaagatcttaatataaaggacagatttaacctatcaatcaagcatataggataaaaaatagttaaatcaggtaagatcggctgaaactccgatactaatctaatcggcaaccagaaggcaggctagatattatggttctaagcacgacttaatagatcaaactcaactgatgcagcattaagtatgaaaagaagaacaatatctagacaatcaagccgctggatgtttcatagagtggtagatatatcacataatctaagtcaacgacgttatttaacctaatcggctgccttctattgacagatgctagccgattataagttagataacgatattatcaaagattatgttagatatatgataactcgacgaattacgtaaacaagattagagtatcataaagatggaagcactaatcttgagaacacaagccgtcataacaagttttacctcttgttgaagatcaaaaccgatgcagctcaacccgaaagcaggaactcgtcgaaacaaaacgaaagtaaaagggtggcgatgcgccgaaattgtattgaacatgtgttaataattacatagggctcggggtctatttatacccgagaattacaagatatgtccatatcagacacgactcttatctctaacaaactctaagataccataagtctttgcggcagacttttgcccacatttatctctaaggaatttacataaaatatcctaatttaatagatacaattgtcttcccaggactctatccatgcgtggcaatcatcttgaagcacaccaactcgaacccgacgtcgtacacaggtcgtattgtcgaaatcggccatatcacttaacccagtctgactcggacttagccgatcccattcgtagccgatccggactccagccgattcttactctgtttccgcgacaacccttatccccgattccgcttcgatctaatcttcatctccgattccgatattaccaaatttggtcgttaacactttcctggatcataatcaccccctcataaacaatgcatggactccccagcgacccccgtgggcttagctctgccacttctcagtctggtgctccacaatgaaccatactacacaaaaggtaaagccgttgcccacgctggcttgtggttggcacggttaatgtttcacaaccgaaaatcgtgaaccggtccttaattgatatgagcacgaccatcaaaaccatgcgctcacaactcaccattatcaagttttagttggcatcttaattaatcattagttatcccattcatatgagctaatgtctctaagcatggctaagcatcctaatcactttagctaaaaccatatattgttctagctaatccaattattaaccaagtgacaaagtataggtaatcaataacaaaggctatgacaaaggcaataggtattcccacccagtgacattcaaaaataaatgcaatagttgaatagaaacaatagttttaaacgggatcaacatgttcaaagggttgtttgggatctatgtgacttgccttgctggccttggaactcttcaaagtcttctcctgcaaaatcggactctccgggaacatcggaatctaagcataaaagagcaaaatcaccaaaacagtacataaacaatcataaacagcacatgtgaatatttttatcatgtagatctcaattttagaaaaatttagagacttgaaccaactaaatccgagctaagatgaattagttatgattttttaaatattaaaccggattaaatcagttatttggattttaattggattatgacgcaataaagaattattttttaaaaggaaaaaggatttattgcgtcagcggctcgggttcacggtggaccgggtacacggaagcggtctacgaaacgaacggccgatatctaatctaatcaaaacggacggccgagatctaaccgatctatcgcgggtctacggctgtgttaacaaccaaatttggtaacatcggcgttgggaaagaggattaaatcgaagcaaagtcggaagcggagattgagtttgaaaacagagcaggaatcgattggagtccagatcggctatgatgagatcggctgagtctgagtcgggctaggtaagccagtgtagccgattccgacaatatgacttgtatacgacattgggttcaggatgatgtgcttcaagatgattgccacgcacggatagagtcctgggaagacaattgtatctattaattaggacattttatgtaaattccttatagataagtgtgggcaaaagtctgccgtaaagacttgtgatatcttagagtttgttagagataacagtcgtgtccggtatgggcatatcttgtaattctcgggtataaatagaccccgagacctatgtaatttagaacacacacgttcaatacaatttcggcgcatcgccatcttttgctttagttttattttgacgagttcttactttcgggttgagctgcatcggtttcgatcttcaacaagaggtaaaacttgttgtgatgacttgcgttctcgggattagtgcttccatctttacgatactctaatcttgtttatgtgatttgtcgagttatcatatatcttacataatctctggcaatatcgtcatctaacctataatcggccaacatctattaaggaaggcagccgattaggttagacgccaatgttgatttagattatataaggtgtctaacaccttatgaaacatccagcggtttgattgtctagatattgttctttttttcatacttaatgctgcatcagttgagtttgatctattaagtcgtgcttaaaagtataatctctagcctgctttttggttgctgattagggtagtatcggagtttcagccgatcttatctgatttaactatatttgttttatatgcttaattgacatgttaagtctgccctttatatcaagatcttgttgcatctaaatacgttaagcttctacttgagtattatacttgctttaatatcttaatataaagtggtatcggagtattagctgatacatgctagatctatttgatcggctacgctatacatatatataatcttgttgttaatgtatatttcgatctaagtaatttatactgtctcggcgtggtgaccgatctatcccaatcacttgatttaagtatacatcgatataaagattatatattgttaatatctacagccgatcgagtagatttggtttcttgctacttattgatgatcgccgatcgattcacatatgacatcggctcagagataaatgatatgtcatcggcatctagccgatcggctatcatttatagatttaaccacggtttctttgtcttcgtttcttgtttattgcaggatcaaatcaactggcacgctcatacatccgaaggcgagctttggacctgcactggagttaagcagatctcccaggcctcgtgtttttgtcaacacgcttttggcatgcccagtgggacgcttaagaagtcagatgacagttcttcctcatggccgaaaaatagccaccaccgccatctagcccaggttccattaaaggcaaggtgttgaagcagggattgactgacattattgatgacaacgtcatgctgattgatccagagaaattcacgcctgagcagaaggcggagtttgaagcaactctgcagcaggcacgggatcagttcctgaattcattcatgcagacccgtaaggggacacttgttcaaaagtataaaataaaagtggttgctgataattctgggactagttcttctaaagatggagaggggaaacaagctccagatggctcgactcagccaagcatcaaaggtgctaccgacggctctttaggaaatcaaggtgacaaccctcaaggagtccatggagtacaaggtgatggagtgcatggagctcaaggtgatggtgctcaggggtcgcaaggaggaaatcttaatcagaatagtgaagtggcacaagactttttcaacaatttccaagatcgggtcgactatgctgttcacaatgctctgatcaatcagtccggggtgttggttaacactttgtcaaatatgatgaagtcgatagccgatggttcaatagctgagcatcaggctgcaggcccagtgtatttacaaggaggcgtcttcccaaattatcgtcctttgatcaccgacgctcagccatctattcaggcagttcctcccatcccatcaccagctcagccgacggcaccagcgtcggctcccacgcttgctgtgcaactttcagctccaggccaattgattaatccccaactgttggtgagagagcaaccacaccatgctggaccaaatgtgacccagctaacgcaggatcaggttgcatctatgtttttacctcctcggaacacggttgatccaactcagcagcagccgattcaacaaacgccacccaggcgacaagttgtgcaacctgttcaacaaacacccccaatccaacaggtcgcgcaaccgatccagcaaacaccaccaagtcggccggttgtacagccgattcagcagacgccgttgagacagcaggtcgttcagtcgactcggcagcagggcttaatggatgtatcagctggattcgcatcgcacgctggtcagtgtgctccaaatcaggttgtcccagagcacttgatccatcacgtgcagccagatgacacagtagtaccctaagtgatccctgagcatttggtgcgtggtatccaaccgaaccttcacaattaccagggaggcaatttgaattatcaatatcagcctacatcaccgcaagtccagtaccagcaggccgaatcggctcagccccagttggttcctcagtacaatcagttcgggcctacacctcaacaacctcaggggacacctcagcaacggccatgggccgatgtgatagccaatgtgatgagggagcaatttgggctcaaaccaaaggaaactggaaacttgtaccgacaaccttatcatgagtggtttgaaagagtttctctacctcatcggtttaaagtgccagatttttcaaagttttccggacaagatactacatcaacctatgagcacataagccgatttttagctcagtgtggtgaggcatcggctgtagatgctctgagggttagattgctccggttgtcattagctggatcggcttttacgtggttttcctctttgccgcatgggtcaattaacagttgggccgacttagaaaaacagtttcataattatttctatagtggggtccatgagatgaagttgtccaatctcacgtcgatcaagcaaaagcatgatgagccggtgcatgagtatattcaaaggttcagggagatgaggaataaatgttacagcttgagcttgaccgatgcccagttggccgacttggcttttcagggaatgattgctccgattagggagaagttctcattggaatattttgaaagcttgtcgcaccttatatagaaggtatctttgcatgaacaaaggtttgcggaagctaggaagaactctaggaagattaatcatgtttatccttatatgtatgcgtcggatgatgaggatgatgattctgaaatagctgcagccgagtgggttaggagcaaaaaggttataccatgtcagtgggtaaaaagttctgaaaaagaggagaagtatgattttgatattactaaagctgataagatctttgatctgctactccgagagaagcaaattcaacttcctgctggtcatacgatcccatcggctgaggaattgggcaagaagaggtattgcaaatggcacaatttctcattctactaatgattgtaaagtttttagacagcagattcaggtggctattgaagggggcaagattaagttcgatgactccaagaagccgatgaaggtcgatggcaatccttttcctattaatatggtgcatacagctagccagacagtcgacaggatccgtgcaaagggttttcaggtgaattcggctagggttatcaacaaatatcagaggaaatatgacaagcagaaggacaagcattatgaagaacacgatgatggctttgatcctcattggggttgtgagttttttagattctgctggaatgaagggatgaggttgccatctattgaaaattgccctgggtgcagtgatattgtcgagagttcaagccgatcatataacaggggtaatcggctgaggcaggcaagagtttctgttcatcaaagattgggtcctgtgaatcaagatcgtggccaagaggatgaggtaaccaggaagaatcaatggtgtccttctggtattttcacgaagaatcaaaaaaggagggttcaaagattgaggagaagggagcgcctccagaaggttgaacaagaaattaaccatcggctgaggaaagcaagaccatgacatgagtgccgtgttaagaatcaggttcatgcagccgatgacgttgcagctgatgaggcgaagaagttggcaaaagggaagagtgttgtaacagcaccaattaacatggttttactttgccagctgagttcggaatcgatcaagccgatgtcgaagaagtggaacaggaatcggctaagttggttctgtcaccagaacaggcagtgttcgagaaacctgaggggacagacaatcggcatcttaaaccgttgtatgtaaattgttacgtcaatgggaagctgatgtcaaagatgatggtcgatggtggagctgcggtaaatttgatgccttatgctacgttcaggaagttgggtagaaacaccgaggacctcatcaagacaaatatggtacttaaggactttggtggcaatccatcggaaaccaagggtgttctaaatgtggagctgacagtcggcagtaagactattcctactacgttttttgtcatcgatgggaagggttcttacagtttgttgctcggaagggattggattcacgccaattgttgtattccttcgactatgcaccaatgcttaattcagtggcaaggcgacaaaatagagatcgtgccagccgacaggtcagttaatgttgccagtgccgatttagctctttgggagatggatggccttgattgtttatctggaaaggtttgggatggagattttctaaaagtatccgattctgatatacagccactcaaagatggagaaccgaagctattactttgagggcgtcgtggagggttcaaacgtctacaccgaggacacggtagatgatctcgatgacaagcaaggtcaaggttttatgtcggccgatgatttggaagaaatagatataggtccaggcgatcggccaaggccgacatttattagcaagaatttatccccagagtttagaaccaagcttatagagctcttgaaagagtttagagattgcttcgctttggagtattacgagatgccagggctcagtcggtcaatcattgaacatcggctacctattaaaccgggggttagaccacaccagcaaccgtcgagaagatgcaaagccgatatgctcgaacctgttaaggctgagattcaatgcttatacgatgctggttttattcgtccttgtcgatatgctgaatggatttctagtatagttcctgttatcaagaaaaatggtaaggttagggtgtgtattgattttagaaatttgaataaagctaacccaaaggacaaatatccaatgccagtggccgatcagttggttgacgctgcttcgggacataagatattaagttttatggatggaaatgcgggatataatcaaatcttcatggcagaggaagacattcataagatagcttttagatatcctggtgcaatcggcttgtttgagtgggtcgtgatgacttttggattaaaaagtgatggagccacatatcaaagggcgatgaattatatttatcatgatctgatcggctggttggttgaggtctacattgatgatgtggttgttaattctaaggagatacaagaccacatagccgatttaagaaaagtttttaagaggaccaggaaatatggcttgaagatgaatccgacaaagtgtgcttttggtgtatcggctggccagttcttgggttttcttgtccatgagaggggaattgagataactcaaaggagtattaatgcgattaagaagatcaaggccccggagaacaagacagagttgcaggagatgattggcaagattaattttgttcgacggtttatttctaatttatctggaaggttagagccttttacgccgttgttaagattgaaggccgatcagcagtttacctggggggcagagcaacagaaggctttggataacattaagaattatcttagttctcctccagtgttgattcctccacgaaaggggataccttttcggttatatctgtcggccggtgagaagtcaatcggctcggttttgattcaagagctcgaagggaaagaaagagttgtgttttatctaagccatcggcttttggatgcagagactaggtattctcctgtggaaaagttatgcttgtgtttatatttttcatgcacaaggttaaggcattgtttattatccaataaatgcaccgttatatgcaaggccgatgttatcaagtatatgttgtcggctcctattttgaaaggacgggttggaaagttgatattttccttaactgagtttgatcttcggtacgagtcaccgaaggtgattaaaggccaagctgtcgccgattttattgttgatcatcgtgatgattcaatcggctcggtcgagattgtgccgtgcacatgctctaagtctgtttgcgtagttatggtcagccacacaaaagaaacatgaatctcttctcaaatatatttggagcgtgtcttgtgagctgcaggaaagtctaccgtcccagcccgaagtagatgaattcccaacaactcctattcctagcaccacaaatgaaatgaaatcaacaacatttctgctacctcatgcggggagtgtgtccataacctaacaaacaatatgagcctagccttatatatatagtgtgtcaggctgtcagctcatattagctatgttcccaaacttgggcaactttgggctgaatcattgtgcgcttgcctttgttccctttaaattaatgcaaaaattaactattgcctatcatatgacagatataaggatgtcattttgctgaaatatattgcagaatcaacaacttctccaattaatacttgcagcgaaaaggcatgtaatatagtggttgaagtgacctgagtagcaatccaaggttctgagtttaaatatccatacaatcgaatttcatattgggttatttgaggagctaagttttcgatttaaaaggctgcatatatcctattaaatatagaggccgggtaaaaaaatacatttctctttggataatgccatttataaattttcaggagctaatggtccattaaaaattcattactccatcagtctcaaattatggggtgccctcttttcgaggaaaattaaattcggtagcttttaactaataatcatactaattatataagtatatactaaatattatgcatgttatatcactagattcatattttgaaatactttcatgtgatgctaatttcatatttgttgggatcataaaataaatactaggcaaagtatattattgaagaccgtgtaaaaaaatatagccttataatttacgcgagagagagagagtagggcctgtttgggggagcttctagcagctgcagcttctcttagaatctccagttgtcagaagctccctaaacagtccagctttttacctagattctgagaatctgtagttgtagaatctgtaaaatgaactagggcctgtttgggggagttttagattctgagaaacagctggttggtagccagcctccaagaatctggaaaagctgggttttccagcttctggcttctagttcattttctggattttacaactgcagcttctcagaatctggaccaaaaggctggactgtttgggggagcttctgattctaggagaagctacagcagctagaagctcccccaaacaggcccctagaagcctccagattcttagcggctagcttctcagcagttgcttctcagaagcttaaactccccaaacaggccctgtatttcccgatttactactcaaataaaaaaaatctatgaatggacttgtaggtttgggatggattgggcttaggcccgccctactaatttcaagtgggcccaacacgtccagatgaaggggcccacccacccaaagttgaccgcgatgttacgatgggcctcctctcgacggcggcggacgcggcggtggtgctcttctccctcgccgtcgccgccgcggcgcccctgatcgacgcgcaggccgtcctcccgcgccgcctcttcccggcgcccctcgttgggctccaccggtggtacgccacggagttcggcgactacctggcggccgagccgccgggcttcttccgcggcctcgtctggctggagctcctcctccactggccgctctccgtcgccaccctctacggggtgctcgcccgccgcccgtgggccggcgccaccgccctcgccgccggggtctccgtcgtcaccgccatggtgagtagagtcgtcgcgaccaattctctcagattcaagtccatgttcgtcagtgcctttggtttagggggtatacgtatttatatttggtattgcaagaagctgaggtcaaatactcaaattcatgcttttagcatttgctaattatctgaggatttaggccaacatggggaatttgaagaggaagaagggtacaaatatgaactgggtgattggtgaattcgttttgttaactcggtttatcttcgtcattgcgacgttggggtttacgtaatggaagttccattgtcaggactcgcaaggttatgcttgatttgcttgtcactagacttagctcaatttttatctataattacttaacatacgagttcattttttttctttgggaaatatcctgataagttctaatgttctacacactgatgggatgggcgtctttttaacagttgatggttgcctgtcatgatgtgccccagcgatctgatagtaatgttgacattcatcgatgctattgatgtcgtccagtgctcttttaatacgcacaaatagattgaaatagtttgagcagtaatttgtctcgaagttaaagtaacatttttcctattctaacttaataggaactttccaaattttttgttcgattttgtcttcatttagaagtagaacttcaatatgtgaagaactctccataatcctagatatctttcaaaactataagttagcttgcttcagaaatctaataaaatagcaatgggagaatttgattgacaaaagggtataagaagaacagttactacttactataacattaccttttctaagttagaatcatgcattcgcacgttgattgatttgtctttttttaacgatctgttttgaatcttaccttgtcattaatcttgactttaatcgtttcagtctgcagtactcggtgagtttttggtctcagggcgagcaacacataagctgcttcagatgtatgtcccttttgctgttcttgcagtcattgcagctctgcgcggactggtcgtgtggtcttcgcagggtactggtttagcacctgcaccttcttctcagaagaagaggccctaaggattaattttatttcttgatcttgcggtaaatttgttttttggttatagtcaatcatgtatttcttgctcgcgtgtattatttacagcaacgtaaagatcctcgtgaatgtttttgaacaatcagtgtcgtctccaaaaaggcaatgttcctacttatcttagttctttgagaatttacaccttttcagcaagcggatccagcatacctgttaggttgagaacatttctgtgattataggcttatatataagactcttccttttattttatccactttttaagctctatcgtttcacttattcttatgtctataagctaaaatttaaattttgcaacttaattttggagttgattttggtgtttttcatcatagtttattttacacaatttgttttggtatcactaagaacacaaataaaaaaagtattacccattaattattttttgattgctaataagttatgcggataagcgtaaacataagcaaagcgatgaggttgtttgtgagaatctacaactcgtacctctttgcgtagtttcatttaataaaagagcttcaggactttgagtacaatatttactcttactatattaatttttatgagaaaaggttaatctggtttacatagtaattctctcttttaataagagcaatgagggataaaaacggtgcagaaacggatggaaaccacgttatcgttttcgttttcatattttttttggaattggaatcggaatcggaaaccccggatacgaaaacggaattaaatattattgaaaccgaaaacggagtgaaaatgaaccagcgcggatacgataacgaaaatttatcgaaatacaaaaaaccttcaaagcgagcttcaaacttcgatggacaaaaacttcaaatagacggcaggggacgagacgacatgagatctagatgtgtcgcttcgccgcccggctctagaatcttcgatgtcgaagccgcccggctctagaatcttcgatgtctttctcagtccctcactctctactctctaagtctctaggttacgtgaggtattatagactatgggaggtatcatactgaataggctggcctggggaggtattatggattatttgtattttatgcgcctgtaactttgaaaattccgaaaaagtttttggaaagttttcgaccgattctga

SEQ ID NO: 10465 - DNA, 656 bp, Oryza sativa
cctgcagccctcctcttactcgacttaaccagtaccaacccagcttctcaacggatttataccatggcactttaaagccagcatcactgacaatgagcggtgtggtgttactcggtagaatgctcgcaaggtcggctagaaattggtcatgagctttctttgaacattgctctgaaagcgggaacgctttctcataaagagtaacagaacgaccgtgtagtgcgactgaagctcgcaataccataagccgtttttgctcacggatatcagaccagtcaacaagtacaatgggcatcgtattgcccgaacagataaagctagcatgccaacggtatacagcgagtcgctctttgtggaggtgacgattacctaacaatcggtcgattcgtttgatgttatgttttgttctcgctttggttggcaggttacggccaagttcggtaagagtgagagttttacagtcaagtaaggcgtggcaagccaacgttaagctgttgagtcgttttaagtgtaattcggggcagaattggtaaagagagtcgtgtaaaatatcgagttcgcacattttgttgtctgattattgatttttggcgaaaccatttgatcatatgacaagatgtgtatctaccttaacttaatgattttgataaaaatca

SEQ ID NO: 10466 - DNA, 4812 bp, Oryza sativa
gtagttatcccactattcaatattcactattttggtgggaggttgaagggggcgaatttttgccattttttccaagaagaacatgaaaatcataaaagtaagtaaaatggtactgatcatttcttattaatttagtagtacttatcttataagatgttaactaatattttgtgtatttttcaacgatggatcgaagttggatgtatacgacttctttgaagcgtcagtataaagagtatagagatggcgtattaagttttatgaataacgcggaggaggataggagaagaagaaacaacaagttttatatatgctgatcttgggtttttggttgggtacattgaggtttttcttttctgatagaccataaagaaatgtcattacgaactgcagcatttccgaaaatgagcacgttgatcttgccactacagcactagaacctaatcaggaacagatcaaatttaagctgatgtggatgtctaaatttgctttgagagaggtgtacatatgttgaaaataaacgaactacagctaaaaaatatttttgatcaggttcctagcacccctctctcaacaagtagatccgcccttgaacctaatatataaaagactactgataaacatgttggatgaggtaaaagctagaaatgttctttgatcccatcaacaactggtattgcatctgaacttccacctgcctcgccatgcatgattgcaaaaagaccattgccaaattgtggcggaacaagtccccaaaaagtataagaatgtagcggttcacctctccgagcctcccagggctaaaattcctctggatcattttgttttggtgtactacatatggccattggggtacaatggctttgaggatataaagttgcaagggtcaggaaagagacaaagacatatatttatagtggaatttactagacctgctgttactacaaatttatttataggggagtgtatatagcgaaagctagtgtcgcaaaagaaaacggaggaaaagacttgtagaaaggacccttccaatgaaaaatatattattttagcaagtttgagaagtgtgctcaataaaaccaagggagtatctctaggacagcagcagtaatgaatgctgcctgtcctcctaagggcttccttcaagttgcagttggtttcttatgtgatttttatattattatggcattcatctattacaactttacatcaaaagtagccgacagattgtgaacggtgatggtagatcgtagagtttaagggaaagacaatagtatattatggatatcgacaaagtcagtggcatattgttgaactgtgacgaacttagtagtactaagtagattttctgagtggtctttcgttgttattccgtagggttatttttgttaaaaagaaaaagaaagtagttcatgtagatagaaattttttttaccatcgtcgggtttgtatgaatgtgttaacctaactagcaagattcaaaatgtgtaacgccttccacgcacatctgctatggtacaacttagattattttgaccagtaattgatcacttgtaaccaaagtatgcagatttttaatgatgattagaattgaccaggaatcgtgccaccatgatgcgagtcatcgtctctcatctaggtacaaacaagatccagcagtggcaccaacaccagcacgcatgaacgagtcccaattagaccggattaactcacccacaaaatactaggaagccctttccagtttttttataaaaatccacaaactttaactttaagtatcatatagaaaactttaaccttaggctgtgtcctttggacaactttcccaacttcactccctcattttccgggcgcacgcttttcaaactattaaacggtgtattttttgcaaaaaaaaaagtttctatagaaaagttgttgtaaaaaattatattaatttattttttttaagttttttaagctaatacttaactaatcatacactaataaggtatcttgatttccgtgtggaggaaattagttcccaacacaagcaaacaaacacatccaagacttggccctgtttggttccatgggctaattattagtctccaccttttagctatgaattagccccaaggatctaaacaggtgggctaatttggggctaaagtaaattcactactagaaaaacgatttttcatgacatttggaaaatatttttcatggcggctacaagaaaaaaccgctagcgtagaaaatcgggggggatcacgggcacattaagagatccaccatataaaatactatatttttcgatgtctaccagcgaaaatcagtatttttgctggcggctactaaacagatccgctagcaaaatgaaaaagattcaccagcgaaaagcaaacttcgctaaaaaattttcgcagtatttaaaacgcgcgctagccttcacccacccacccactgcatttatctctcatcttcccctcacctctcccagatctagccgagcctctccccttccctcccacctcacctctctcccctcccctcccacctcaccgcagcgacggcaggcagacctggcgggcggcgacgctcgggctcgggcgaggaggccggatccgcggggaggcggcgtcgccgggctgcgggaggccggatccgcgaggaggcgtcaccgccgggccacgagaggccatatccgcggggaggcggcgccgccgagccacgacgacgacgacgaccatggcgaccacgacgacaggccggccgcgggcggcggatgtacggcggcgggaggggcggagggcctcctcctcctcccctcccccacggccccacctctctcccctcctccttcccacgacgacagatgtgtggcggcgggagggacggcgaccaccacgacgatgacgaccatggcaattggtgacgatgaccacgacgaccacgacgacaggcaaccggagggcctcctcctcctcccctcccctccctctccctctcccagatctagccggagggtggaggcggcagcgaccgccgcgacggcgatggtaggcgggcgacgacatgtattgctccattttgtttgtactgatgtttcatatatgcatgtattgatgtttgtttgttgagaatgaagtgagaaattgatgtagtgttctcttgatgttggatctgatgtggatttgaattgttatggatttgagatttggggatgtggatttgggaatgcaggtagcagcatggagtttttgctggcggctggaggccagctgcatatggtttttttttctcaaaccgattatcgctggcggccagtataacacagctaccagtgaaaatcgattatcgctggcggccgataaccgctagcgaagattgatattttctctggcctttgctttgtggcggctgcaatttccgccaggaaaaaccaaaaatggccgtcacgaaagatgattttcgtagtagtgattagctcccctcgaaacattagcccctctaagggatgataatggggctaattttttatggggaccatcgaaaagcagccctatctccccccatctctctcctctctcttcaccttttagccctcaattaactcatggatccaaatatatcattctaggctaatgtttagcctaccaattcaagactaaacattagctctcaaaattagcccggtgctaatcttctaaacagggccttaatatcgaaggtaccaaattttggtgtctcacaaattataatgtttggtgactcttagtacattttgaagaatggtaaaaagctgaaagaaagagagagaagattgctaaagtgttattctaaatctggaaaaaaaagtatgctatcatttttaagagaaacacatctaactctaacaacaagtaactcagccctaatctggcagcgctcctacaagccaggatatctgttattcaagagttggatgttgtctatgtcggctttactatgctagctgaatctggttttgcagcattcttgtcgttgacaaaagcgatgttagcactaatccaaacttgcatattgtttttagtcttgcatgagttgcatgtagataggcacgtgatatgtttatgttgatccactagatagatgcatatgtgtgtcatgtaaacaatggttagtccaagctttgcatgtagagttagttagtgctagtgattggaagatgcatgtgttgcagcataactagcaactgaacaagtctagggaataagaggattagtggcgaattagttagctgcatgcaagattagtggagcatgtttgtggcgtggtttagtcagctcggaggagcgattcttgcgcgtgagacgcatagatcgtgtgagtgagtggctcatggtcgtgcgggcgacccggtcgggctgttagctactccctccgtttcataatgtaagtcattctagcatttctcatattcatattgatattaatgaatctaaatataaatgtggaaaatgctagaatgacttatattgtgaaacggaggaagtagctatatgtgcatgtacgcgaggctacataagccgtgtaatcatcagtttgtaagtgagtgaagaaaagaaaaggcatttgttgccaagaaaaaacttgtgtgtgtgcttgtgcacttctgtgtgttcatccccagagagctattgtgtgtgtttgttgctccgtgagtgtgctgctcacgtgaatttgatccttggccaaagctaaaaagcgacaccctattgtggatgaagcaagtcagccaaaaatgcaccaaacttagcagccgctaagccaaaagatgcaatacagtag

SEQ ID NO: 10467 - DNA, 751 bp, Oryza sativa
cataaggatgtaacaccattcgagaaatgggaaaggaagaaattaagtctctctcacctgcgcacatggggctgtttggccaaggtaaatgtaactatagccaaaaagcgtaaacttcgaccaaagaccgtagattgtgtgttccttggttatgctatccacagtgtggaatataggttcttaatagtaaattctggagtacccgacatgcgtgttggtacaattactgagtccagagatgccacattttttgagaatgaatttcctatgaaaaatacacctagcacttctagtcaagaacctattttatcccctaagcactttgcgccgatagaacacattgatcaaacgcctgaggaaaatcctgaggaggataacattgtagcaactcgaaagagtaagagacaaaggactgcaaagtcttttggagatgactacattgtatatcttgtggatgatactccaagaaccatttgaagaggcatattcatctccggacgctgattattggaaggaagcggtacgcagtgagatggactcaattatgtctaatggtacttgggaagtcatcgagcgtccaaatgggtgcaagcctataggatgtaaatgtgttttcaagaaaaagcttaggcctgatggtacaattgaaaagtaaaaggcaaggcttgtggccaagggttatacccaaaaagaaggcgaggactttttcgacacttattcaccggttgctcgcttgaccacgattcgagta

SEQ ID NO: 10468 - DNA, 7795 bp, Oryza sativa
tctagagtctgaatcaaatctatccctacttaaaactttggatttttcccatcatcacaatgtgttttcatccgtcgttgagcaccttctctgcctcgcgcggttagcgccttctcaagattccaaatttcccaactcaaacacaaaaacaaaactaaaaggaatcagactctaatccacccaaataaaattagaagagggatccacgtttgaattctaatccatcgcaacatgaaacaataaaaaaatattccaccttgacttcccttaggcctgacggctgcatgcatcgatgcaatcgctccctccgcctaaaggacgagatcgctcgaatccgctcggcaccgaactgcaccatgaatccgtggatgatctcgtcggtggaaaggatgcaaaaataagaatgcaccatgaatttaaaaagaaaagaggtgcgaaaataagaatgtaccatgaattcaaaaaaaaaagagaagttggacatgatagggccgtggcttctctcaagagtagaaagggagtcacctagacatttttcgttaggcggctcaagggccgacccgaacacaatggaaaaagaaaagagaagttggacaggatagggtcgtggcttctctcgtgagtagaaagggagtcacctagaacattttcgttaggcggcggctcaagggccgacccgaacacaatggcaaggagatatagaatgctagcatccggcacgagacccggggggagaaatatctccctatatacctcgatcccccaacaacggccaccccaacaacggccaaaccctgccaactcccgccccctacagctagggttacaagctcacgccaccgagctcggtggtagcatctcgatcgtgttcttttttataccggtttaagccgatgtagattttccatgtggtacgaaactttgttcttatgggttacacgtgcactaatatgggctgtggcgtcccagtaattatcatatctggtcttattatgtttcgtcctcatcgtaattttcgttgcagaatcaatgtgtccttgtgtggtttggatacaaagccaatgagccaatttttgcatagacgcgtttacaatcttggaatcccagctacaaccatggccggcgtcgcctctccgagacggcatagcaagattgcacctgaacgaacacgacggtgatggcggcgtacacggccacgacggtgccgacgaacgccatgagccggtaggcggtagtcgtcggcggcgcagagcgcgaacgtatccgcggcgaactgcgcgacggccgtcatcatgttggtgatcagcctcgcggtgaccctcctcgacgcgcatccgctgccgccatcgcccacggcgagcagcaccgctaaccagtccctgggcctcggcatccacccggcggctgtagcgccgcctggaacgccatggcggcgaacagcgtggccaccaccaccatccagccatccgcgcatgcacaacaagccgaagccgccctgctgttgcagccactcctcgccgctaccaccagcactaccggctttctcactgacaccgccggcgacggcagcggcagcctgacgtccgatgttctgaacgacggtgtggccattgagagggacctggatcgtcctgtcgccgatgtcgatcaccagcctgatgaactaattaatcaccattgaacatgttcatcaacagtaaattgaaagcccttgagctgagttgattagcctggagaattggcagagtcgtcggcgacagaatcaatcgatccatcgatctctgcacaaaaatcaattatgtgctccagctcactctctgaatgtggaatcctaacatgattaacgtcattgttttgtactctgctcctgcatcttcacctcacctgctctgcaattctaattctcatcatcttcaccccacttgatatttgaagggaaaagtaaaagaaaaatagcatcataaaaagaaaagaggagagttggaccagatgatatggccgtgggcttctctcgttaaagtagctgggaagttcactgacgttaaacaacgcagggctctaagcaacccaacgagaccagggatatcttatctataccctcgatccacccaacatcggccaaatcctgccaactcccgcccgccacagctggggtgacaagctcacatcaccaagctccgcgggagcaacactaccacgtcctgtttaatgcgggtctctaccactataaatttttcatgtggtacaaaactccattattgtgcattgcgccgcgcgtgtatatagtaataatatatggctgaatcaaacgcatggccggcccagtattatcggtctttttacattcttggcacccagctacaacaaccatggccgccgccgcctctcccaaacggtagagcaaggttgcacctgacgaagacgaccgtgacggcggcgtacacggcgacgacggtgccgacgaacgccatgagccggtagtcgtcagcgacgcagagcgcgaacgtcgccgcggcgaagagcgcgacggccgtcatcatgttggagatcagcctcgcggtgaccctcctcgacgcgcagccgccgccgccgcccacggcgagcagcatcaggagcacggcgagcgacgtggcgaaggtgcaggtgctgacgatcagatacagcatcgccttcccggcctggtccctcgtgacggcggccgccgccgggtcggcggcgagcagcgccgcgaaccagtcacgcggcctcggcatccacgccggcggctgcagcgccgcctggaacgccatggcggcgaacagcgtggccgccgccatcagccacccgcgcatgcacagcaagccgtcctgttcttgcagccactcctcgccgccgccaccggctttctcactaacgccgccggctgacgacgaatcaccggcgacggaggcggcagcctgacggccgatgttctgcacgacggtgtggccattgagagggacctggatcgtcctgtcgccgatgtcaatcaccaacctgatgttctacacgatgcaattgatatacacacataattagcttaattaatgaactaatcaccattaattaaacatactaatcaacagtaaattgcatgcacttcagctgagtcgagagatttaacctggacataattggcagagtcgtcggcgacagattcgatctccacatctggccgaatccgccgtctatccatcgatctctgcacaaaaatcaatggcgtgctgactagctcactctctgaacgtcgagtcctaacgccatcgttatgtactctgcttctgcatcttcacctgctctgcaattctaattctcatgtcgtagtctcaattgagttggcaagagaagctgcctaatagcactatcaactgagctaccaactactgattgtgtttcgcaaaatgacctatttttcacttcgattctcttcttatacgtaggcgcaggcgcgcagcagtcgccgactcgtcgtcgacccgatatgataattgcaagatacgcacgagcatctttaagaagagatactaccagactgacagctaaatatttaggacaaattagagaagaattgatgaagggagacagaacaaaatattcaggtgtctgaatattagctcagagctagagaacacatactgtgattgaaaagaaaaaaaaaaactaagattgtaatgctgcttattctgattcccctcgggcaagtgtttgtttaggcattctagctctagcttgattaactaaagaacttagtttgcctaattccattccatccaaaccgtccataaattaactgttgctgtcaacaggaatataactctgctcaactgccctgctctgtcttttagtgtcttatttctatcagctagcatgataatacgtgtgccataccagctgcgcacacacaagaatacatatatttctgaagcatgtccatgtctgtgtttggtagactggcattgatcatgaataaatggatcatctactaatgtcagcttacaacaacagatcaacagcagcagcatgtttctagcagttgatctctccctgtaaaccatccatacaattaaaactgctgcatccagaatggagctacgtaacagatcatcgaacatcagtggctcaccgcaatgttaatatgttatctaaacaacatggaattgtttgttttataatggacagaaacccgacatttgtatccacaaagagtaaataagtatacatggtatttgggtatttttgaaagaaaaaaagaaaagccatacccaataatatattgtagaaccttgtatatctataaggttattttggttaatgggcaaataattggcctatttgggggaccttttggcggctgcagtttctttcaaaattagaagctccccaaacagtccagcttttgaaagtcagaatctgaaaatgaactagaagtcagaatctgcgaaacccaacatttttagattcttagaagctagctaccaaccagctatttctcagaatcttaatctcgcctaaacaggcacaatatctaaatcacgtggcttctgaatcacgacgactgccctaatatcatccctaaaattttccacaaatttcgttaaaaaaattacaatagagttggtgcattattgtaagccagcagctgatgtataataccatcaaatcttccacatattcagatatagctccactttgccggatatgtgttaggcgttaaaaataggcaacacgcagtttgtcaggaacaaattgataacaagataaccattgcgtttttcgacaacgagcgaccgattttcaatcaaatcggcaaagagagatagattaatctactccagaaaaaaagaacagaacaataatcgtagaatcaatttatcgattgggttgaggggtttattcaatcggcactgaccttatataggtgtcttgtctttaaattagaataacatatcattcaaccgaatcaacaccgattaagaaaaatattgtgccgtcccagccgcagcaaattaaatgatggttaccttccttttaaaaatcttgaccactcagatcttctgcaatatgtacccatagtttatgatgcaactctaggatcgagtacacgaaccaaatctatcagaggagggtgaacggtagaaatactaaaaaccaaaaaaatttagtgaaaataaaagttacccttggatttggcgaatttacaccggtcacaccattggatatccgctggtttgaccgcattactcccgttggtctgatcgcctgctcgccaccggtctgaccgatgtgcggaggaggcggcggcagaggagacggctgtgcaggggctttctcgttaagcgcatgatgccaagccagaggaaagcttggcgaagagtgcggggaccttgacgctggagcccctctgccactgttatcaatggctcctccgcacatcgccatcatcctcaccgtcgttccgcaggtctagcagcaaagaagaaagggggagcggggatgaggaggggtagcggggagcggggagcggggagcggggatgaggagcggcggcgtggagcggtatccttcgaggcggtgcgaagagacggaggacccgtcgctcacaacgcgctcctccactaggatctcagtctcctcccgcgcgctcaatcatcatgcccaatagctcccccaacctgcaccgcatccctgacgatgagaccccgccttttgcgacggcgagcgtgccttcggccatctccctggccgaccgccgctgatgagggagaagggggggggggggggcgcaccagttgcgtctgctgagctcccgccaccgctggacggtgctgatgcaagggtagccgctctagccactgttagattaatgggctaggtccaattaaatcctaataaattccattggcccacattaaatgctatgggtaataataccaccttggaaatctaagtgaagaggttcaacttaaatacagagctagtggagagtctctgttgaccggttgagatggtgcgtggacaactaggcggggcgaggcgaggcagacagctgctgctgcgctctctcgttttgtaacggacggtaataaacacggagaattgatttcatatcaatgaacgcgtcggttacggaattaaacgtcgtgaattgattccatcggttacggaattaaacgacgtgaattgattccgtattaacgagcgcgtcggttacgaaattaaacaccgcggttgatgactccgaatgttactctcgcgctcgcatatatatactccgcagcgaccagaaggacttacgaagttcttcccaactcttgcacttcgagttcctcctcctctgtagctgcagaatccttacccggttctgttcacctgcgcacacaggtgtacgggacgagcaggtgcctccagaactccgtccacttgagaacttgcacgggtaggcgcgcaatcaagtttttgggtagcgcttcaagcgcgactgctcctgttcttcgttcttcgacgacaacgttgcatcttcctctacttctgcttcaccatggcttctactttagagaacggaggagacaacatcaacggaggcaatacgaatgcctcaacatcttctgcaccattatctgggtataagattcaaactttatttgattttcttcttgttatttacatgttcacaatgttatccataggatttcaatcctatgtgaatgtcaacgatgtctatgcttattttaccttaagcatgcttatgtttatgtttagccttatcactagatcgtttctcattgtgtatgtcatgtttattgtcttaatattttggattaaaatatgccgaattatgaccaaatttccaacaatccaaaaacttgataggtctttttcggtagttggctttgctgcatcactaaaaccacatgctttcgatggttcaaattagaaaagatggaaagcacacacactttttgtggttgacggcgatgcattgtttctttgtttcacggggcaaaccgagtgaaccgcctctctcccctgaggaggaggctaagttcgaggctgcggatagcttgttccgtggagcattgatcagtgtgctcgccgacagtattgtggacgtgtatttgcacatgccttcagggaaggacatgtgggatgatcttgaggccaagttcggggtttccgacgccggtagcaagctgtatgtcatggagcagttctatgactacaacatggtcgatgaccgttctgtagtggaacaggctcatgaagttcagatgctggcaaaggaacttgagaacaacaactgcgagttgccggacaagtttgtggtgggtggcattattgccaaattgccaccttcttggacagactttgctacttctctaaaacacaagaggcaagagttcagtgttactgatcttattgtctctttgggtgttgaggagaaggcgagggcaaaggacaaccagggcaaaaagatcgagggaggttctagcgccaatttgctgcagaagaagaaccttcatgcatctcacaacaacaacaagaaagtcaagcctgatgtcaaaccaaaggctactaccaattttaagaagaaaggcaaaggaaaggcaaaaggagattgctttgtgtgtggcaagcctgggcattgggccaaggattgtcctgagcgcaaggacaagaagtctgcaaacatggttattagtgagggcggaggaacattggggtatggtaaatttttacctacagttctctctgtctgtcactcacctgattggtgggt

SEQ ID NO: 10469 - DNA, 12906 bp, Oryza sativa
  unsure (1)..(12906): unsure at all n locations
gacgacgtcttgtgtcaggctccgtcgcggtagtttaggttaggttacttgttggtgtggtgtcgtagttgtggttttcgcttagtttttcctaattacctgagcattgtaaggtttggtcctattttcttcttaaaatagaatatcttcttcttaatataaaacgtcggcaacagcctgaccgtttgaaaaaaaaagaccatgtgcagagatagcatcctttcagtgtataccatctctctcgtcaaagcatggacattgcttgtagggcaatgcacattggacacagcactgtatttggatgccatctcatcactatcgtggaacataagtaatgtgccaaagctacagcaaagtctaattgaacagatgctgagccataataatgagatccccggcttgatcagcggtggattcatgaaggcgtaggtggataggtgtggcacgtaaatatcagagcaattattgcgagcttgtgatgtgtccaatggagcaatgctgaaggtgtgaatgatatctcaagcttacattttcctagatttggtgtcacatgactaattcgagctaaggatttttttttttttaaaaaaaaagtagaaattcttgccgattttaagatatggaggattggaggttacatatttttttgcaattgcaacaaatcatcgctgcagctaataagggagactccaccgacagatacggttaacctggatgcagacggatttgcaacgcatccatgagatttattttgtttaagtattgttcgcacgtctagcaattccagtgtttgtcctgtccatgtatcattaaagacattaaagacgagaattagcgcatcgatctcgatttctgggggagaccaaaattttgcctgattttctgctgtttggcagagggaagaagacaatatgtctcaccttttcaggagtgtttctttccttggtgcaccccgtattttgctaaagatgttcactatttaatcaggcagatgatatttgtttcatcaagccgtttagtagtactagatgactagaagtgattgcttctgaaatgaggaggtgactattagggactactagcttgtagccaaatgaagggtgtccgagtttaaagacgtcaatggaaaatagaacacctctgtttatttctagcaactaaaaatgcactaattgattagatgctttaatgcttatattaagattcaggcctatgtgataaaatggaggaagatcccatggaacagaggagagaatttgatactatcgtcaatcactcaatctaggagcctggtccatctggaaaaggcgtaacgatcgagtgttaaactgacgacagtgaaacttttttttttttggcggggttttgattacggcagtgaaacttggtcgatattacaaagacaatgggcgaaagaagcatagcggttggcgaacgttgcagttccgtagctacttctgtagccagtgatagccctaggttgccttatatgttgcaagaatcaaactagtgcaacaagttcctttccccctgctttttttttcctgttccgttgtaattagcaatctttactttcttaatacaacaaagatgcgtaagttttttttcgtattcctgaaaagaaaatgtagttcttatatgaagttgcatgaaaatatatgaatatatagatgaagccacaaaatgaagtgtcttaaactcttctatatcattgagtttgtcatatttcaacaatttactattgactttatctttttctacaatataccagcgactttatcaattattctacaatacattattgggctgggcttatttttcaataatatctaaaatacccttatagacatataaggttaacaattgatttataccattggaagttttaaaaaatatataaaaacttgtatgtggcatccttgcatagtacaaaagtttgtatataagttttaattttttttttcatttctattttttaaaataacttatttgttggtatataaaatattttttgtgttgttgtttttaatgtaaattatttttcatatgcaacataagatatttttctattatcttttgtgtaagctatttttctctgatataccatacaaaaatatttttttttctaagaaaagaccaaaaaaattgaaaattatgtacatacttctttgttgtgtgaggaggccatgtaaaaaaaattcatattttttcgatactttcttatgagataaattaaatattaaccatttatgtctataaggatattttgggtattttttagaaagaggcctatcccaatagcgtattgtagagcaattgataaaatcatgggtatatattgtagaaagagaaaatatcagtggcaaattgttgaactgggataaacttagtggcatagaatagattctctgttagggaaaagactaatacgtaagaacgatacaaccagttatccatgggagtgtgcacaaacacaaaacacaaacattttagtgatatattgcttgcgtcctcgagatgattgttacttgccagatacattttagtgatatattacttgttccgtgtttagttgttttggaaaaaaaaattgacgtatacgaacacacatttaaaatattaaatatagactaataacaaaacaaattacagattccgcctgtaaactacgagacgaatctattaagcttaattaatccatcattagcaaatgtttactgtagcaccatattgtcaaatcatgatgtaattaggctcaaaagattcgtctcgtaatttacatgcaaatcgtgcaattggttttttcgtccatatttaatgtttcatgtatgtgtccaaacatttgatttgacggaaaagttagaaatttgaagggaagtaaacacagccttgcatgatcgttctatacacccgcggagctgagttctttcccacttttcccaactcacctttctcgttttccatgcgtacgcatttcaaactgctaaacaatgtgttttttgcaaaaaaaaaattctttatgaaagttgttttaaaaaaatcatattaatccattttttttaaaaaaaagtttagttaatacataattaatcatgcaataatacgtgggccgttttgcgtgccgggtggagggtttccaaccttttatctcgaacacagcctaactaagctagtgttctagcctcaaaaggagtatctaaaataagtgcagagtaaatcgtatgtatcctttcccgcccagctaatacaccgttttggtgatttgaccttggagtcacatgacgaactgtaagcgagcttaataggtgcactttaattttcagctattccaatagtgctacaattcacatagatcacacaattaacgccaagatacccacaccatggacccatcacatctataatagcgaagtgaaataaccttgtcgatcaccacatgtgaaaatgccaagcacactgctgcgaggaaatcgacatactcgttgggtttcatgcattatattctgagtgattataaaaacgtgctggcagcccagtaacagtagtagccgagagcaccatttttgttttctcctcgatcaatgaacgtctttcatcaccgacacaaaacacacagccgccatcgatcctcacgtgcctctaccacacagattgccagattggtgcttgattgttaagtattattattactgcgtgataacgtgcgtaccacaaggttaattaggctaagagcaaagataataatagcgctcacttcctactattaatgtatcttaaagccaacatatataatggattagctataaggctagctataactttcttcttctctctatctctcacctatgcatttaatgtatttaattagaagcttgtgttaagctaacttttacattagagccaacatccttgatttttttttatcgctattcttcacgtaagctcactattatacttgctctaatagagtagtactgctaaggctaaggccctgtttagatgggactaaaacttttaagtccctatcacatcggatgtttgaaaattaattataaatattaaacgtagactattaataaaacccatccataatcttggactaatttgcgagacgaatctaatgagcctaattaatccatgattagcctatgtgatgctacagtaaacattctctaattatagattaattaggcttaaaaaatttgtctcgtgaattagcttttatttatgtaattagttttgtaagtagtctatatttaatactctaaattagtgtctaaagacagggactaaagttaagtccctggatgtaaacaccacctaaatacgacctgctccaccgggggccatccctggtaaacagctagagagtactaagctatgtacagtgatcctgacctacacgtacgtcaaacgtttcagaccaccacggcgccccgactggaccagcagcgaacacaatgtgaccagcggcgaaaccccctccccctcccccacatgcacgccaatcccctcaccgccaccaccatgccgtgtcacatgcccgcttccccgggctaccatccaagcctccaccgtgtatataatgcggtgccatgggtagagccattccacacacactgacctgcaagctcgctgggcagcttacacaggggagtgaagtagagggagtgtgagagagagtgagtgagaatgggtggcaaggccgctctcctgatggccctggtggccatcagcgtcgtcctggaggccagggcggacgccggtggctacggcggcgggtacacgccgacgccgacgccggtgaaaccggcgccgaagccggagaagccgcccaaggagcacaagccgccgcaccaccacgagcccaagccggagaagccacccaaggagcacaagccaccggcctacacgccgcccaagccgacgcccaccccacccacgtacaccccgacacccaagcctacgccaccgccatacacgcccaagccgacgccgccggctcacacccctactcccccgacgtacacgccgacccccactccacccaagccgacgcctcccacctacaagccacagcccaagccgacgcctgcgccttacactcccactcccacaccgncaacatacaagccgcagcccaagccgaccccgccacccacgtacaagccgcagcctaagccgactcccactccctacactccacccacgtacaagccacaaccgaagccgactcccactcccactccctacactcccacgcccaagccgaacccgccgccaacctacaagccacagcccaagccgactcccacgccgacgccgtacaagccgcagcccaagccgactccttctccctacacccccaagccaactccgacgccgccgacctacacaccgacgccaacgccgccgtaccacaagccgccgccgtcctacacccccggcccgccgccgccctactagttgtgttccgccactctccgtcacgttccgaccaaaggtatagtacgcccaacacttcagacgctcacggttcagtttgcacatttacttattttcggaaagatttttgagtccgaacaaatttaaatataactaatatttttacaataaaaatttcagcatagattcacttatcaacataaaattttatattgcttattaattaacctgcatgcatggacgaacggatatcttgaataagtctcttaaaagcgggtgcttaatggcgtactctgtttgttttctgtctttgcaggaggtgaccgaccgaccagagttgtgcgagaggccaaagaggctcttccttccgtgaagattgctgtgcatgccgagctgcgctgcctttaattacctatagctaattaattagctagggccaatgttgcgaggagaataatgcatgcttgagtgccaatgttgctagctcgctccctctctagatgtgatgtgtatcatgtgttgtgtgttgctcgaatttgtactgtctagcgtacgtcgatcccgtggtgatttgtggagtatggtattgttgtgttacggtataaccaaaaataacagcggaaatggaagtaaaagctgttttcgatcgtcccagcatttcttctttcctctattcctgttctttcgcaccgtgcaaccacgagaaattgatgattgcatgcatgtcagagaagactctaaactttactagtacaaattgtactgataattaaactccacacagtgacatatagagatttcacttgaaataaatagtacttcctccgttttcgtataacacccgtttcaaagatatttgatactgtttgatcattcgtcttattcaaaaaatttaagtaattatttattcttttcatatcatttgatttattgttaaatatatttttatatacacatagttttatatattttataaatatttttaataagacgaacggtcgtgctgctactgcgtcaaatattttaaaacggagggagtactcccccagaacgagccacaagggtacgactatcacaattggtgacgccattataaaaatgcaatagtctctgcatttgcaggtgcagcagcatgcatgcatgcctgagcagccgtgagctgtcacgcgttgctacagtctcactcgccgcacagcacacaggtacagcgaccgcctctgcatttgcaggaggacgcccatacggctgtgacatcaaagctagcctgcgctccaaaacttcaggaccagaaacaatgtctgtttgcatctccattttcgacgcaggcgcacacgtcggtccgatagactttggagtgcaacaagaactcgaaagacataagcagagtgtaatcaagcatatggtttagtgctgagtttttcatttcatatagcaagggcatgtttatttcgcgaaataaaatttttttttgtcacatcgaatatttgactgtatatcggaagaggttttcaaacacgaatgaaaaaactaattttataactcgcctgaaaaccacgagacgaatcttttgagcctaattaagacgtcattagcacatgtagattactgtagcacttatggctaatcatggactaattagactcaaaagaatcgtcgcgcgatttcctccctaactgtgtaattagtttttcttttaatctatatttaatgcttcatgcatgtatcaaaagatttaatgtgatgtttttgggaaaaacttttggagaaataaagggacctaacaatagcaacgttaagtgatggaacatgatgaacaacgagaagaaaatccactgtgtcactcttgcgcagtggcggatttagaaagaaatagtagttgggtctaaacaaattaaatagagttacaatgtccccacccatctatatataataaaaaaatttagcggtatcttcgtgggggctctcatagttttcacgccagtagtggaggctcgagaccccgccgcccccgtgctagatctgagagtgagaaatatatatgcactcgcaagcaaactgagaagcttgcaaggacgtgtactctacacgatcaatcctcctttgcagtagcaaactgagaagcttgcaagaacaacggattgcaagctgggcgatgaattggtggaaggtggtgtgtggtcacagtgatgttcgaaatctgaagcaatgaattcgacgaagggggagagaaagcgtgcaaggacattggtcggtagaataaattggcttgcagtaaaagaagatcacgtgatggcgcatggccgcatgggagaacttatggtcttttgattccaaaggtttcaagcgctttgttgtgaaaagctgaaaaggtgaggagaacaaagaaaatttagatctggtttagtttccaattttttcttcaaacttttaactttttcatcgcatcaaaattttcctacgcacacaaactttcaatttttccgtcacattgtttcaatttcaatcaaacttctaattttagcgtaaactaaggccgggtttagttacaaatttttttcttcaaacttccaactttttcatcatatcaaaactttcctacacacacaaactttcaacttttccatcacatcatttcaatttcaataaaaattctaattttgacgtgagctaaacatacccttaaaaagatagtcgtcatattacttcaaggagaatatactacagtagtatatataggagtagttttattttagataatgagtatataggagtagtaaattatggaaatggtaagatataaccatgttcagtgttctacttttcagtagcctctcacagggtacacaaaaacaaggaaccaccaacattgtacttgagatggttaatactctaaaatctagataaaacttgggaacaaagagaggcactaacattttctttttgttcttttgataaaactggtgcgtagccattgcacatgaagctcgttttattactactactactactgctactactcaacttgattatagaacttgaatataatgttgggttgttgtgattatctcccgcggtaataatttttttccactgaacgaggcagcgcaagccagaatgcacatgttcatgagataagtgtcagaggggatggatttagtatttggaaaatagcttatgccgatctgaaaactactcagattttcgctcagtggtggtgcacgtcgctggtctttttttcccatttcctcggttcgtggctagcagcctcttgccctcttctagttcacacgaaactggttagtgcactatttttcaatgtatcctccacatgggtttgtcgatggatgtcagatatccctggaataaacttcagagaaaaagttatttttgcctcccccatacctcctctttggcatggaaaggcacacacgggcaaaataagaggggtgaaaaaggaatgcacagatgccaaaaatccaggtttatgtcgcggtgatgtttactagttgtacatgttgaattacaggtgcattttaatttttcaactggtttggagcataaaatcttacaaaactttcaatcaattaatataacccttttttgaatgaaataaaaagaaagacaaagatattagaaaaaaaatataaatctaaaaacaacagttgtaaaatctaattttaatatactgtaaccaagtacaatgtaaccaagtataattactatgtaactaactgtaactacaagtcgagtctacatgaatacgaatgttgatataaaaccttacggacgaaaaaccgaaacccaaaaaatctatagtaagtgaaatagcaactttatactaagtcaaaaacaagatacattaaaaaaaacaaagacagcgtgctagtagaaaaatcattgtactagtatatcatacttcctctgttaaaaaaactaatctatatattctagtacgagagatgtgatatattagctcatttcttttcttagactgagggtgtaggtaaaaacattgattatgggctactgcatttccattgagcaagggccaaggggaagaggagggaaccttgtgcccgggtgcgtgaggacatgagaataacctatagggtaggtttcagtaatggcggtcttaaccggcctgaaaatttttatcaattcctgcctggagatagatctaatcccatttgaaaaatccaaggacgggttagtggtacagtagttaagtttactggcgcagtttctacctcgtgaagttgtcatcactcatcagctgcccaggcaatgcaatgcagaacagctggctgaaggtatgatgttgatcctttcctccaaaaagaagaaaaaaaaatgaaagctctagtacaacaaataactacggagtactatcatcattgacccacagtgtggaactcagtatggatcagaaggatccagagaagccaaaaaaacaacaaatgctacgagggctccacatcacattgaccacttgaagcggcctctctctctctcacacacacatgttgaagcccaactaatgctcactacgaacagagcaatggttagtggcagtaattaaagtgcagtaacagtatgtcagtatcgctatgcatcgtatcaaacagcttcacctccgtgggctctgagacgcgggtagccgagcacggccgccacgagccaaaactggagcgaaacacagctgccgaacacgaacgcaaacttgtaatcagcgccaatttcttcgatcttctttacgaacgcgtaaaaaaaacacacaccaatatgctatagaaaaaagttttagttacacaacacaatcaaccagaacaacttatatcagagaaagggagagaaaaaaaacttaaacttagaaactagggtggctaaacacgaactacaaacagcgaaaatgagccgagccacagctgcccaatttcttcagtcaccagcgtcactcacgtccacggaccacggtccgccgctgatgatgataatgcccggcattgcaggggagatcgggcagctgcaagcagcagcaggaggaggaggatgatgagccgggcccagggtttgaccaaccacgcatcgagcaaactggccgagtgccgacaccgcgcgcgggaccggactacgtggtctctcgtctatccagagcgcggaaccagccggccgatgcgacgcagtgaccgggcggggcggcgattaaagaaggtttcagagtactaaattataatcgcagataaaattatgggtgcgatgcggagaatgaagcgagctgagctgatcgacgatctcacacgatcgggttaggtggccacggcgcccaatcagattagatgggtcatatggacgtacgctgcaacttggggatggccggcccccttttcccctgtccttcacctccctctctatacttgcagtttcctgttcgggttttaatgttcctcgtgttcttttacgtgcgtgcgtctaggttcatccagggcaatcgattcgaaaatcaatcattgatgacccgacaagagctaattatcagatcgatcgatgatggatgatgggcatggatggccggatgggagatggttatctatcaccagtgactacgtgcagcgcggtggtgtggcactgtggggtactctacaattcgacgtgtttgggccttatttagattctaacttttcttttcaaactttcaactttttcgtcacatcgaatttttctatacacacaaactttcaacttttccgtaacatcgttctaatttcttcaaactttcatttttaacatggaactaaacatagtcttggtccggtaaattgtgaagatgtgctaaagtctctgcttgatttgctcgaatggatctcgatgggcaaactagtttttgtgttaggaacggcctaagctaaggaatcaatctaaagctaagagcctaacacgcatgctgttccatggatctattattggggaaaacaaaaatgtttcagatctcactgtcatgagaagaccagatccatccatctaaagcaccaagcgtacctacctttttaggttgaccttaccagcggattaacgccgtcgatcgatgccggtttggcctaacccatatcctgtgtagctcacatgcctcaaagcgtagccgcttaataatgcagtttttatcttttccgtgatggacagtacgaaacaatagaaaatgttctctgaagagaaccaacctgtcgagttggctatcatcatgcctcctgaattttgaagtgtttatcaggatcagaaagaattgcagctgtgcttcatcaggcctcaggtaaagaaccagcaatatcttgtccaaatcaatgctgttacagtaagtccaaaatccagcaattcaaggtagacctgccataacatcaaaatgtactcacaaaatgatcacagtaacggaatttcatttttgagtgaaataactataaactaaatgaagaagatgtgatttcattagagcctgtagtgcaaggctaggaaagagccaaccaatcaagacaggcctgtaatgcagggctaggcaagagccagacaatcaagactgctgatgattacattccaaaatgacagtattacagaagtcaaatgtaaaactttcgttggatgccaaaccatcatgtcgcagttccagcctcctctgccgctagtgtctaggggtctagattgatttctgccaaaccgacgaaattcatttgtacccatactttccgtccagataattgtccagtccaaagacacggacgttgttgaagcccactagtatctcctgtggactgtggttcggtccaaacacaccgcagccgcaaagatcaatgcgtccttaaggtccaaactagcccattaaagtgtcagttcaactaaattcagctaacgacgagaggacgcatcaaatcgaatagatcagtcaagatatcccatgatactctgtacttcactacttgtgtacagatatacagccgaaagtgaaatagtagtaggcactccgctaccagtgttaacactataatgcaaggtctgatttgagtgttcagtaacaatctatctatagcaggtactttgttccacatcttaatagcagtcatttagatgtacttttgaatggagcatatagaattcaaagttaggttgagtgtgttatctagccattttatgttaaaaataggttggaaacttgaaattcgaagtgccaggataccaaagtcaggttgaaactcgaaagaccaaactactagtaccagccaagtccaagtaccaacagcgtgaaatttggagctccttgcaacacggcccagtcctccaaagtccaaagctcaagataatgggtttggtaacatcgaacaaacgggagattcaaacgcgccactataaaaaggcgccaaatggaggagatcactcgaagcaagccgagcactgcagtgaagcgatcgagccaaagat

SEQ ID NO: 10470 - DNA, 535 bp, Oryza sativa
tatatgtgaagtacttctcttgatcattgtcgacaaatgtaaaatttactataaagggtcctgccatctctggaattgagggaaagtattggccattccataccccgctagtcaaatatggtgtggatgagttcaacagtgtaaagatgtattgattcgcaccacttggatctaactcaacactgtatttgccaggagctaggtcaattgaattcttcctagaaaccagacggctattgagaccactgatcttgctccaaccaagttttgcaccagggaggaaagtatgtgttgggtagtcaaagctttgccacagcgcatcggatgaattcaagaaattctgtaggacgaggtttccgctgttcaatagcatggcaactgtgtcgctagttgtgatatttattcgggtagaccaaacgatggatctgttggatcgatctaagatgacgagcccgccatcgccagagatcgtgagctctgaattgttggggtctgtgactgggttatcaccggttggcacccatactggagttag

SEQ ID NO: 10471 - DNA, 1270 bp, Oryza sativa
aatcgaaatcggaatcggaaaccccggatacgaaaacggaatcgaatattatcgaaatcgaaagcggagcgaaaacgaaccggcgcgaatacggtaacgaaaatttatcggaataaaaaacccctcaaactaataaatctaattaaataaattatctatgtttaaaagagtaatgttgttgataaatcccaatgtagcacaaaaaatattcttatgtaattttagatttgcataacaaatatttttttaaaaaataacagccaaacaccatggtattcactatttagtgcttaaaaaaggaattaagggtatttcagtcacaaaatttatggtaattccgaggaaatttccagaaattccgagaaaatttccggaaagttttcgaccgattccgagttccgatggaaactgcccttatcatttccgattccgtttccgagaaaatatttccaaattcgtttccgtttccgaaaaattccgaaaaaattccgaccgacatattccgttttcgaaaataggtccgaaatccggaaagtttccgtaccgttttcacccctagatgtatgtatgcgtttacaagggtgagtgtgcttacatgtttaagagcatctacgaatttgtacaatgttttaaaaaaatatttaaattctcaaccatttccattgagcagaaaattcccactgaaattctagctgggaaatcctactcctaataaatcctagtaggccaacaccaagtcaacagtcaactctgctacctcggatctgagtgagtgaagaggtgagcagcagtagtatagcaatagcaagcggattaattatattaagaggacgtgcaaattaattaactaattaattaaacacccaactaatctccactaataaaaccgtattactcccggccactgacaccgcagcgcagcataagaagaagccactcgccgccgcgctctctcgtcttcctcctcactctctccagcttccctctcctcgagctcgagatctcttcctcctcctcgatcgcgtccatccatggcggcggccaagaaggagaaggaggaggaggaggaggcgtctaagctccagctgaagccggcggggagcaaggtgttctccaagctgctgtccagggagagcgccgccgcggcgccgtcgttcagggtgtactacggcgtcgcctccgcgggctccgtgcccttcctgtgggagtcgcagccgggcacgcccaagaacgccatgtccgacgccatgctgccgccgatcacgccgcc

SEQ ID NO: 10472 - DNA, 614 bp, Oryza sativa
aggcatgaaggccttagaagaaagaaaaagaaaaaaagtaaagattggcgggggcctgggggctcattcaaatgcacccgggtcgctggcctcgtcgccaccgtcgtcctcgccgctggcgtcgccctcctcgtcggaactgggggcgaacgcgagccgaggggccgagccctcgaagccgttgacgatgtggtcggcagcatccccgacccgcgcgcgcgcgtcatcctcggtcccgggagggaactcctccagcgccatccagggagagaagttggggtcccgggcctggtaactcgctagcacgagttcgaccgccccccgggcgaggtccctcgaggatgccttaatggtcttctcgagctcctcggggagttgctcgagaacccaagccatcctgttgaggtgcggagcgaggccttccagattggtggggggcaccgacgtctggcctccccagagtcccgcttgccgaccggcgcgcttcatgcgggagaccgcatcccaaagcatgtcgggcccaatctcgcccgccaagcgaagggcctcggcctccccggtggaggagtccagcgctcgctgcatctccgcgacggtgtgttcggcagctgcga

SEQ ID NO: 10473 - DNA, 1455 bp, Oryza sativa
gtttccatcggaactcggaatcggtcgaaaactttccggaaattttctcggaatttctggaaatttcctcggaattaccataaattttgtgactgaaatacccttaattccttttttaagcactaaatagtgaataccatggtgtttggctgttattttttaaaaaaatatttgttatgcaaatctaaaattacataagaatattttttgtgctacattgggatttatcaacaacattactcttttaaacatagataatttatttaattagatttattagtttgaggggttttttattccgataaattttcgttaccgtattcgcgccggttcgttttcgctccgctttcgatttcgataatattcgattccgttttcgtatccggggtttccgattccgatttcgattccgaaaaaaaatatgaaaacgaaaacgataaagatggtttccgtccgtttccgtaccgttttcaccccctacatacatcttaccactatgagcatatctaactcttcaagaaattagagtgacatattttaagatcggtgaggttatgataaatgttattattgttaacatgctgctgaaagaataattattacaaatacgaacacccatttcatgtttaggacttgcggatgagcaagttccatcctaagaaatctgtaatcagctatgctatgttcagtttgcgtgagattttaaatattagaaaacaacgttatttttggtccagtgtattgtttaacctttttccaatcatcatgtacaaaaactacaaggttaaatttttaaatgaagtttattcaaaagataattttgaaacgagatatatctgatctattataattcttttatatatttagaaacatatggcacaagagttagtagtacccactagtacattagtacaaaagcgaactggtactaaaactttttaaactactcatttcaaaaccagcagcgacaagaacaaatggaaagacaagcatatcaacacaaagtactctatccgtcccataaaaaaccaacatagtacttactctgtttcacaatgtaagtcattctaacattttccatattcatattgatattaatgaatttagacatatatatctatctagattcattaacattaatatgaatgtgggaaatgctagaatgacttacattgcgaaacggagggagtatgaaatatgatacatactagtattttgaatctcgatatatctttgtccagattcattgtggtcttatttagatttcaacttttcttttcaaacttccaacttttccgtcacattgaacttttctacacatgcaaacttccaagttttcagtcacatcgttccaatttcttcaaactttcaattttggtgtggaactaaacacaaccggagctagaatgtgtcataaccagtcttatactatctccgtttttaatagatgacgcc

SEQ ID NO: 10474 - DNA, 587 bp, Oryza sativa
cccaaaaaaccgaaacattctttggcccattgcctttgggcggctccacaaagtattttcttaagtgcttctagattctgaccatttgtatgttggcccgccccatttgactgtgggtgcacgacagacgcgaacctaatttttaggttaagcccttcgcacatttctctgaacttatcagagtcaaactgctggccgttctcagtaatgaactctttcggcacccctaaatggcaaacaatgtttttccatacaaacttctgtactgctgccgaagtgattaacccaaggggttcggcttcgatctatcaagagaaatatttccatagctacaattgcaaatttatacccgtttcgcgccaccgggaatggcccaataatgtccagtccccatctggcgaagggccatattggtgcaatgggctgcagatcatactggggcacggcttggctttggccatgacgctggcaacttttgcacttcttgatttgctcaacacagactttcaacacagtgggccaataaactccttgtctaaacactttggaggccactgttcttgcagcctggtgcgaaccacatgata

SEQ ID NO: 10475 - DNA, 7290 bp, Oryza sativa
  unsure (1)..(7290): unsure at all n locations
agtatttggtccaagtttccgctttttggctataggtacatttaccttggccaaacagccccatgttcgtaggtatgagagatttaatttcttcctttcccattcctcgaatggtgttacttccttatgcttcattggaattttattcaggacatgataggtggtcaaaactgcctcaccccaccattccttggaaagccctgaagtgtctaacatggcattcaccatctcagttagagtacggttctttctttcggccaccccatttgattggggtgaatagggaggtgtcctctcatgaataattccaaactcttcgcaaaatgatgcaaactcattggaaaaatactccccacttctatcagacctcaaccgtttgattttcctttcaagttggttttctgcctcagctttatagattttaaagtaatgcaatgccttatcttttgttttcaatagatacacatagcaaaatctagtgcaatcatctatcagtgtcatgaaatatttctttccccctttagtcaacacgtcgttcatttcgcacaaatcggaatgaacaagttctagaggtgccaaattcctcgcctcagatgacttgtgaggcttgcgaggttgtttcgattggatgcaagtatggcacttggaacctttgaccaaagtaaattttggaattaaactcatgttagctaagcgcgtcatacaaccgaaattcacatgacagagtcacgaatgccacacattagactcatcattctcgctaatatggttcacagcattatgattattacacatgtcattcaaagaaaagcggaacaagcctccgctgtcataaccttttccaacaaaagtcccatatttagatacgacacatttattggactcaaacacaagtctaaaaccttctctacccaatagagccgctaacaagattcttctttattgaagggacatgctgcacgttcttcagctgcacggtctttcccgaagtaaacttcagatcgaccgtaccaacaccatgaacagccgcaagcgaccccgtttccatcaacaaggaggaacctctcccgacctgataagaagaaaacagagaaatgtcagcacatacatgaatattagcaccagtgtccacccaccaatcaggtaagtgaagaacagagagaactgtaggtaatattttaccgtaccccgatgttcctccgccctcgctaatgaccatgttggcagactttctgtctttgcgctcaggacagtccttggcccaatgccctgacttgccacacacaaagcagtctccctttgcctttcccttgcctttcttcttaaagttggttgcagccttgggtttgacatcaggtttgactttcttggtgttgtgggatgcatgagggttcttcttctgtaccatattggcactagaacctncctcaacctttttgccccgaacgtncttttgcctcgccttcttctcaacacccaaagagccaatgagatcagaaacactgaactcttgtctctgtgctttagagaagtggcaaagtccgaccaagaagttggcagtttggcaataatgccacccgccacaaacttgtccggcaactcacagttgttggtctcaagtttcttagccagcatctgaatctcatgaggttggtctactacagaacggtcatcgacatcttgtagtcatagaactggtccatgacatacagctcactgccggcgtcagaaactccgaacttggcctcaagtgcatcccacatgtccttcccggaaggcatgtgcatgtacacgtccactatattgtcagcgagtacactgatcaatgctccacggaacaggcaatccaaagcctcgaacttagcctcttcctcaggagaaagaggtggttcacttcgtttgccccgtgaaacatagaagtactgcatcgctgtcaaccacaatagtgcacatgctttccatctcttatagntaagaccatcaaaagcatgtggtttcagtgcagcagcaaagccaactaccgaaaatgacctatcacggttttgggattgtggaaatatagtcatgaatcggcatattttaatcccaaatgtaaaacaataatcatggcataagcggtgtagggtgatcttaacataaccaggagcatactatgcgtatcatgaatgtcaggaacaggaatattacagggacgcaataacatgctagaggcatcatgaagtagcatactatgcgcattatgaatgtcagaaacaggaacattacagtgacgcaataacatactagaggcatcatgaatgtcacgaacaggaacatagcgcacataataataaagcgatagcgctaacaaagggaacaggagaagatataccccaagaatggacctccgctggattgtgaggcagaattgtctccgttgatgttgtcgttcgcggcaccggctccagctcctggcgcaccacctatgccatcttctccagcagcggcggtggcaactccagacatggcgagcagtcgtgcgggaggcactccccaaaaacctgatcacccgcctacccggtgcagatctcaggcgaagatgtggtttcggaggcactggtccttccaatctctcgtgcgcgcaagagatcagaagcgaggaagcgataacagcactggcgcggaggaggaggaactaacaccgagaaagaagcaagcgtgtgcgcgcaagagatcagaagcgaggaagcgataacagcactggcgcggaggaggaggaactaacaccgagaaagaagcaagcgtccggaaccgatcggactcgcggcctccttatctatcaggagagagaggcagtcgtgggaacgtggacgcgctgttgcggagacagtcgtgggaacgtggttagtggctgtaaaagaatagcgacgtgacgcacgccagcctcggcctcggcgcgcgcgcgcgcaagtgtggcattccgacccccacctcaaccagtcaacatggggcctccaataactccctatttaggttgagatattcctcgcttaaatcctgaggtggtattattatgcttaacacttattatgggcctttgagatttaatagggtaagttgggcctagcccaattattctaacagtcagatccccattggaattggttccctcaagaaacttgtcactcttgatttttcccgtaattatgggttatattttgttaagccaagctttcaaactgttatggcaaatctaagcaacctaagggagctccatcttgatgatgtgaacattttaagcagccgatcaagttggtcacttattctagcagacaacactcctcagctagagattcttagcttatctcagtgcggtatatcttgttctattcactcttccttctcaaggcttcgttcattaaagataatcgatcttagcgtcaattgggaactcaacggtaaagttccagagttctttgctgaaatatcttctttgagcattcttgacatttcggacaattcttttgaagggcagtttccaacaaaaatcttccacctaaaaagtttgagaacgcttgatttgtctatgaacacagatctttctattaacctaccagaattcctagatggaaataatctagaaacgttatctctaacatggacaaatttaccttatcatacaccgtcctcatttgccaatctcaagtctctgaagagtttggctattagcacaacaggaacctccaaggagcttcttccctctctaataggtgagcttccttcattgaaagaactggaaatgtggggatcggaatggagcatggagaaaccggtattgtcttgggtaggcaaccttaagcaactgacagatttgactcttggctcgtatgacttttctcagtcaacaccctcctggataggcaatttgacgagtttggcaactttggagatgtggggctgcaatttgtctacatctatacctcatcagattggtaatctcgcaaatttgacaagcttgaggttcgaggattgcgacttctttgggcagaaaataccgtcgtggatcggcaactttacaaagttgagggatttacggatagacaactgtggcttatctgggccgataccctcgacaatagggaatctgacccaactcgaatatttgattatcaggtctaatgaccagctgaacggtaagacaataccacgactgcttttcttacttgattcatatatggaatttcagttaaatacatccataaaataactcacaaatatatctctccacatattatcgtatataaatatcttacattatggctatatacatccactcgtaaatatagagatcggatttttatacattatcttaaaaatttatatcttatattagtgatatacatacatgagtcctgtttacgtgccatatctcctagaggctagagggccttaaacgcagtacgtaaatgataggacatgcgacttctacaccaggtatatatagattgcaagcatatataaaatacaaaaccttatattttgctatgctggcattatttttatacttcctctgtttcacaatataagtcattctagcatttcccacattcatattgatgtgaatgaatttagacatatatatctatctagattcatttacatcaatataaatatgggaaatgctagaacgacttacattatgaaacggagggagtacaaaattatcgctccaatgctgatatcacaccttccatctacagtaaattgatggtgtctattttcgcacttctgaacaaatttcaatctatcatgtgcgtgctgacttatggtctcttggagctaaaacaacatcttttcgactagtattatacccttgcatgcaggaaaaattccacaatcgttgttcactcttgctggattgaaacacattgaccttagtgcaaatcaactttttttgttctctggaagacattgcttcccccttcaacttcacctttgcaggtagagatggcaatgggccccgttcaccgttttcccgcggtgaatttacctattaggtgacggggatggttcatatatatccaccatagtgaatgaaatggttaatatgtattcaccatcggggatgacgggggcggggacggtgcaccattccctgtccccacccccgtggtgacccgacttcactgtatagaggactgattttagactttttagatattttggcccatagtattgaagcccaactaacaggggtatataaagccaaaccctagtcaacatccaatccctccaatccagatcgagaaaaaccacgccgtcggctcctacggctctccgctgcagcctgcagccacgggcgcgctggcccgccgctgtctcaccccttccgtcgggcgtcgacgcgccgcgcgccgccacctcctctcgcgagcgccgccgctgtcttgctccctctgtcgcgcgtcgacgcgccggccccgccggcgtcgcgctgcccggcgcttgcgtccgtcgacggctcgacgcgggcgtggcgccagcagccgcactcgcgcggccgggagctgtcatcgccgggagcacgccatccgccgggagccgccatcaccgggatcacgccatccgccgggagccgccatcaccgggagccgcaacgatgcaaggtgaggaataatagttgatccatgactattattccacggggacggggtcaccacggggaaaaaatcaccgcacggtgatcggggctggtgaaaatataccaccgtagtggttgacgggggtgggacggtgaaattttttcacggcggtgacggggacgcggatgtgacccccgaggtgaattcatcattgccatctctatttgcagggtatcctgttaaattatagtcaactgacagacccgagaaccaaatcatttttccagcttacatatcgtaactatcccagccttaagtcaaataagttgacagccacaatgcaacttagctctatctggaggatcaagagtatctcttacctaagactgtcaaataaattgatatcactcatggatgataaaggtgaaagggtcacatctcttcctaacatcaactacttgtgccttgcatcttgcagccttacaaaattccatgcattaaggtatcttgatgcaattttggaacttgaccttgagagtaaccaaaacactcgaaacgctcgaaataatggactcgtatagtactcctggttggactgttgacatggaaaaaaaaactgtcatcacgccccatttgataaaaaaggatacccacgagtaatcccatttagtcaattcacaagttgctgcattaaatcacacccactcgtcaagtttgtgtactaatgatgcaatttactctaagattcattttagggttaattggatccatgccgctgcaaatatgccaattcgaaaaaatgccactactattcagtatatcggctacgtgccactggaatttggggaaattggaaccatgccactcccatccagttttttttgttaacctccgtcatctctctccctcttcctttcttcgcttctccgccatggatgccggcgagccctccacctcggactcgctggtccttgccactgtagctagccagcgatcccccctctccatctctcgctgctcctccgccagcagccgctgcgacccatctgttcctcgttgtccccgccggcggacgcggcaccctcgccgccggggagcttctctaccatggacgccggcgagcctaggagggcaacggctgaggggaatcggcggccggggaaccgagtgcgaagcgcggtgggacgagcggcacggaggaaggagatggaagcgagcgtgttagggacgacgaccactggtggagaagtgctttttagtcccggttcgtaacccccctatagttccggttttcaaaccgggactaccaatccgggactaaagatcgctatctttagtcccgggtgaaaaaaccgggactaaagatcgatctttagtcccggttgatgacaccaaccgggactagtcccggttggtgtcatcaaccgggactaaagagagggtagcggcagtccatcagctagtccttttttcttttttattttctcccgaatcgagtggtatgcatatcatcaaatcaaaccccaaatccacatcacaactccacagcacgattcacagattcaccacaaattcattcacaatatccattcacatattcattcacaacatcacaaatatattcacaatattgattcaaaggttcattgacaacatcgagtcacatact

SEQ ID NO: 10476 - DNA, 2373 bp, Oryza sativa
agcttatacctgatggtacaattgaaaagtacaaggcaagacttgcggccaagggttatacccaaaaggaaggcgaggacttcttcgacacatactcaccagttgctcgcttgaccacgattcgagtactacttgctctggcagcctctcatggtcttctcgtctatcagatggacgttaagacagctttcctaaacggagagctagaggaggagatctatatggatcaactagacgggtatgtactagaaggtcaggagggaatggtgtgtaaattgttgaaatccttgtatggcctcaagcaagcacctaacaatggcatgagaagtttgacaccacgcttacatctgcaggctttgttgtgaatgaaactgacaaatgtgtgtactatcgctatggtgggggagaaggagtgatcttgtgcctatatgtcgatgacatattgatctttgggaccagccttaatgtgattgaggaggtcaaggactatctgtccaagagttttgaaataaaggatttgggagaggctgatgttattcttaacatcaaactacaaataggagatgagggtgggattacacttgtgcaatcccactatgtggacaaggttttgagtcgctttggatatagtgactgcaagccagctctactccttatgatcccagcgtgctattaaggaaaaaccgaagaatagcaagggatcaactgagatactctcaaatcattggttcattgatgtacttggctagtgcaacgaggcctgacatttcatttgctgtaagcaagctgagccggtttgtctcaaatccgggacatgatcattggcaggctctggaaagagtaatgcgctatctaaagggcactatgagctatggaattcactataccgggtatccaaaagtactagaagggtatagtgactcaaactggatatctgatgctgatgagataaaagccacaagtggatatgtgttcacacttggaggtggcgctgtttcctggaagtcttgcaagcagaccatcttaacgaggtcaacaatggaagcagaacttacagcactagatactgcgacagttgaggccgagtggcttcatgaacttctgatggatttgccggtggttgaaaaatcagtgccagctatcctaatgaactgtgataatcaaacagtgattattaaagtgaacagttcaaaggacaacacgaagtcatctaggcacatcaagagaagactgaaatctggtagaaagcagaaaaactccggagtgatagcattggactatgtccaaacggctagaaatctggcagatcagtttaccaagggactaccacgtaatgtgatagacaatgcatcgagggaaatgggcttgatacccacctaaggttgcacaatagtggaaacctgtccattgtgatcggagatcccgtgaatttggatggcgaaacaaactattgtgtgactgagagaagagacccttgaaaagggctcatttccatgatgtgcttctcttctttcctgcatggtaggatggctcatgccttaatgtgttccgagtggcttctccaagcagagatgttgacctgcagaacatctcagaaggaacacacctatatgagttcgactgctagtcacagtctacgaggtttgggcgatctctagatactcatgaaaggcctggagtttgacttatatgctccaaacagaggggatgcgaatggcagcccagtaccagtcaaggttctaagtgaaacctgatcacacaaaactgacaattcaaggcatagtccattgttcagttgtggtctgatgtagctcatttcctaggtggaagttcaacttaacagtctccaccaaaaccctggtatatcaaacaggcacaacattgagaacatttcttatgagccttgaaatttggtggggattgttagaataattgggctaggcccaacttatcctattaaatctcaaaggcccataataagtgttaaggataataataccacatcaggatttaagcgaggaatatctcaacctaaatagggagttattggaggccccctgttgattggttgaggtgggggtcggaatgccacacgcgcgcgcgcgccgggccgggccgtgggcgaggcgtggcgtggctggctggcggcggcgtgcgtgcgtcacgtcgctattcttttgcagccactaaccacttcccacgactctcttcgcaacagcgcgtccacgttcccacgactgcctctctctcctgatagataaagaggccgcgagtccgatcggttcccgacgcttgcttctttctcggtgttagttcctcctcctccgcgccagtgcctgtatcggtttctcgcttttgatctcttgcgcgcac

SEQ ID NO: 10477 - DNA, 3529 bp, Oryza sativa
ctcccttgagtatctcaacctgggtggaaatgactttaatgagtccgaaataccatccgccgggttcgagcggcttagtaagctcacccatcttaatctctcctcgtctaatttcgcaggtcaggtgcctgtacaaagtattggccaactccatagtttggtctctcttgatatctcatttagttctgaccttattgagctattcgaccacggttatctcattaacccatggcaaatggacttaccaaacttgacagccttagttgcaaatcttagcaggttggaggagctacgtcttggccacttggacatatcctccaactgaggacttgagtggtgcaacgctctagtcaagtataccacaaatcttcgtgttcttagcttgccattttgtgtgctctctagccccatttgcgggtcgctctatagcttacgctcactaaatgtgattgacctacaatataattatttgactggtccaattccagagtactttgccaacttatcctccttgagcgttctccaactgggttataacaagcttgaaggatgggtctcgccttcaatatttcagaacaagaaactagtgactattgatcttcatagaaatcctgacttatctggtactctgccgaatatctctgctgacagtagtttggagagtttacttgttggtcggaccaacttctctggtagaataccaagttccattagcaacatcaaatctttgaagaagctggaccttggtgcaagtggcttttctggaaagctgccctcatctattggtaagcttaaatctttgagtttattgcaagtctctgggttggaactaataggattgttccccccatggaccacaaacttaacctccttggaggtccttgagttttcccagtgtggcttatccggaccaataccttcttcaatcggagatatgaaaaaaatgagaaaattagcactctatggttgcaactttgtaggggaaatacctcgacatatctttaatttaacacaactggataccatccttcttcattcaaataatttcattggcacagtcaaactctcttcactttggacactacgagacctatctgttttaaacctctcagacaacaacttaactgtaatagatggagaaaacaattcttcactgatatccttgcccaacatagatcacttgagtttggcatcatgtaacataactagatttccaaacattttgaggcatctaaataataatataatgagcggtgttgatctttcacataaccaaatccaaggggccatacccaattgggcatgggagaaatggacagattttgaattttcctttttgaacttatcacataataaatttactagtgttggctacaactcctttcttcctatttgtatagtgaggttggatctcagttttaacatgtttgaagggacaatacctctaccccagaactctagattcgtgcttgattactcaaacaaccgtttctcatccataccaacaaatatttcaactcaacttggatatactgcctatttcaaggcgtcaagaaacaacctctccggagaaattccatcatcattttgtagtaacaatatacaggttctagatctctcttataatttttttagtggctcaatcccttcttgcctatttgaggatgccaatgcgttaaaagttctaaatctgaaacaaaatcaacttcatggagagctagcacacaatatcaatgaaagttgcacattagaggctctagatttcaatgacaataggattgaaggaaatttgcctagatctttagtttcttgccgaaaattggaggtccttgatatccaaaacaaccaaatcaacgattcttttccatgttggatgagagtaattcctagactccaagtccttatcctaaaatccaacaaggtctttgggcaagtgacacctacagttgccgaggaaagcacttgtgaatttcctagtctacggatcctagatctggcctccaataatttttcaggcacactgagtgaggcatggtttatgagacttaagtcgatgatgattgaatctactaatgaaacattagttatggagtttggaggtgatcaacaagtctaccaagttaacattgtgctcacatacaaagggtctgccatcgcaattagtaagatactaaggacctttgtattcattgatgtctcgaataacgcattccatggaagcatccctgaatctattggagagctagttctgctacacgcgctcaacatgtcacacaactcactgacggggccggttccatctccactcggtcatctaaaccaaatggaggctttggatctgtcctcaaacgagctttcaggagtgatcccacaagagctagcatccttggacttcctcggaacgctaaacctatcctacaacatgctggaggggaaaataccagaatcacctcatttctcgttattctccaatagttcatttcttgggaacgatgctttgtgcggccctccgctatctaaaggctgcaacaacatgacattgctgaatgtgataccttcccagaagaaatctgtagacgttatgttgttcctcttttctggaataggattcggccttggatttgccattgcaattgtaatagcatggggatttcccattagaagacggtctccggcgaggcagagagccctctgaatcatgtattgaactgacctttttctgtatcaaaggttgtaaacttgtaaccagggccatgtcattgttgccacaatctactacgtatttgaactcttccgtctggatcaaatcaactatatcgtatacagagttacattacatactactagtagcaattttgctgaagtcgctcggattgatttgctggtcaagcaaagctgaaatctagctgcagcagcttagctcccacgagacagcttagccggcgccgatgaggccgctggtgtgctcccaccacgcgccgtcgctgctgcggaagccctcctgaagtccaggtagaggttgtctgaaatcatacaatgttatatactgctttggtaactataatagcactggataattggatatgtacaaaactggctcaatgaagattgccagactgcctaatgcacgttttcctggaggaatatgattagagtaaatccagaaagacaagactttgaatataagatatttttagagagaagtgtagaagtaattgtgaacatagtatcagtattgtcagatacgttcagtatagcaaagacaaaactagcaacgatcaacatctagctgcttcagatagagcaggatcagtttagcacaactatctggaagcatgcattagcaatttcagctgaaaaatcttaggtttccgagtcaaagaagtactccatccacaaatataagcacttttaaaacaatgctaagtcaaacattttacactttgactgtcaatagctgtagcgcccgttccgtcgtggcgcctagcgggaaaattatctcttaaaaaccctaattgcgaaatttgtt

SEQ ID NO: 10478 - DNA, 44253 bp, Oryza sativa
  unsure (1)..(44253): unsure at all n locations
atctccggccgtgaggccaaagaaaaccaaagctaaaccgtcatcggccaggactccaaatccttggcagttacgagtaatctggatgaagtctatatattgctggtcatgcctgtgcatcgattatgcaatacggcgcctcaggtgtttaactccatcgcaggtatatatccattgtcgattctttagccgccggaattaggacgcttcttgatcatcctgtactttttcatcaggaaccatctcgagatggccagggaagacggagcatccaggggtgcaggcgagcgtggcgccagcgaccggggcggcggagagcgtgtcccgcgagacgggcggagaacgggggacaggcgagtaacatgggacaggcgctcggcaggagatagacacactgtcgaagataagcgcccgggaggatccggcggcaagcaacagaaggaggccaagggtgacaacccttcccagcatatcgcgaagatcccggtccgtagagatgatcgaggaggatacaaacgccacggcgagtcaatcgaattcctgcgtgactggcgtcataagaaggagagaactgctcgtcctgacaaaccttcattgccgaaatcttctaaaaagggtctgcgtattgaagaatctccacatcccgagctggaccgcaccatgcgtgagaagcgaggaaaaaccccggtagtttacaagagggtgtcgtccacggaatcttcaagcgatgatcgtcgccgctgccgccgctctgtggttgccgacacggagcttgatgctgtccagttgagcgactcctcctcttcttcttcttctgatggcactggcaaggtattcgtgtttccccaattcttttttttcttaaaattctatgtcatagtggtttgataacctgtttctttaggacatacttgcaactcaggatacgatagagcaggcaaatgctttgggtgggacctaaagctactgcctcttccgatgttgctccggtacctattgacgatgtaccttcagttgtgccggctgctaatgctcctgtccgctcttctccggtgatgccggcggctgatgccgcttcagctccgggaccctcgactcaaaagcatcaggaaggtaaggatgactagactcctaatagaggtcatattctcctttgctttctcttgatgtattttcttctttctttggttcttctgagaaaagtgtactatacccattgtagaaacttcaagcaatcctttcggcacggctcgccagatgaacgagttgatggagaagacgtcccgttaccttgctgagttcgggacgggtggtcgctatctccaacttaactctgtgagttccgcgactgacgaattgccgacgctggagcttccaaagtccacgcccactgaacgccggaacgcccgcatggtggaggaggatctatttagcatccaagattgtttgatggagaaacctctgaacaaggaaggcaccatagagtacattggtgctgccaccgctgcatgggaaaatagttacgagattggacgccccacagacttggagaagttgatgtcttacttgggagcacttgtccaacgtcttaagggagagctcccggtaacctttgaagggagaactttagctgctcatgaaggcgaggcgcgctcttccttagcaaagctagagagtgcatgttcagacgtgctaccagaccttgacctcctcaagagtggccatgaagacgtggctgcggaccttcagaagtccaagcaagcaggggctacctggaagaaagaggcggaggaacatgagctgaaagccaaagatgcgagggagaaggagcaccagtgtttggaatcagaggaggcagccgccaagaacctgcaagtttatgatagtaccatcgacggcgtcatgcagctgataaagcgtcgtgacgaggcgaaggtctatttggggcatcttgctgaagagaggaaactccttgcagtggccgcgccgccagaggtggccgccattctatcatatcgtagagaatcggcgcctcggggtagtacgtcgaagaattagaatagcctccatatgcttctccttggtttaccttaattaggattttttttcgagtcatgtaaagcacattagaagcgctcttaacttagatgatcagctagctagttttcaatctttgaataaagttggggcattatcatgcacccattaattaggagtacttgttttattatttgagtctgtcatattgtcttcatcgatatatatggagtgcttgtgttttgtcctctttgtttttttttttcaacttgctaatatgtattatcccttctgtatccgaatactcggcactgcgcgcatgcggccaccgtcgcatatagaacccgccgaagatcctgccgggacccgagagctgatatatgggaatatatggctgtaatctataagtgcatgaatacatatgaacttctgttgattatcacggcggcaacatattgagccaaggccagccagcagtttgcattgttaagttaattcctttttaacaaacccatcttgtggcaatgtggccgagcaatcagagggcgacacatcatcaccatgctacagtgtcatgcacaaattctgtactcacgcagctgcatgcatgatctcttccatcaatttctggtttgccttctgtacaagttgcttcatataatacatcaacccatgtggggtagtagcaccgttcagaaaatctggcgctttgaggataggtgaagaataaaaataacttcaggcataaactgtcctcctgaagtcttgaggcgaagacctatgccttcaaataataattaaaggaattttgtcgggaccaagtataggtgccagccaacaaaataacttgaattcgtctcctactcgcagcgaaaaagacccatgccacaattgagacattttatcagaccgattgagaccgttgatatatcacggtgcctgcctcatcagcatgaagggtttcacggcttggcgctgaccgcgttggcacgccgccccgctcccaagaaaaacatcttatcaatccggacgcgaccacttgactgttgtggtgccgacccgtcaggttgaaaggtgtatagcccgatggcgacttcagagtgttatgttgcctctaaatgacgtgaagcgaaaaccctgcatcacgaaaaggaaaacgaaagaggaaaaaaaaactagagtacggttactagagccgagcaaaccaggtgagttgatagaaagaaacccagcaataaaatgattttgttgatttttcttttaaaatgttggctttcccactgaacactggctatgtggtagcgtcaagataagattgccgaagaacgtgtcgcgggaatcgccgaatgaccatgacgattgctccctgtcaacctaacttcctggtgtgcttgtgtataggagtagcatacatggtgatactttcagaaggcagcgaaaatccatgctctagcctttcagttcactaggtaccaccacgagtcccatgcccccggtattgtgcttcatcgaaccgagagaattaggtatggctgaattaagatagggttataggggaacggctgtgagagtggccttttccttttgccgaggatggtgaatggctatcctcctccttctgacagaatgcaatggagatcactaattgtttggatctttttgtttctttttttttttgcttcgcggcttcatgacaccacggcttcattgagattgatattggattgttttcttgagttgagatcatcacgactttgttgagattgatctgagatcttggcatccttaaaacttggaggacaaccattcccctttgtgggctatgtaatcctcgcaggcccatttcttttgtaaagtcccttgttgacatgcctcacagggatggcaagtggctgcacactgaaccacaacttgtgttgaggtaggtagccctttcttactcttctcctatagtcttccctggggcttagtatctccataggtctgaagcacaccgaaggacacgaaggcgtggggaccttgttactaggaagtaacccaatcaagtctttttgctattcctcggaaatatgcacccgtagtacttgtgtgttggtgtgaaggatgtttagttgtaagcacagtctgtcatggtcatccattgaatcctgcagaggtgttctaaggttgccttgtcttcttctaccagctcaatgcaatatggtgaaagccattttgatttttttttgttggacgtggcgtccattttgtaaaacaaaacatggagcaccaaacaatgcaatggtcaatgcacgttggcaagctcacaatgttgttttttttaaagaaaacaagaaaacaagaggcacagggttttatacaaaatatttttttaagaacctcccgttgattggcggcatcggttgtgatccttgatgatcaatcagctggtaagcacctccgtcatatgcttgctcgatgacgtatggcccctcccattttggctcgaactttcccttcatcttgtgtgtaacgacgatgggacgtcgcagaacgagtacgagctcgcccttcctgaagactcgttgcttgacgagcttatcataggctctcaccatgttttggcgatacaactccagattttgaagggcgcctaggcgctcttcctccacggcatcaagctcctgaaatcgaaggcgaatctgttcgtctttagtaagttcatcgtggattgctactcgtagagatggtagctgaatctccaatggcaacacagcttcattcccatagacgagagagtatggggtagcttgtgtcggggtacgaactgtgactcggtacgcccatagtgcttcataaagacgatcatgccaatcccttcgatgcttgtctaccgtcttctttaagatcttgccgagggtcttgttgaaggcttcggccatcccatttgcttgagggtaataaccggtggagtagttccatttgatcttgtatttctccatgaacctatagatcttctgggatttaaaggctttggcgttgtcggaggtaatgcgatgtggtaccccgaagcggtagatgatgtgccgttcgaggaagttgatgacgtcactgctcttcacttcacgcagaggcacagcttccgcccacttggagaagtagtctgttgcagtgaggatgaagcgatgcccccttgaagaaggtggattgatgaggccgatgacgtcgattccccaggcatcgaacggccaagaagggaccgtcgggtgaagcggagccggcggttggtgcttgaaattgtcatggatctggcaaccatgacaggttttagctgtctttaggcaatccgccataatgcctggccaatagtaccctaccagtcggatgctatggtacatttttggtccgctttgatgcccaccgcatactccatggtggacttcttggagaactcgattggcttcactccgatcaacgcatcgaagtaagacctcttgcccgtaagaccgcttgtagaggacaccggccttgtagatgtatgagggaagtcgtcgctgtagttggcgtctctcgacaggatcttcaggtagagagccgtgcttgaagtaatcgaggaagggttgacgccagtcttcctcttcagcagaattagttatgatgatgttgacttcttcggggatgagctctaggacagctggaagaagccacctttcttcaacaacaatttgcgcaggattgtctccttgaaagaccaatgctgcagccagttttgccagggcgtcagcaggcgcatttttgcttcgtggcacatggatgacctcgatgtgttcaaacttgtccataagcctccgggccactgtgtaatatggcaccagttctggtttacgaacctcataaatattgttgatttgtctaataatgagccgagaatccccatgggctcttaaggaacgtacctccatagagagcgccaagagaagaccaaagataagagcctcatattccgcctcattgttagaacactcctccttgagaagagagaacgagtggtagatcacacctccttgtggagttttgaacaccaatcccgccccggctctccgtcgaggggtgccgtcggggttgatgtccttacgtgaggctccgtcgaagtaaagctcccactgttcctgaagctctgcggtgaaaatctcttcatccggtagattggcgatgagtggggagtcatctggcattggatgtgtagcaagaaattctgccaaggcttggcccttaattgctttttgcggtacaaaagtgatatcatattccatcatgagcagggcccatttacctagtcgcccggtgagcacaggctgacttagcacataccttatagggtccgcccttgcaatgagctggatctggtgcgccaacatgtagtgccttagtttcttcaatgcaaatatgagggctaaacataacttctcaattggggagtaattttgttcagcaccaaccatggtgcgacttaaatagtagcaagccacctccttcccttcatcattatgttgagcgaggagagcgcctatcgaggcaggctgcgttgcaatgtagagaataagggggcgccctttaacaggagctgccagtacaggaggattaagcaagtacctcttgatactatcgaagccattttggcattcttcatcccacacaaagggtgtgcccttcttcatgagttttgagaagggttggatccggcccgagaggttggagatgaagcgtcggatgtacgccagcttcccttgtagtttcctcagatccttgagttcttgagggggcggcatattaagtatcgccttgatcttttttggctcgatctcgatccctcgatgacggatgacgaagccgaggaagacaccggattggacgccaaaggcgcacttgagagggttcatcttaagttggtgtcgacgtagtcgctcgaagacaatgcgaaggtcttcttgatgatgttcgtgatctttggtcttgaccaccatgtcatcaacataacattccactgaatgatgaattaaatcgtcgaggacgaactgcatggcacgctggtatgtggcaccggcgttcttcaacccgaacggcatgacagtgtagtagaagttccctttaggggttctaaacgccgtgtcgaaggcatcaaggagatccatcttgatctggttataacctgacagtgcgccataacccgttgttgaatcgaccaccatctccgtgattggtaggggaaagtcgtctttaggacaagcacgattcaagtcgcgaaagtctacgcagactcgaacttgtccattcttcttttccacagggacgatgttggctaaccaccgaggatattgtatctccttgataaaacccacgttgatgagtcgatcgacttcggcgatgacttggtcttggaactctggccttaagcgccttggtggttgcttcactgggcgaaattggggatcaatcgccagcttatgggtggcgacacgagagtcaagtcccggcatctccttgtatgtccaagcgaagcaatctcggaattccatcaagaagcttcgatagtcttctcgctcttcttctgtcagcatgccactaacgaaaatagggcgcggatcatcctcagttcctaaattcatctccaccaactcgtcaatggttggttggccaccgtcgtcaagttgtttaagagcccctgcaacatcgagctcctcttctactccaacagctgcaacctcaaaggggtgttgttggagtaaagcatcacctcttgtagtggtacttatggtgcaacaatgaaatatatcgtcttcaaatacttcatcttcatcatcgggttcatctacgttgatgtagccgagaccgtactttggttgttctttacatctcctcttgataaactcttccgcttgtgcccaccagtcctcgcatactgctggaggtggtggcaacctgttgtttcgctgtagattgatgcccgccttctccaataggcgagccattctaggctcagccttcatggtcgtgcacgcttcttctctagcggggtagaaactgaagtgtagagggctgggggctgcatgcactgagcacccgcttttacctcctctatctctgcaactctcttcttgaccactccctgttgtgcaagcgcggcttccttgcttggactccgtcttgcctgtaaggtgatggtagttggcacatcgccgttgcttttgggcggtttctcgcttcctcgagaagttgcccccaaggtgatcagtgttgaggtagagcgtcttgctttgagcaatattggtgtagtagatggggtagacgtgctggtttcagcgggagatgggagcttggtgctgaggttggttgctgaagaagaatttccccgcctactattcttgtgattccttgacgatgattcgctaatgattggggagcatggcataatgaggcatctcacctcaggggttgtctcggtgccgggttcaacaatgatgtcggctgctggtgttgttcgcccaagttgttgcttgttttcttcaacagggaagtaatacttggcgtcggcatggtatgattcttgaatagtgtatggtgagaaattgctagtgatgcgctgttgcactccattgccgtcaaggaattttaggcattgatggagagtagacggcacgacacggtacttgtgaatccacggtcgtcccaagagagcagagtatgatgtgttggcttcaataacaaagaaccgcaccttgaagctgaatgtagacatttggatcttgatagtaatggcgcctaatgttggcttgccctgattgtcaaagccgcaaatcaccacgtctattggctccaagtcttttgttgtgaaacctgctcgagttagacttcgaacgggtagaatgttcacagcagatcctaggtcaatgagaatccgtcgaagatgagcagaaccaatgtttccttcaatgtagaggggacgattgtgatcgccccctttgatgatgttatcttcatcagcgaaggtaatctcattcacgaacaaggggttgtcgtagagtcgatgcttagccatatcaacttcgtaaacttccggagcctgcaacgcctttataagagcttcgcgcagatcaggcaccatcataagagcatcatagacactcaatagtgctgggatccgtttgagatgcgcaagaactttgtagtcgacagcaggcttctctttgcttccagtttttgtttctggagcttctggagcttctccaggaggagaggccttcttggcaggcttgtctacatttggaactttggacttgtgtggatccggcaaggtcttcccccctcgcaggcttatgttgacctcttctaccttcgtcttctctggatccaactcagcatggaatatttctcgctcccttcccgtaaacgtttcatcggaaccggtactcgtggagtcattataggtgaggatgacattgcatggagcaatgtctggagtcgggatagaattgttcacccccttagcctcccttgtgcttgttgaggactgctcccaacccttgggcagaaattgcgccaaagtaggtagctcacgaccccggcggggaaaagactcgtctccctctgagaaggggacaaatcgaggtggaggacgtcgccgacttggatctagccatcttcttgaagtcgggtgagtatgcggtgacaacttcatttgtgggcgacggggtggaaagctcattggttgaggcttccatcgcacaatactccatgctcggttgttgtcgccatggctagcctccacatgagtggcgggtgctttcgtcagcattatctttgcaatttgatcttcaacttgggccagcggcgcccatgatgttgcacgcctaccttctctttgtttttgagggaaaggctcaacggacaccatattgacggcatggtagtctgggttgatggcgtctgcatcaagattgattcttttctcgttgactgccctttggagccattctttgaaggcgatgcaatcttcaatagcatggccgatatacctatgatacggacaatataatggattgtcagtcatggttacctggtcaggtcttcgtggttcaggcagattcaaggcacggtgttccatcaactggttgaacatatctttcaccaactcccggcggaagatgtattgcttcttgagaagatcttgaagcgtggagcgttgcctgcccccaacttgctcattctttgctccaatcatgggcacctgtccttgaggtgcggtggagaagacttttgtggaattagcttcggttggaactttgggtttgttcccactaccactaggctttgttgcgttaaagcgtttggtagggtcaaaggcgcttgcattcttgtaaagctccattatctggggtgacttctcaaactcgagcttggttgctgccacggcggaactgagtgcgctaaatgtttttggttcacgtcgggacacttcaagagaccaatgctgttgcattccatgaacgcacatctcgattgcgtcttcaagatgcatctcccttgcgagacacacgaagctattccggaagcggatgacatagtcgtcaatggcttcatctctccattgtcgaacttgtgatagttcaacaatagagaaatctttcttcatagcaacaaagtgcttcttgaatacttccttcatggttgcccagtttccaatggatggattctcaccacgtggagcgtgttgtctagcatgttgcctaggatcgccttctgctgtcacatgggcaggtgcactatcaaagttattaggataaccctctccgtctgaaggtagagatgggttgagttcattatagcgagggagattgagattcacttccagcgatgacgatgaggtagactctaactcgtcaagatcttcaacttcaacatgatcctccaggtcttttcttgcttgagaaggagttgcctcaacattcttgatagcgatagccttcatgcgagtgttagcaccaggtcgactcgcaacctatagtagcccgctttggtcatggggtaggcgtgtcgtaatgtcgacgtagcgacgaggggagacatctgaccggagtgctttgcccctatcagataacgatccttctcctgtaccgataggaagacaaggggctgaagctctagttgcttcttgagaggaagatgtgcttcgtcttgaaccctccgagctgaattgtgggtggacttgatccaactgagggaggaacgtcttggaaaaatttgcccttggatttggcacgatctcttcatcagaagggtaggtgaagtcgtgagtaaccggcgggggaacccatgcggcattgggcttggtttcgtaatgcgcggctagtgcgctgcacatgacaatgctttcctttggatcttctatgttcttgcttcccgccacctgttcaactctggctggaggcacagaggatgattcctgctgaggtagaacatcaaccatagggttaatgatagcttcttcttgtcgagacgccttgtcgacttgctctactggtgtctgctcgactccctccattggagtagattggttctccttggactgtcttgctgatgttgatagcgatatgcctaaggtagcttgaactggccccttccctcgctgcaggatggttacggggcaaggttgagttaacgcctgctccctattcttgtcagcaacgtctagtgttctccggggtttcggagttaaacgagctataaggtagttatacctcgcatccctctccaaactgggggagatacggaacacgatcctttcatcttcttgatgcacttctccatctggacgaacacgaacttgagtgtgttttagcaccaggtcttcaagctctctatagagagcgtagcggttgttacgacgtcgctctcgcttgcgttgattctcagtaggtgcatgctgacgtcttggtggaattgacggcgtcgggagaagaggtggtgccacctgccgtgtagctgggttaggtgcgttggtttcacgtcgcctttgtgtatagacctctcgtcttggagaagatggaacatgaggcggcacttgagaagatggagcttctcgaactcgccattcttgagcgagacgtgaagatgtgggataatcttggtgtcttgaccaccggttccagcgtggaggcaacgctgtttgtctctggtgcatcacttgagttgatggaagcgtacgtcgaggagccagcgtgcggcgatcatgttgaggatgataacttggctggtatcgtcttgatctgcccccagcttgtgttgatgatgatcgtggtgcttcatgatcctggagtcgtcttccaagttgggccattcggtcttgcagctcacgaagttcttgtcgcaagtcctcacttcgaggagcgggtgcctcagaccgtaggacggcgaacctgttgttgttgtagtcagacgaccctcctaccgcagacaggtggaggcatgactcccacgtgctctgctggcgaggggtgtacgtattgtagtcgacgaagatagttgagcctggaaggacgaggtgctccctatcacgccgcttccaatactctttcatgatggcgcacctgactttctcctttatcttagttggctcacatgcccattcgtcagggaacaagtcgtaaggtggctctagaatgcttgggaacttgaacaccttcttgatgaggacagatgtgtcaagagaccagtcttcctctaggagggagctctgggcgatgcgcgagctaacgagttggtgtagacgctgcaccttgcgatacttcctcctgtagttgcgcaggggatgaggactgtttgcccgtcgagtatgcgaaatgtgtcgacgaaggttgtcggagacagcttctagagcctcaagcagctccacctctgtgtgttgcacagttggggtaggcagctttggagtagcgactggatcaggggcacgcagggatgcagtaattgaacgcctgttggaagctttgacgcgcagtttctgtgcagcttggatgtctcccttaatctcagctacaacggactccttcaagagggtccgggcttcaagcatgagggttcgccgctccttctttgccttggcagaagcacgcttgcgttgcttcttagactgggcctcctggaattgggtcacatcttgagcttgttgcatgtagaccttggagccatactcgaagaatgtcaccggtggtagtgatccaaactgaatcacaaagggcggcggggtgttcttgatgatggaaggtcctcctgcaagaaggagccttggtcaggtacactccacgttgaagatcatcatgcagcatgctggtgttggttggatgaacggcgaagacgagcttgacgaccacagcatagcgaagatgggaggagaaccaggtcccactgggcgtgccaatttgtttagggtggaaaataacatctgagatctctatatttagagatacatatgtgcgggcgtgccagtgtacctaaatacacaatgtaaacaaaacataaggaacatgctctttattaatcttaaaagatcataaatacaaattcccaatgtaatatatatgtatttgcgctccattgtcattggacagatctgacttgtgcgatgtggtctcctggttactggggccttgagaagctcccagttaattacctccgcaggtctaggcctacaagagaacctccgattaagctgcttgtggtcgtctcgtcgtcttcgtttcgcgttctccatgcatggttgtgatggtgatgtagatgtgtgtgtgtgtgtgtgagcgccggcagcgatccatagcctcgtcagtccgtgcgccggtgttggtagcgtagccttcgcatcggcttcgcctgccctccgtcgtctagcctcggtcttgaacaacgtgtcgatgtagattgttggtgaagacatgcatggagttgcatagcttgaacgacccgacgtcacagcagttgcgtcgagattcgattagagaagaatcaggaagaaattattgaagatggttgacgtagacggcaaccggatttaatcaaagctcggcatctcatttgggacaaataagaaaaaccaacaggacttcttcagcccacgcattggtttgtgcatggcactgtagcagcgatgacatgtcgtcctccaattggttggccatgttgccacaataattaacttaatcaacatgcattagccagcttgttgccatccaacagcactggcttgccgtcctcccgccgtccttcctctgtactgcctccatcgtcatccgctggtttcgacgccatgcgtgatgcttgacctccggcatgggaacggatagaagtcttggcagtcggcgacagctccggcgatcctcggcgctctccggcagagcggcttcccgacgacctcctccatggttagcccttcgagtgcggtgaagcttgcaaatcaaggacgtccggtatctcggcgaggtcgcagcttcgggtagatgcatcaccagcggcttgaattaccagcgtcgagtccagggacaagtagcactgcgtcggcttgaacagacgccggcatcgatgaggcttctgtgaggcgtagatgaatcggccaccgcgacttccccggcgacgacgatacgtgcagatggatccccatgcatggatgtgtgcgtgctgtagatgaaagaaaatgaaacaatcttgctagcttttaccttgactagccatcaagctcctctcctgcgcttgctgatgatcggatcaccgcgcgcgccctctcctgccggacgccgggactccggccgaagtcgctcgccgccgccggtgcgtgtcgtcgatggatggatcgccgatgagagttgatggatggatgtgttgatgctggatgggtagatgtgttgatgatgggtggcttgtggatgctagatgcattggtgaatgaatgtgtggatgagttcgtgaatgcccctggctgccgaggggtcgacgccttatatatgggtctgaggtcggtgctggccgcgtccgcgccgtttcctccgcgtcaagttcgttgcagataaggcttgatcgatcagtttgttatagagataaaatcaattggtttgttggttatctcttaattcatctggttttatctcttccgcacgcgtgagcagaagtcgttcagataaattgaaaccccagcttatctctctaatttgatcgataagtaaactcatctagccgataaatcaaaactgcggatatgtataatacgccgcgattgtgtcattcactgatatgggctaagcccaggggcaggcgcattaaatttcttaattaagcccattaatcacctcacccttaatcaaacaccatatatttgtgtactgccatgcatgcatgcatgcatgtacgtagttgcttcaccggccgactgatatagctagcttgctcttgattcagtatacacacgcatatatatactaattgacaagtatagattgggcacagtgtgtatttcaatatttgcatggcgcatgcacacatgaaatggagagctagctggcctcacatatacctaatgttcatggctatcaggttcatcgttctagccgctgcaaaaatgccatcaaacagttatatactaaaataatgaaggtagtattagattaacttatttgagaatggaggaagaatggagggagtatgtggctcacgtaaacaggcaataagcatatgatgttcataagttcttatactaaagattggacattaattagaacaaaacaaagaaattttccgtaaacgacaatatttgctgttgagtcgttttctgtacagtgcaaataatgactgtactggtgggagcatatgactaactgatgaacaacggtcgtgttacgtatgcccatcgtattcacctccagtcacgcctcatattaaccattttgtccaactccctttcttgccaatatacggagtatctttttttttttttctggatccgaatgagacagagaagcagctagcaacatcagcagcgatcgctcataaacccgggttctccccggatgcaggtcatctacggtacagtaccactcactgacatatgatacccacagtccgtccgggatctcaattatattggttcctccctaagtctcacgcagcaatgcaattatatgacaagaatcaatagcgctacatatacatgtgtcaacttgcccatcgttctggcctgctccgttcattgccatttgccaccagaaaccgcgagactctcttcgccgacacgacatggaaattattacttattaaaccgaagccaacatttgctggtgcctggtgctatattaagtaggacaaattatttacggactcaccaaagataaaagagataaagctgaaaagaaactgaaaaaggagaacaatgagaaaacttgacagcctcgcatgtgttttgttgggatattgtcgcaatatctttggcaccgcacataatccacacattggtctcatctatgattttggtcactggtcgagacaattgagtctcctaactgcagatcactcgtttgtttcgttcgcaccaaatggctcgtcgtcatcgtgtgtgtttagtgtctcgtgtcctagctgttgaaagatgttctcccaaacttgtgtacaaaggtgcagtccttgaaaagtgttgtgttcgttttaaggtttttgtggaaaagctgacagaaatagttgttaggtcatttgacagttttgcaggcttgtagccgatctgccgtgtagattttattttgaagcatgagccatgcgaagttttatatatggcaaacttgtgttgctatagccgacatggaaattaattacaggccgcttcgttcccgggccgaaagcccgtattcacttgcgttgcgcttttcgaccgtggaaggccgcgtggacgcgcaaagcggctcgcggacgtgggagaccgactgagcaaggtggtgtattggaccacatcatttcccacctcaaagttaagggacctcaaataaacttaagatgatgtattgaaccacatcattatgtgcgctgcatcgtgtcaactgacgtggcatggctaccgtacagacgatcatgtggttgggcgttctatccctaccaagcgtagtatgtatgccatgtgggcctagtttgcagtaaaaggggtttcgaaaggagttgcggttttgtggtagtttcactctctacttgttgcatctagctgaaataggttgttaaagttatatctagttggtacttcctccagactaataatatttgttattttggctaaggacacaaaataatttaaaccgctattttctattataatatatatatagaaatatcaacaaatatatgattacattgaaatgcttaaaactaatttgttagcaaacaatttatttttctagtcctgtctctttcaaatggatgctacttttgtcgtggtgcacgcatgcatttttattttctttgttgaggctagcaagtagcaaccctatcaataggctttgtgaatgtgccatgctcataactaatcgtattaagaacattcgatatatattctattgaactgtggttgttcgataggtgttaaatttgtgattttagtaagccgatctatacttttacaattttccattaaaatagattatttctaaaataaaaatcaaagatgtattgactattgcggtgttgcaagatcaactggaagaaatggggagatggattctaataactcgagtggacgtccacccgttcattgcatatcaactagatggttaagaacaattttaaaaaaaaattgacaagatagatcaatatgtaatatatcactccacaaacatgtaagtttaaattcaacttctacaagttgtaacaaaaataacaaatttaattgtaaatatacatatagtaatttaagttaagttttatttgctatttaattgtaaggagatagaatctaataactcgagtggatgtccacccgttcattgcatatcaactggatggtccaccctagttcgatacctcctgacctcctgtgcccatgtactgcaaaagcaagacatgcagtacaacatgtgcatatatcacaagttttcaataaattgttacctcaccaaccttcgtcgaatacctatcgaatagcagttgttcgatatgtaccctgtcgaattttggttgtttgatggagtagtatgctactgtgattttagtcagccgacctacatttttgtatttcccatttaaattgtattatttctaacaaaaaaattaaacatccttttgcttccatagatgctatcttttcctctcttccaatgacacttgatagaagtcgttgctgggtcaactcgagactgattggaattggatgcccagttgcccaaattgatccgtgtcgcgctatcctgccgaattttttgcatctaaacacatgcagcccgaaattttcagatgtgagcacgcaaattcaggatttaaatatgtagacatgatgctcacatgtacactggtgtttccatctaactgctattccaacaaactcatgggcctgtgaattgattcaaactatgatcaaggtaaggatgatagatggatgaaccattacgggaggcaaggaaaatagggcaaatttgccgaccgcttgctgccgttagcctcaatttttcttcgacctccatcgcctctctttactaatccaacaaacaatttttcctgagtttagatattgtttttttatgttggaaattagatctgcataggcagctgtgagcatgtgaccggtgagctccaaatctaatccatctgcttagtgtaatatgttcatagtaagcaaaaaaaatattaaacaacttcgattggctgaaaaaaagagacttactccctgcgtcctataaaaaaccaacctagtaccggatgtgacacgtcctaatactacgaatctagacatacatctgtccagatttacagtactaagatatgtcacgtccgatcttcgattttagatttattttttataggaaagagggagtatgcaactggggctgctagtagtgtacgttacggccagaaacaagacagcagaagggcaaaaggcccattatttacatggacatttagttaaatacatcctatttatttcgttgggcatcagctcaaccggatttgacatggtctaacgaacatgctgtttagaaatagaaattcaaacgttacgtgctcacatctggaattttggagctgcatgtgtttagatgcaaaaaattcgggctatcctgtctttagtcttcactactacccatttccctttttgacccagtgatgctccgagcgtacgtgctgggaaccattcaaacttgaagcagtgcgtagttatggcgactgtcaatctaccatgcatgactgcctgatgctagcaagaaaataaaagaacgcgtttcaaggcccttggtcgatcgatcatcgatatataacgatgaggaaggtctcgtgtcactgaaaccacccaagttgcagccaatctcagccaatatgtcctccattattcttactcagacaccatcagtaccacgacgcctactgctcctcctacagctctcgtttctgctcctcctcagctccgccagcaatgctgtcacgccggctggggtgccatgccggccagaccaggcggccgcgttgctccggctgaaacgctcattcgccgtcaccagcaactccgtcaccgccttccggtcatggcgggccggcaccgactgctgcggctgggagggcgttggctgcgccgccggcgccggcgccaacaatggccgcgccgtgacatcccttcatctgggtgactggggcttggagagtgcaggcatcgaccctgcactcttcgagctaacctctctggagtatctaaacctcgcctataacaacttcggtgggtcaaagattccttctgatggatttgagcgtctcatcaggctcacacatctgaatctttccagctctggattcaccggacaggtgccagccagcatcggcaacctgacgagtttggtatcactcgacctttccacttatttcatgatcgtggagatacccgatgatgcttatgagacgcttatatctcaaactgctaattccatatggctcatagagccaaattttgaaacctttatctcaaaactcacaaacttgagggatctccacctcggctatgtggacatgtccaacagtggagcgcagtggtgtgatgctctagccaattcctctcctaatcttcaggttattagcttaccattctgttcaatctctggccctatctgccgctcactttcccttttgcagtctcttgctgcccttaacttgcaacataacaatctgtctggtccaatcccagacttcttgtcaaacttatccaatttgagtgttctccgacttaaccataatgagcttgaaggatgggtttctccggcaatctttggacaaaagaatcttgtcacaattgatctccaccataatcttgggatctctggtattctcccaaatttctcagctgacagtaggctggaggaattgctcgttggccagactaattgctcgggtttaataccaagttccattggaaatctcaaatttttgaagcagctagacctcggtgcgtctggtttttttggagagctgccctcatcaattggtaagctagaatccttgaatgcattggggatatccggagtgggactagaagggccattaccatcatgggttgcaaacttaacctctttgacggctcttgtgttctctgattgtgggttatccggatcgataccttctttcataggagatttgaaggaattgagaacattagcgttgtgtaactgcaaattttccggtgaaataccaccacacatatttaatctactcaaatggaattactcttgctccattttaacaatttcaccggcacaatagagctgacttcattaagtaatctgccacaactttatgcctttgatctctcctataataatctagctgtggtcgatggagaatataactcatcagtttctcttccccaaattgtgctcctatatttaccgggttgcagcatgtctaagttccctattttcttgaggcaccaatatgaaattaatggcctcgacctttccgacaacgaaattaacggtactataccgcattgggcatgggaaacttggaattatatttcccttttgggcctatccggcaatagatttacgagtgtgggatatgaccctcttcttcccttacaagtagatttgcttgatcttagcaataacatgcttgaagggtccattccgattcctcgaggctcttcaacatctctcaaatattcaaacaatgggttctcatccatgccatctaattttagtgctcatcttagagatgttacctttttcatggccgacggaaatgaaatctctggaaatattcctttggagttttgcagtgctaagagtttacaactccttgatctgtcttacaacaacttcaatggatcaatctcttcttgtttaatggacagtgttagcacgctgcaagtattaaatctgaaaggaaatgaacttcatggggtgttgccagacgatatcaaagaaggctgttcatttcaggcattagatattagcggaaatttgatagaggggaaactaccaagatcattagttgcttgcaaaaacttggaggtatttgatgttgggttcaatcaaattagtgacacctttccatgttggatgagtactcttccgagacttcaagtcattgccctcagatctaacaagttcttcggacaggtcgcacaatctgctgtagagaaaaattcttgtgaatttccagctgcaagaattattgatctagcctcaaacaacttctcgggtccattgccacaagatcaatggtttaagaaattgaagtccatgatgatcggatactcgaatacgtcattagtcatggatcatgaagtaccacgagtaggaaggtacaaattcagtactacgatcacatataaagggagcgccgtcacattgaccaagattttgaggacatttgtattcatcgatgtctcagaaaacaaattccatgggagcattccagggaccattggagaacttattctgttacacgcactcaacatgtcacacaacttcttgacaggaccgattccatctcaactcggccatttgaaccagttggaggctttggacatgtcctcaaatgagctttcaggagtaattcctcaggagctagcatccttggacttccttgcaatattgaacctgtcatacaataagctagagggaagaataccaccacagtcacctcatttctctacattctccagcatctcatttctggggaacaagggtttgtgcggccttcctctgtcgacaggatgcagcaacacgacatctctgaatgtgatcccttctgagaagaatcctgtagacatcgtgctattcctttctgctggactgggattcggccttggatttgccattgcaattgtagtagcatggggaattcccattaggaaacggtccacagtaaggcagagagctctctgaattatctcctgaaataatttttttctgtatcaaggtcacttgcagtatatttgtaatcaaggctatgccattgccgtcgcaagctaataatattcgaatcttgcatcatatgcagagtgacatactaaaaattttactcaaagtcaccgggattgattttctgaaatctgacatctagagcaaattaacaatggacgccgattgttgttaaactaaggaaaaagttcattttacatccctcgactaacgttaagtttcatttgcatccctatatatatataagtggagctaaaataaggacattggggtcactcttttcacgtatcatggtgcaaatgtctaaaataagtgctttataaattagttagaatattttggtagtgtaattagcgaaattcgaggcgcggacacgcggtcgaggacgtgaatgaaactccaatattagttgagggacattaattattattgaattccatatcagccaaaaataattcaatgagagggagagggagagataagtgagaagtagggataggataaagataagagagagaggagataaataatcctaagcagctctctttttttttctcccatgcggctggctcggctcgcagtgatatgtgccggtgctaatgatgtagatactggtttttatttaaaaccggtaactatatgtgtttaaaggcgtcagttttttttttacccaatggagatgggaaatggtcaataaaagcatgttttaaatgaattggcacccatgaaccggcttctattagggattccgtagtaatgctctttcggtttctttcagattaagcatttcttccaattgatcgggcaacaccgcaacaagcaaagcatcctttccagatgctctctttctggcgtggccaattcaagaagctacaccggttgcacacgcgcacatgtgccatctcattctctcacaaagcttcttaaaactcgtgttgtagttagctacaaatctatcacgtacttttcttctttctcttttagttcgacataaatctgaggcgccaactaggtgcgctctcttccaaaacatttgaagttttttttaaggtaaaagagtagccatctttcggcctcattgtttgtttatttgaggaataaggcaaacgacatatttataaacgaaaataatctgtgaataaaatttttatatacgtgtttttagcgatctaagagcaaagactgaaaaataaacttcgattaagaaaaccccaaatcaacttcaactttaaggttgaaattttaaattttagctcataaacataagcataagtgaagatgagactgtttgttttaatagaataaagagtaacagaaaagctatttgcgggacggagaaggacccgcgcctgaacttgtaaattgacaaattgtgtcaccacttttacccaagttatggtctcttctttgatttttcttttacggtggacggggttgcctgcgatgtggcggaagattctcgtgttcctctcgcaacgtagctcccagattttacacggcttgttagggttgtgtggtgtcgagagtgtttgcagtgcaggcttgcagccaccacttcctcaactgaggtagcgttaccccattcctggattcacaggtctacatttgcagctcgacctttgaagtcgttgctacgtggagtactagtattagttgggatcaattcgatcctgactggaattggatgcctagtttgccttgcccaccttgatctgtgtctcagctctcctatcttctttgctcattttcctttttctctgaacggaaactcatttcctttttgacttcttcgtgatgctcatttctggcaacaagccaacaaccaatgcttgttgctctttctaactaaaactgctgtcaccatcttaataaatttcggccgaagtaactttcgtcggcctggcgataaacaaatagtggtggcgactatcagtccagcaatgccttctggccatggctgaccggcaccaactgctgcggctggggatacctgagagggtgttgaggtgaggagtaggcaaaacaaaagtaaaaccatcccttgacttttgatcgatcgattgcgatcgttgtgagcacgtgcttggaatttgtcaccacccttgactacttggccatttcaacttcctaaattcgtatatcgagacgtaattcgtccatatgtagactactcgtcaacaacttcaaacgtccatatgtagactaccgaccatttcaattgcggtagtagactactcgtcagaagttcaaaacctatcggataaagaaattattatttttttttaccggcgtatgcgataagacgagtaacttcttttggatgatgactctgaaaattttgagtgttgtttccttgattttttggctaaataagttgtacacaaagactagtgagtacagtagaatcctccctccatacacctgacccaattctaagctcttacttatagcagataagtagctaacccaatcaaactaagctgctattatgccctccacaatgacccgttacaagctattgttcatgacattgctgctcctcctcttacacacccagctcgttgtcccttcttcatcagcaacatcagctacgtacaccaaccacaccggagtgccgccgtcggcggttccatgcatgccggaccaggcatcggcgttgctccgactgaaacgatccttctccatcaccaacaagtccgtgatcgccctccggtcatggaacgccggcgaggattgctgccggtgggaaggcgtccgctgcggcggcggcggcaccgccgccgccggcggccgcgtgacatggcttgatttgggtgaccgtggcttgaagagtggccacctcgatcaggtgattttcaagctgaattccctggagtatctcaacctggccggaaatgacttcaacctgtccgaaatcccattcactggcttcgagcggttgagtatgctcacccatctgaacctctcctcgtccaacttcgcaggccaagtgcctgtgcatagcattggtcagctcacaaatttgatctcccttgacctctcctttcgtttcaaagttactgaactattcgatatgggttacttatataccggtgcatactctcacgaatggcagctcgtcctgccgaacttgacagccttggttgcaaatcttagcaatttggaggagcttcgtcttggctttcttgacctatcacaccaagaagctgactggtgcaatgctttaggcatgtatactcaaaatcttcgtgttctcagcctgcccttttgctggttatctagccccatttgcgggtcgctctccaacttgcgctcactgtcagttattgacatgcagttcagtggtttgacgggtcggtttccagatttctttgccaacttatcctccttgagtgttctccagcttagctttaatcaccttgaaggatgggtccctcctttaatctttcagaagaagaagctagtggctattgatcttcacagaaatgttggattatctggtactctgcctgattttcccgtggatagtagtttggagattttgcttgttggtcacaccaacttctctggtacgataccaagtttcattagcaacctcaaatctttgaagaagctaggccttgatgcaagtggtttttctggagagttaccctcaataatcggtacgcttagacatttgaattcattgcagatctctgggttagaggtagtagagtcgtttcccaaatggatcacaaacttaacttccttggaggtccttgagttttccaattgtggcttacacggaacgataccttcttctattgcagacctgacaaaattgacaaagttagcactatatgcctgcaatctttttggggaaatacctcgacatatattcaatttaacacaactggataccatctttcttcattcaaatagttttactggcacagtcgaacttgcctcattcttgacactaccaaacctatttgacttaaacctctcacacaacaaattaactgtaataaatggagaaagcaattcttcactcacatccttccccaacatagggtacttgggtttgtcatcttgtaacatgactagatttccgaacattttgaaacatctaaacaagaatgaagtgaatggcattgatctttcacataaccatatccaaggggccataccccattgggcatgggagaactggaaagatgctcaatttttctttttgaacttgtcacacaatgaattcactagggttggccacaccatctttccttttggtgtagaaatgttggatctcagttttaacaagtttgaggggccaataccacttccccaaaactctggaacggtgcttgattactcaaacaaccgtttctcgtccataccaccaaatatttctactcaacttagagatactgcctatttcaaggcatcaagaaacaacatctccggagacattccaacatccttttgtagtaataaactacagtttcttgatctctctttcaatttttttagtggatcaattcctccttgcctgatcgaggttgccggtgcattacaagtactaaatctgaaacaaaatcaacttcatggagaactaccacattatttcaacgaaagttgcacattggaggcactagactttagtgacaataggattgaaggaaatttgcctagatctattgcttcttgccgaaaattggaggtccttgatatccaaaacaatcatatcgctgactattttccttgttggatgagtgcatttcctagactccaagtccttgtcttgaaatctaacaagttctttggacaagtggcaccttctgttggcgaagacagcagttgtgaatttcctagtttatgtatcctggatctagcctccaacaaattttcaggcacattgagtgaagaatggtttacaagattgaagtccatgatgattgactcagttaatggtacatcagtgatggaatataaaggtgataaaaaacgagtctaccaagttaccactgtgctcacatacaaaggatctaccatgaggatagataaaatactaaggacttttgtattcattgatgtctcgaataatgcattccatggaagcgtccctaaagctattggagagttagttctgctaaacacgctcaacatgtcacacaactcattaacagggccggttccaactcaacttagccatctaaaccagatggaggctttggacctgtcctcaaacgagctttcaggagtgattctacaggagctagcatcgttgcatttcctcacaacactgaacctgtcctacaacaggctggtgggaagaataccagagtcaactcaattctcaacattcctgaacaactcgtttctagggaatgatggtttgtgtggccctccattgtcaaaaggatgtgacaacatgacgctgaatgttacactttctgacaggaaatctatagacattgtgttgttcctcttttctggattgggatttggccttggatttgcaattgcaattgtaatagcatggggagttcccattagaaaatggtcgctactagggcagagagtcccctgaattatgtactaaaagaaattttcctgtaccaaggtcatttgcagttcgtttgtaatcaggaccatgtcattgttgtagcaagctaatatatatttgaatcaagctaatatatatttgaatcttctatctcgagataatcgattacgggtgttaaaatgataatggtgttatgcttatttaattactttagagatacacaagtcactaggatacacgcattatatacagatttttctttcgaagtatacgtcatatacaaatttacatactagcaattttactatgattgatttgctgctcaagcaaaatctagcttcagcaacttagctcccacgaaacagctgggtttggaatcggctttacagtggccattgttctggtgagcgaaacgctggaactagaacatttctcgctccaccagtaatactgtactcctaatttagtagtgagcgcgtgcggtgtgtatgagcttgtatgaatctactcttttacgaacaatgcaatataattcgacttcaattgtagtctaaactgtaaattaaggtggcagaatcacctgatgagtgagacgatgctggtcatgtggaaaatcttgattgctttgtccccatctctccagcttcaagaccgatgattaatcgggtgcgggaacacatgctggatatgcaaagctagatgatgtcacctgaaaatgtactgcagaaaaggaaaaactactcacgcaacaaatcgacaggacgatatgtgcaatttgctctcacctgtgctgtgcaactgcacaggcgcattccgtcgaacacgtaccaagcggaaggtagagcgcgacgacgtgcagcgcagcagcaggatgccaggattgattcgctcctgcaacgtctccatgatgacaggaaggtcactgagacttgccctgatcgagctccatgtcgccgccttctagctccgacgggtcacattttctcgccggagagatacacgtagcggcgggattggggaaatccggtgcacggtacagttggtggagtgggtgctggaatttaggtgtggtgggaattggcagagttgtcgaagtgggatgagacgccgacgaggtgagaaaaaaagtggcaggcaaatggggtcggcgaggacggacggcgagcggcgtcggggcgccggacacagggcgtgtgacggcggcgagtaccactttgcccttggcgcgcaggtagatgcgaccgtgaccaccgctcgccacgaggatggccggtttgagacccttcgtccgccggtgcatccaccccgtggatgcattccatggaagcattcctgaacctattggagagctagttatgctaaacacgctcaacatgtcacaaaactgcgaaaggccatgtaaagcctgacttacctcaacataatgttgagttcaaatctttataatagcgaaatttagattgaattatttaaaaggttaacttttcatttttaaaataccgtatataagcagttgctaggtaaaaaaaatatcgttctttaaaaagtaaaaaaaacgtgtcgcacaactcattaacttgtgccgtctaaaccagatggaggctttggacctgtccttaaacgggaagaaaattatataagactgaagtcttaccctcatccgaaggactttgttgctctgcacgacacctgttccgcacgaatcacagcgcatgcttactccctcaatctccctcgtgtctcttcggttactcgttctttcgctcctggcgaggcgtcgagctcgggcccgtccgaccacccacgcggcggcgccccgcagcatcgagctcatgagggcagccaggaattagaatcaaggcatcaagctcgtgcttccggcctgcttgtagaagatatctcaagatttggaagaaggtgtgtcatcgatgatcgattcgactctgctccttgaaactgcaaagagttgccccacgatgaaattattcaacgattagattttgcttgccattgagtttagtctgtatggtgcattgcactgattatctttgctggtgattgaacttgattgagccttcaaagatttctttgtatttgagtctttcaggattataatatgttgatgtcttgacgattcttcccgagcagcgactcatgcgagcatggatgctgctgagtttctctgccacatcgcgaatcccgctcgatgcccgcaacagcgacagccgcgagctcgacgcctcgccgtctcgccgagaagagcatgagaatgaggtggtgtttggatccagtgacttaactttagtctctatatttagacactaatttatagtattaaatatagactacttataaaattaattatataaataaaagctaattcacgagacaatttttttaagcctaattaatctataattagagaatgtttactgtagcatcacataggctaatcattgattaattaggctcaatagatttgtctcgcgaattagtccaagattatggattggttttattaatagtctacgtttaatatttataattaatttttaaacatctgatgtgatagggacttaaaagttttagccccatctatacaggaacagaaggcaaaaggataaggagagtaagcctgtcttgtgattcgtgcggggacaggtgtcgtacagaggaattaaatctttcggatgagggtaggacctccatcctacataattttcttccgcatcgttgcacttcctcacaacactggatctgtcatacaacaagctggtgggaagaataccagaatcaactcaggctcatccaaaaattccgtcacattaaatgtttgacacatgcatgaagcattgaatgtggacaaaaaaaactaattacacagtttacatgtaaattgcgagacgaatcttttgagactatttacgccatgatttgtcaatgtggtgttacagtaaatatttattaatgacgggttaattaggcttaataaatttgtctcgcagtttacatgcgtaatctgtaatttattttgttattagtctacgtttaatacttcaaatgtgtgtttgtatacttcaaacttaggctgtgtttagttcacgctaaaattgaaagtttggttgaaattggaacgatgtgacggaaaagtttaaagtttgtgtgtgtagaaaagttttgatgtgatgaaaaagttgaaagtttgaagaaaaactttggatctaaacacggcctaaggaactaaacacagccattgtgcggttcctcttttctggattggaatttggccttggatttgccattgcaattgcaatagcatgggggaattcccatcagaaaacggtctccagtaggtcggagagctctctgaattctgtattaaaatgaacttttctgtatcaacgtcacttgcagtatatttgtaatcaaggctgtgccatagtgccattgttgtcgcaaactatactcaagtcactaggattgatttgctggaatctggagcaaactgaccattgctgctatctttatttttgagttatagtacaagtcactaggattgatttgctggaatctggagcaaactgaccattgctgctatctttatttttgagttacagtgtactagtctatccaaaaaaacccaaactctggctatgaacctggacacgcgtgtgtctaggttcgtagctaggattggatttttttttgggacggagaggtaggaatctaggatcgatacacacatcatatacatactccctccattaaaaaaaaagacaaaccctgagtttccgtgtcaacgtttgaccgtccgtctatttaaaaaaattatgaaaaaattaaaaagacaagtcacacataaattattaatcatgttttatcatctaacaacaatgaaaatattaattataaaaaaatttcatataagacggacagtcaaacgttggacacggagaccagtgtttgtcttttttgggacgaagggagtatatagtagttacatcacactatagaggctatttaactactgcctccgtcccaaaatataacaaccgtctcaaaatataacaacttttgtctatgtatctggacacgcagttgtccagattaataactgaaaatacttatattttgggttggagggagaatcaattttactcgagtcgctcagattgatttgctgttcgatcaagcaagctgaaatctaccagcagcagcaactttagttcccatgaaacagctgaagcgccgtcgccttcgtcatcccggccggcaccttctcgacgaacagcaggatccccaccgccttggccgcctccacggccaacttctccgccgcctcccacgccttcttctcctgctccatcttctttgtatccaccttgttgtgcttggacgccgagttggagtcctctagctgcagcgcgtccatggtgagcagcgccctggacaagaccttccacccgttcacctgctccttcatgtcggcggtgatcgtcccgctcttcctcaccgccctggggttcatgaagccgcccacaagctccgccacggtcaggaaacgcacggcttcgttcaccatcaggagcagcgtcgccaacgcctcgccggcccgttgccgcgccgcgccgccgccgctggcggcgagaccggcgagcgtgtccacggcctgcgtcatctgctgcgggccgagcgtgacaccgaccatgttgtccgtgtgcccgaggagctcgcggtacgagccgccgaagccgaggtaggtggcgccggcgatgaggccgcgggtgagctcccaccacgcgctggtgccgtcgctgccgcggaagccctccaggtagaggttgtcggcgcgcgtggcgagcgtgagctcgctggtctgcgtccggagcacgacgtggaaccagcggcgcggcgggacgtcgggctccaccggcgggaggacggggcggttgtgggagaagtgcctcgggttggccaccctcttgcggatgccggcgatgaagtcgccgtagttgtcgctgccgctgccgctcacgttgaacgtcacggtgaacagcgggttcaacgccatggccggatgctcgatcgttgtgaactacaactgacaaaagcagaggattgctgaactaccatagacaagatgacacaaccccgccagttagtacgtgtgatttataggcaatggagtatctctgtatctgcttatactagtcaaaaagaaacaatttttgcttacaggtcaaaacaagagcgaattttgcttttgacagagcacacctgagatgttgttccacggacgcctctgttgagaagagaaatatcagcctagagtgagtcaaaagactgcgtcaaatccaagttcaaactggaaacaatgacgtccaggatagcgtgctgccaatccatgacagactagcagcgttggagaggacatgatacagacagaagtcacttgttttccgtgctcatattaacttcgatatggtctttttctaaaaatttcctatatttcttttaaaaaattatattaatctatttttaaatttaaaataattaatacttaattaattatgtgctaatgattcatcttgttttgcgtatcttcttcttcctccttctctcaaagacagcctaataggcgtcacgatcacacaacgctgtagtgctttgtcaactaatagcactggataattggatactatgattgatttgctgcccaagcaagctgaaatctagcttcagcagcttagctcccacgaagcagctgggtttggaatcggttttagagtggccgttgttttggagagcgaaacgctagaactggaacatttctcgttccaccagtaataccgtaacttagtattgcgcacatgcggtgtgtatgagcttgtatgaatctactctttaacgaacaatgcaatgtaattcgactttaattactgtctaaattgtaacttaaggtggcagaatcacctgatgagtaagacgatgctggtcacatggaaaaacttgattgctttgtccccatctctccagcttcaagatcaatgattaaaatcggagccagaacacatgctggatttgcaaagttagatgatgtcacctgaaaatgtactacagagaaggcaaaactagtcacgcaccaaaccgacaggacgatatgtgcaatttgctctcaccaatgccgtgcaaccgcacaggcgcattccgtcgaacacgtaccaggcggaaggtagagagcgacgacgtgcagcggagtagcaggattgattcgctcctgcaacgtctccatgatagacaggatggtcagtgagacttgccctcagctccatgtcgccgccttctagctccgacgggtcacgttttctcgccggcgagctatagggaaatccggtgcacgatgtgggagttcgaagagggatgaggcgtcgacgaggtgaaaaatgaaggcaggcgaatggggtcaagtctaccaactggttgggctgggccgtaacatgatggcccggtagtggcctccagtaattaaagcccattttttcagcaatttcggcccatgaaagtgctctcatgactatcgttggcgccttgccaccgggtgctcccagcgcgcgcgtacgcgccagcgattttgcgcccccttccggcacctttttttttttcctaagctctttttttttcgcttttttttttctgattttggcgttgcgttttttttcaccgtttctttctgtttttttttcaatcttctgtatacctctttacaaatgttagaattgaaagtttttaattttgacttgaaatattttaaatcttgacttaaaagttttcaaaatttaggttgaaagttttcaaatctgggttgaaagtttttaataagtttttaattttaagttgaaagttttcaaatctaggttaaaagattttaaatttgagttgaaagttttcaaatctgggttgaaagttttaaatttgagttgaaagtttttcaaatttgagatgaaaagttgaaagttttcaaaatttgacttaaaaaatcaaatttcgagttgaaagttttcaaatttaagttaaaagttttcagaatttgacttcacgtataaatttcttttcaatctgttacttaaaaaaatctttagaaaaaaaacaaatcttatcttaattatcttaactaatagattttttatacgctaaaaccaacggtattacagctaaatggaaaaaaaagtaaaaaaaaaaaagcgccgacgcgcgcgcctacgcgccaattagctccgccgcttaccacccatcgcttttccgcaaccgccgcctaggatgcgaccagcctcattgtttggcatattttctgaatatgccaaatggcatatttgcaaacgaaaatcaatttgtgaataaaacttttatatatgtgttcttagcgatctaaaagtaaaggctgaaaaataaacttcgatgaaaaaaaccctaaaatcagctttaaatttaacgttgaaaatttaaattttagctgataaacatatgaatataccaaacgatcaggcccgacggatgcgatgaggatgcaacgcaacattgctgagctgacaatgttcatctgctcgggcgtttaatcccagaacttgtggtactacttacgattaggtcatcccgtacacaatgaccatgagatcatcaatgcgtctggatgttgatcatcaattgcagcctgcaggatcaacaacgtaacgtcgaagataattcatatttttcagatagaacaacaccaggaagttcactatactgcagctttgcagctcctcactaagcgctactccctccgtttcataatgtaagtcattttagcatttttcacatcctatctagattcattaacatcaatatgagtgtgaaaaatgctaaaatgacttgtattatgaacggaggaagtacaagttagtgccggtggcatgtttttcaaatgagaaaaatgtgggatactatgcagttgatgtggaatactgatggcgttagcatccgttgttgataaaaaaaataagaagaagaaacccagattagtcgagtaagccagcgcacgcgtgccaagccactaactatcccccctcccaaaaaatgaagatgatgtgttacagttttattttttaaaatattagagaaaaacctaatatcaaataattagaaggggtgagacttcgaaccaggtcgtctagcccattacctcgtggagctagctcaaaaatctccgggcgtttctcaacagttttttttgtcaccggctagctgatcgatgtagttacgttggtggcctttttttcagcaaatagtaatatgatcatgcattattttgtaacggatatttgagattaaggatgggacacatggccgtatgattaggaataggttggactatggattaatcataaaccaccggatccaactgttttttttttcatttcctttggctctcatactacacacatgcggtggacgacggagggatgacttcttttactgtagtagagaaatgcaacccaaacggtgctatatcaattagaaaacagcccagcaatcacttctatgttgcattctttcattttattttatggcagctacttttttgaaggggctttaaaccgacaattgtgtaataattggatgcagtttttattgaagtgaaggccagattttattcattatcttaaaaaaaaaggtagaaacttgcatgtacctttcattctatatactataatcggtttaagaaataattgttataaagcagcatccacgttaagccacgtcatctcagttattggatcaacatgttcctcaaacacttactcatagattaccatacctacagaaaaggactgttgatgctcatggcctatcgtaaattctaagaaagtctaagggcctgttcactttgatgtcattttcaaccttaccaaattttggtaaagttaccaaaaaaagtggctacatttagtttgttgctaaattttagtaactatataagaaatcatgccaaaattttggcaagttaccaaaattttggtaactatgcaaatttgataaggttttttttggcatcaaagtgaacaggccctaaaatggatgttagtgttacggaataatatatgttgggaattttttttttaccaattctaaatcggagtaaagatagaatttatctccttctaagacctctatataaagagggacgggataagacatatatggttaacttgtactcgagaccagaactataatgaagaaagagcttcaccatatatttatggtaattgtttatttctgcaatgttcttgaaagcaaccagaagggtgtgggtattctatatctttactactgtgggagggacaaggaatggatgttaggactagacatactcccatcttgttttttcctcgcttatctttcaatatcttctagtatatattttcattttaacatagttagtttggtagcaactatttttaactacatattctatagtaacgccgggggttgcatctagttatgcaagggcactcgttgaatcaatgattgatgattacttgttgttcatgaagatctcttatgcttcttgaaaaaaatctcaaagaaaaagggagcataatgttgccttctcaaaccgggaaaagaagaggcaatttccatacgtaaaacgtacgtgacacgaccgtcattagtcgttggggtcgtgctctcaaaccagcgacgtctgcagatgtaagtatattttgctacttgtggcgctcaaaatttgtgtaatttactaggaaacatcgtaaaaaccttaaaaaaactaataatttgcaaaagaactcaattggagagatatattcttaagaaagacaagaataccctcagaaccacatgctttaaacatgacgttagagtaaaattttagaaattatgcaactccaaattaatttgccaccaccccaaatacatcatattacatctccactctagtctcaacttaaaagcttttgactctagtggcattctcgtcttttttgaagaattttgctcttcaatttgagtcgaaagtgtcctctaacaaattactatttttatggtgttttcaaacatgatacgtttttatgatatctatcataaatgtaactaaacggagttgatcaacgctcacgaccacgctgatgttggaacagccgaacaggtaaataaaactagcctagtagtatagccttggaattgatcggtcgattgagatcgttgtgagaatgtagggagctttgctcccggccgttgattattcggccctttcaacttggtacattaattttctccggcccacaagttgttctcgctgtaaacttccatcatgcggcccatggctgcaggaaggccgtgcgtagaacgttgcgtatgaatgttacccctgcatgctgattgggataattaccgtttaccgtttaccaagttgctaaacttcaggaaattaatcaggatgacgaccctttgaaaaatttgatccattacctcgtgttgattagttgatatttcctgtaaatcattctcactagatgtcctcgacccgtgactggccggttgatcctctttcttctctcttttttaccaaggcaaaggtatctaattcgtgtataaaaatgagggagcaaggtagaagtagagctacactcaactgtatctctacagttagcgcaatcaaactaagctgctattatggtggcctccccagtaaaaacgttgttcttgccgtcgctgctgctcctacacatccacctcctccacctcttcattccttcatcagcagctacgtacaccaatcacaccggagccctctcaccaatggttctatgcttacctgaccaggcagcggctctgctccaactgaaaaggtccttctctgtcacaaacaactccactgccgccttccgatcatggaaggccggcgaggactgctgcctgtgggaaggcgtccgctgtggtgacgctgacggccgcgtgacatggctttgatttgggggactgtggcttggagagcagccgtctcgacccggcgcttttcgagctgatttctctagaatatcttaacctgggcggaaatgacttcaatgtgtctgaaattccatccaccgggttcgagcggctaaataatctcacccatcttaacctctccacctgcaacttcgctggtcaggtgcctgcacaaagtatcggtcaactcacaaatttggtctctcttgacatttcctttcactccgaaataattgagatatgggaagtgcttctatgcttctttaaaaaaaacctgcacgaaaattaaagcacatcaacagtgaggattaaaagttgattaacagagtaatcccctttaacgaggggtaattttgtcctaagaaaaagctgaccatatctagcccaccctgtccgcatatcagaatcgactggttcctccttgacttgcacctttgacggaggcgccatcttcgccgccgccgccggcaccgccatcccaccgggtcgaacgaacccatcttgcccgacgccggcacgcttgccggcggcattcgacgacagccttgtggcgtccatgctcgcgcatgccggcgcctccgcgggctcctctccttgacctgcagcaccgtaaacggagggaccatctccgccgccgccgctgccatcacttcgtcctctccctgttcctggacgtcctcgccatggctcccggcggcggcgggggccgcggggcgggaagcctggagggcctgcagctagctgaagcgggcgtggatggaggactggagggaggagaggtgggagtcgaggtcggaccagcggaaggggaggaggatgggcgagtggaggacgaggctgtcgcaggcctcgcggaggcgttgcttcttgccatgcagcgtcgcgatggcggcctccatctgcgccggccgtcgtcatcgccatcagagatggttcagggcacagggccgttccgtgcgccggcggcgagctgttgcataatctccatcgccatcgattcttcgtgcggccggtaagaagccgacgcagtttatatataggcacgcggccgcgaacagtccgagacggataggatcagcgcatacaaccaattctatgtaaattcaaaagattgtgatcagccttgtgttaagttcagttcaattctgaatgcatatcaggtatcaccatatactgaggaataaaatggacatggaagctttggcaatctctgccgagaatcatgaagaagcagaataaggtgttgataatggtgagtgagggtgttgtgctcaatgaatcagccaaccagccatgtttcctgaaccacgagactattgacgaacctgaaagcacgacgacgagcaccacctacacaacacgtcaacacgcagctccccgaaggagagagctcgccggtgaaggaagcagcgacggcgtggttagtagcggaaggggaaaacactcttacagttacagggggtagaggacgcttctcggcgaaggaaagggtgcgggcgtgcggcgctgttcaccggaatgcgtcgtgagaactgccgcgcgctggccgcgaatcaatccatgagaagggatgtggatacggatatgggcttttacttctggacgaaattgccccttgctaatggtgattactcggttaatcaacttttaatcctcaccattgacgtgctttaactttcgtgcagttttttttttaagaagcatagaagcacttcccttgaggtatttgacgggagttatttgtttggaggtgatttcactcacccatggcagctcaatctacaaaattttacaaccttagttgcaaaccttagcggtttgaaggagctgcatcttggcttcctggacatatccgagcagcaaaccgagtagtgcaatgctctagccaattatactccaaatctccatgttcttagcttgccgttttgccagctctctagccccatttgtgaatcgctctctcgcttgcgctcactatcagtgattgacctacaatacaactttttgactggtccagttccagagtcctttaacaacttctcctctttgactgttctccagctcaggtataataacctagaaggatgggtatctcctttaatctttcagaacaagaaactggtggttattgatcttcacagaaatcccgtcttatctggtactttgcctaatttccttgtcggcagtagcttggagagtttgcttgttggtcacaccaacttctctggtacaataccaagttccattagcaacctcaaatcttttaaagagctgggccttgatgcaagtgggttttttggagacctgccatcatcaataggtaagcttacatccttgaactcattgaaggtatccggtctagagatagtaggattgtttccccaatgggtcacaaacttaacttccttggtggtccttgagttttcccattgtggcttatatggaactctaccatcttctattggagatttaaaaaagttgacaaaattagcactctatgactgcaacttttggggggaaatacctcgacatatcttcaatttaacacaattggataccatccatctttgctcgaataattttgttggcaccgtcgaacttgcctcattccagatactaagaaacctatctgacttaaacctctcatacaacaaattaagtgtaatagacggtgaaaataattcttctcaggtatcctacccagatattgattacttgagcttggcgtcctgtaacataactagatttccgaacattttgaggcatatagattatgagattaatggcattgatctttcacataaccaaatccaaggggccatacccctttgggcatgggagaaatggactttgggtttttctttttgaacttttcacacaacaaatttactagtgttggatatgatgtctccctacccttttatattgaactgttagatcttagttttaacatgtttgaggggccaatacctctacccagagattctgggaccgttcttgattactcaaacaatcatttctcgtccatactaccaaatatttctactcaactcagaggtactacctatttcaaggcatcaagaaacaacctctcaggcacactgaaagaagaatggtttacaagactaaagtctatgataactgattntggtaatgaaacatcagtgatggaatatgaaggtgatcaaaagcaaatctaccaagtgaccactgtgctcacaaacaaagggtctaccatcatgatggagaaaatactaagaacctttgtattccttgatgtctcggataacgcattccacggaagcatccctaaatctatgggagagctagttctgctacatacgctcaacatgtcacacaactcactgacaggaccaattccatctcaactcggccgtctaaagcagatggaggctttggacctatcttcaaatgagctttaggtgtcattccacaggaattaccatccttggacttcctcggaatgctaaatctatcctacaacaggctggaggggaaaataccagaatcgcttcatttttcgttattcgccaatagttcatttcttgggaatgatgctttatgtggccctcctctatctaaaggctgcagcaacatgacattgccgaatgtgataccttccgagaagaaatctgtagatgttatgctgttcctcttttctggaataggatttggccttggatttgccattgcaattgtaggagcatggggaattcccattagaagacggtctccggcgaggcagagagccctctggatcatgtattgaactgaacctttttctgtatcaaaggttgtaaacttgtaccagggccatgtcattggtgccacaatctactacgtatttgaattcttccatctggatcaaatcaactatatcgtatacagaggtacattacatactactagtagcagttttgctgaagtcgctcggattgattttgctggtcaagcaagctgacatctagctgctgcagagttacattacattttcggtttcgggttgtttatttggatatccgagtttattccatgattatggcttctagatggatactatacgtatgtaatactattgtttgctgctaatgagtcaagttggagatagcttggtctcggaatatgatttctttgtttgttccatgtataggtgactcgatgtctcggaagagtatttgcggtgatggaccgggagtcggcttgaggataagacgacgtccgtggtggtcagagatcatgcgggatacttaggcaagagttgatgcacgtggttaatggagattccatatggcatacgatggaggaattgtgtgcgtatgggatgcggagtcgaatttggaaggagtccaaatttggtacgtttggttatgtaaagtttctttcttgtattagtgggtttcctaaggtgtttaggactcctagtatgagtttggttcgtggctttaggctgcctaccttatgtataaatagagggggagcgtgaggcttcccggtatcgctttagagagcaattgagttgagttttgagttagggtttcgagtttagtcgaaatttttgtaaggagtgctgttggtgcactttgtaaacacagagagaagtaataaagtcgtcatccactttaagagttcttcgatttgtgtttcaccgggtttcggcggtctaaccggcggcgcaccggcggtcagaccggcggcatctcggtggtccgaccggcgggcacacggcggtcagaccgacggctacaggagtcggcgacaggcattttcggcggttcgaccgatcgatctacatcggtcagaccgacgttcatcaggcggtcagaccggcgcaactacttcggttagaccgcgatccatcgatttcgagggtaacttttatttccgctaaaagttatcggtttttgggtataccaaccattcatcccccctctg

SEQ ID NO: 10479 - DNA, 9625 bp, Oryza sativa
gaaaagctgctataagagaaattgaggtggatcatatttgtgagttgcgcaaacccagatgctgggagagcggttcccaaaaaatcattgtaagcaaggttaaggtttctaagagaggtgaggttaaagagtgcaggatcgagacgatggcttatcaagttcaactcactgaggtcaagggaaatgaccctgccggaggccatgtcacaggtgacaccctcccagtggcagcagtccgatccagctcgccatgatggcagcaggtttgtaccgatgaaggaagctttaagccgtagtagggaagaagcttgatctgggcggcaatggacggctgtgtcatgctgggctgcagtatcactatgaatggcgtaagagcacaagaggagtatgaggatgttgatctgttgcttgggtgaaatcatttttgacactggcttgcgtcctccaatggcgtccagtgaccctctatatattgggaaaaagaagaacatccggtgacctagacagttcagactttggactcgtaattagctcttgtttagttccaaactttttcttcgaacttttaacttttttatcacatcaaaattttcttacacacacaaacttatcaaaatttgattccataaaaatcaaggccgtatttagttccaaaggttttctttaaactttcaaatttttcatcacatcaaaactttcctacacacaaacttctaacttttccgttacatcgttctaatttcaatcaaacttttaattttaacgtgaactaaatacagcccaaagcaactcctaatacgaaaccaaggagatgatcgatttgcaagccgccgctaacagtaccgatgagtgagcgtgtggaccgcgagtagggaacacaagggtacaagcgtgtgggccgaacccgcactccactccacttcgcgctgtcaattgagacgtggtggtcccgttccggtgagaacacgatggacgaccgaccagcggatccgtcaacgacgtggtctcctgccggccgggccctgctatttccatcccatccatctgcctgcagatgggctgtggtttgcccattgatgaacgcctcatgctggccgcgattttgtgccccgaatttagttcctaaatttttttagttccttgcgctgtgtttagttccaaaataattcttcaaacttctaactttttcatcacatcaaaactttcctacacacataaacttttaactttttcgtcacatcatttcaatttcaaccaaacttccaattttggtgtgaactaaacacagcttgtttagttccaaaattttgtgccccaaatttagttcctaaattttgtgccttaagggttaaggccttgtttagtttctaattcttttataactttcaactttttcatctcattaaaactttcctacatacataaacttccattttttttcttcaaactttcaattttagtcaaactctcaattttggcatggaactaaatataacctaacttgcgagtgatctggctgcctcctggccggcgatacctaccgaaaatgatagagctcagtgattgattctcaggctgctaaacacgcgggtggtgatgcgcgcggcagctttgttctctgacgagggggctataacaccaccggcttccggaggcagtggcgtagctagaatttagattaaaggtggtccatctattagtggcggacacaactttaaaatatagatggggcggagaaaagagatattcactcgataagagcaatcgaacacaacacatatcgtattaatagttcgttcatataattgtctcaatctgtcaagtgtttatatcttgttatacctaattttgatggcctatgactactataagcggataaggggggatgatactccctctgttccataaaaaaaattaaatactaaggatagatatggacatagtgtatgggacaagtttgtcttttgtaacctttctctacagttttattttttaatttgcaattataggatagtaagaaagcaggagctgaaaatattcgcctcaagatacagttggataactgcagtgtagtgaactccctggtgttttttcttaattatctgaaaatatgaattttcttcaacgttgttcatgattatcgttctacaagcattcatggtctcatggtcattgtgtacgggatgatctaatcgtagtagctagtagtaaccaactaccaagttatatgattttagacgttcgagtttcaaaagggtagcttttagtaggaaagagtcttgtacttaggtcgatgaacctcttggttatattctaagcactttaacaaacgatgtaacaatgtttaatgatcaataaagctagccgaatggtattccctcgaaaaaaaagttatatgattttagacgttcgagtttcaaaagggccaggcctttcggattcaggggatgagcataattgcacaacgtgcatcttgtacagaaggattatccaagggcagaagccaagaaagtgttcgagcagatgaacattgtcagctcagcattgctgcgttgcatcctcatcacatatcggttgagatccggcggttgcggaaggcaaagggaaggtaatgcgcgggaacgccatgcaggggagaacgtggcgggagcggcaacgccgccaacgcgagtcgcgagagcgcttcgatgggccgagattgccacacaaatgggctttaattactggaggccaccaccaccaggcccgtcatgtgtgtacggccccatacgatgcgaggcctgccactagatctgcgacggttgcgaaatggcggcgcggccatggtgccatggccggcgacgaggtggatgcgccgaaggctctcctcccacccagaccggccatcctcgtggcgagcgccggtcagcatctaccaaggtccaagggcaagtggtacgcgccgccatcgtacggtcgatctcgtcgtgcgcgtcctgttcgatgccccgacgccgctcgccgcccgtcctcgcggacgccgccggagccggagccaccggttggtttggtagacttgtcccccttcgcctgcctccgcttcacctcgtcgacgcctcaccccacttcgattcccaccaccactccaccagccgtccatacaccccgatccccaatccccagttccagtgaggtccactgccacttgcaactcgccggagagaaaacgcgacaggttggaactgcaaggtgcgacctggaggtcagggcaagtctcagtgatcatccggtcatcgtggatgcgttgcaggagcgagttaatcctgctgctccgctgctcgccagtgcggcgctgcttctgcctggtacgtgttcgagggaatgcgcctgtgcagttgcacagtacatgttacagcaaattacacaatctcattgtgccaacttggtacgtgatgaactgatgactagtgttgccttttcttcattacattttcaggtgatctcatctagctttgcaaatcaagcatgtgttcctgcaccgataaatcattggtcttgaagctggagcgatggggatggaaccatcaaggttttccttccacgtgaccagcatcgtcttggtagactcatcaggtgattctgccacctcagtttacagtctagaactagtagataaatccaaattgcattattcgtaaaagagtagatttatacaagctcataccacacgcatgcatgcgtacactacttaactactacagtgttactggtgaaacgaaaaatgttccagttccagcgtttcgctcgggaaaccactgacaaaacaacggccactgtaaagccgattccaaacccggatcccacaaacacaaacaatattattatccccacactatctcgagaggatgatggtgatcttgcagcttctatgcctgaatagttgcactgtttggacagcggccttccacagagtcctgcattgccttcgaatgatctgttgccgaatgacaagaactgtggcccttgtggtatctgtccagtcaaattgttgtatgagagattcaatattgcgagagatgttagggatgccaactcctgtgggattgcttctgagagctgattcaaagagaggtccaaggactcgagctgaaccaatttaccaatcttagatggaattcttccagtgaaggagttgcgtgacatgttcaaaccatgtagagcaattagcttcccaattgattctgggatagcaccattgaaatcattgtttgataagtctatcatcttgaaagtagtcaggattttggtaaacatgagatcaaaccctttaaatgtaacaatcatattgttttggtataagcccttatatatcccctgaatgcccaaaacatcaccctgatcactatttatcatcattgtttcaaggttctcaaaccattttgattgcaaactccctgataagttatttgaggctaaatcaataatttgcaaacctgagaaatacttactggttgcatcactttctgtaggtagtcctactgaaccatagaattgattggatctcaagatgagaacccgaagattggacatgttccctaaccaagatgggaaagaatcaagaatctggttgttacccatgtcaagaacctctaagctcttgcatttagacaatgatctaggcagtttccctataattcggttgctgttcagatcgattgtctgaaacatacatccttctctaatattcttaggcagcacgccatggaagttgttctcccttaacttcaatatggtgacatcaccattttgtattaaacaggatggcaccataccactgaagttgttgtgtgataagtcaaggacctcaagataacattgggtacatatagaacttggtatatgaccacttattttattcctggaaaagctaagatagtagacgtttcgaagatacctgccgaagtcacgagtaattgaagagaagctgttgctagagtaatccaagagaacaccaccatctctagtagttgtcagtggtataggtacgttaccatgcagtctgttggaactaagattgagtctatctaaagtgtgcaagggaagaacagatggattattttccaagctagtgaacatgttgttagagagtactaacacggacaagctattcttccagttatcccatatccagcttggtattactccatttattctgttgtttgaaaggtccaagtaagacataccttttatatctctcaatgcgcctggaatttttgtaaggttgcaagatgctagtcccaggtatttgattgtagggaagtaatgaaatggatagccatcttctcgatctatcaccgacaacatattgttagagataattaatgattctagtttctccatcttccaaagaaggttaatttccagtgtaccattcaattgatttgattgaagcacgagatttgttagtcttctaagatcaaagaacgatttgggtatgtagcctgtaaggtggttatagcttaagtcgatgaattctaacaacgaggaaaacgggtctgaaatgtcttctagatgtccagaaagttggtttgatcgcagatctagcatttccaacgattgatgagcgaaaagaagcttcgggattctacctgtgtggatgagggacagagagagaacaacagtcaaagtttgttcaaaaaagaaaagcacagaatgtcagaagtcctgatatatgtactcaaatgtgtgttcttaccgctgaggctgttaagtgaaagttccaaatagataagcttagtcaagttcccaatccatgatggtattggcccatagaagctgcaattaaagagcactaaagattccaaacttgtacagtttctgatccaagggggtattggactggagaaattatagccttcgagcatcaagtctctcagtttaattgttccaatccaagataacagtggcttctctatgcctgatccagagagccataatgtatctagagatggaaggctaggtatgaaagtagcaacctgcttgggagatcctacgttgctaaggcccaaaaatttcaatgatttgaggtggataaacgaggctggcatgttaccagaaaagtttgtcctctgaagatttagtgattccaaatattttccaggtgggaaatccggaagttggacaaaaagagtaggattgaaagatacatcaagagacctcaaattttctacctggaatatctttgtgggaaattgcccttcaaaattattgttcgagagagcaaggtcactcaagaaaaagaagtctgcaaagaactcaggaacccttccagaaattccattgtagttgaggttgatcaccactagagagcggagttgggaaaatgaacgatgaatagttccacctaggtcacattgggacaaactaagattctgcagcagagggagagagtgtgctaaagcaacggaccaggttggttcactagtaatgcgcacttgatcaagatagagctctctcaaattgctcaggtttgctacaatggtttgaaaactccggtcttgaaaaaacagatatttgaaggaaagatcaagagcacgcaaattcttgagatgtgcaattccaatgggtatctgaccaaagaagcctgcttctgacaaatcgagcctgaggagtttggtgagccgctgaaacccgaaactaggaagaacggtccggttgaaatcgttaccagcaaggctgaggtttctcagagtggtgaggttgaagaccgctgggtctaggccaccggggctctggagattatagtaactgaggtccaacgctgttacctgcccagaggatgtgtcgcaggtgacaccctcccagtggcaacagtcggtgttcagtttccatgacgagaggtttggattaatgaaggagctcttcagctggagaagcgcttcagcttggtgaggatggcaatgaactgggatggtggtgttggcaacagtttggatggagcagtacaatgtgagtagcagcagtatgaggagaagctgtggtagtgtggatgccatctctgtattggtttgccactacacataaccacttgggtgggtggttctcaaggtaatatatgtaggttaattacataggaaaaacagtaggttttaattaaaaagaaaagggaaaaggctggcctgtacatcattaaatttttatatttgttagtatttcctcaatatgttgcgttcaatcatcaatataacctttacctgttagtccaggtctccaagatgacagttagtgtgcgaccgtcatgtggctaacgttgtttccatgtccaggccggcatgttttgctgtcttttctaaggctaactgagagtgagagaagcacttgccttagggcaagtacaataacgtgaaattaccggctaatttggattttatatctatgtggcggagagagagtaccatgaatgagaaacgtcgtcgattaatctgtcgaaggtcatgcacaggcaccaatgctcctatcgccgacttgcaggggcggatccagcgtggttgctggggggactcgagtccccctaccccactggatcaccattgatagaaggggagatgaaagggaaaaaatagggagaaaatgaagagtagggggactgaacaaagaagcccccccccccccccaaaaaaaatcttattctgaatccgccccggctggcttagcgccttcctatcgacaacaccatggacggaacaagaaattagcatgaatgatctttccttgatcggcttggaggaaagagaaaagctgggaagaagtgagggagaaataattaaaccatgattaatatgagtgttgcagtaaatatgaagagacaactattatatttattatctattaagttgcctctaaatggcgtgtataaagattaagagtaagcagtcgtcttttctattgcccttgcccttaggcatgtccagttgccacaccttggccgtgtaagaacagtctcgagtcttttgataggtgcccagtttttctcactttttccaacttcacctccctttttgtatgcacatgtttcccaaattgctaaatggtactccctccattccaaatttatctacatatagttttttttaggttattcctaaatgatctacatattagtgttcattcattaagtctattcgttatttgtgtattggagtaaatggatattgatgcatgcatccatgcacacaagtatttataacccacatgcaatatcttgatttgctattggctaggaaatagtagggatggggcatgcatcgagtttgttgctagagtaaatatagtatgagagagttattagcttttcttggtcttggtgtacatatgaaatatatagatcaatttagaatggagggagtacattttttacaaaaaaaatttataggaaaattgtcttaaaaaatcatattaatccattttaaagctttttagctaatatttactccctctgtcccaaaatataagcatttttagcatagcgacaagtcaaacatttttaactttgactatcaatagcaaaataataataataataataataataataataataataataataataataataataataataataataataataataataataataataataataataataataataataagatcaataatgtaaaattgatgttactagatttactattaaacaaactatcataatatccaactctttttatttaaaacttttttacttttacagatattattggtcaaagtagcatatcagagaccgtgtcagagtccaaaaattcttatattttgggacggaggggtaattaataatactctaatctgtcacttcgtttttcgtgcatggaagattagttcccaaacccatttgccgaacatcttgatgtctcaattctcagaaactttgatgagaatgctacaaaccaaattgcatggcaaatgtctctgcactttgcagtaggttgtcacttgtcgggaaaatatcgacagttcaatggggtttacactgaacagaactattgagagggcatgcactctctctttttttttgaatggaactagcacgagagtgtgcttttttattaaatatagaaggagaaaaatacagcccctagagacaaagaaaaggcgaaagccaaactctgcacactatacaaggtgcgggataagatcgcgcaatcgcttagcgcctgccaacgcccacgtgctagcttcttcttttatttttgcggtgagatataatgttgtggcctccttgtgctcgaagattcgctggttacgctccttccatatttcctaaacaacgatgaggatcagggtgcgcaatcccttcttgaggatgccagccgaagtggctaacaattcccaccaatctttgaccgtctgagtcgtctcccaatgccgaggatggagctgatgatatcccgagagggcatgcactctcaatctcattgtgtgctacgatatgattgtgatcaggtctatttgttgctcagtttgagaaaaaaatgttatacatactcggcagagtgcacggtctctgatttgctcatttgaccaataatattcataagagtaaaatgtacgggcggtccttaaacttgta

SEQ ID NO: 10480 - DNA, 25333 bp, Oryza sativa
  unsure (1)..(25333): unsure at all n locations
aaaataaaagttatagatcttgatgagttatacaactttgttgttgatgactttttcagttaaagtcgttcactaacaaaaaaaaattctatttgaatttctcaaactttgaatttcaaatttcaaatagtttaaatagagtcagatggagaaatgaccaaaataaaaattttgcacctcgatgagctctacaactttggtttcagtaacttttctatttgaattcatttatcaaccctaatttttcttcgaagttatcaaattttgaaaattcaaaatttgaattgttcaaatgaacttatttgtacaaaggaccgatacaatagttgtagatctcgatgagttatacaattttgttgtttatgatttttgatggttgtgtatgtgaatgaatgtatatgaaagggggatgttggggtgtgacatatcccagcctagggcttaaaaggattaatagaatactcataccaacaagttacaactactcttccggaagccgatctccaaagaactttgatattaaacgtgcttggcatagagcaatttcgggatgggaggaaggacaaaagaaagattggcgtgagagaggtgggacggcatggcaaggctagccaaaaataaaaattattttttaatttatttttttttgggattatactcatctgtgacgggcattaacttaggcccgattgagatgactcatctgtgacgggcattaacttaggcccgattgagatgactcatctatgactatgacgggctaagttaatgcccgtcacagataagggtcatctgtgacgggctatattttaggcccgattaagatagatcatccgtgacggcctatagtttgacatgtcgtctgggtcaaagctatcggtgatgggctttaattagggccgaattaaaaaggttcaatcgcttacggccggtntgtcggaattaaattacttttcacattagtgacttctagcctgtgacggacgccgtgcccaattgagatgggggttgccgcccgattgaggtgatggtatcctttctagtgaaataaactacgataaaaaagaaataactccaaaattaaattttaaaattcaaaattttcttctaagcataattgtaagagaaacaatttggctcggagtttgaatcgattagatatgtaaaactaagattcaactccaaaataccttgttggtgtccttgacattgtacaactaagacggtgtttgaaattaatgaaaatagagaggatacatgaattgagaaagtcattagcgcatgattaattgtcttttagttattacaaacttgaaaaataggtttatttgctattttaaagaaacttctatttagaaatttattttctagttttaattaattttttttcatttttacaaactccgataaaatgattacttaaaaataaacttattttataacaaaaggaaggggctagaatgaacttattacaggacggataaaatagaaatcactattttttctatttatttttcatttagtctataagaacaaagtcatgcttaactgattatagataaccattaaatttgttgaggggcgttttatgcataatttagatctgttgggttctacatttttaaacatcatctattactgttgcttgatctttctttttcccatttcatatatgcctaaggatttttaaataaacaatacaacatttatgtaccccgaattacacagtatccatgggctatgcaatcatcgtgccaaaagacacgcttatttccaacttccaagtatgcgctagtagtagtgctttggtatgcgttttccctcttttttttctatttaattaactgttcaccacaaggctgcattaaaacatagacaaatatactgcatataataaaaaaagacaaatatcagatctccctatatgactgagaaccatattggtttccctgataagtccagactaaagtcaaaatttaaatttttaaacttaattttaaagttgattttaagatatttttcaacgtagtttttatttcagtattgcttctagttcgctaacaatacatgtataaaagtttaaactataaattaatttctatttttgataagccgttttgacttagtagaaaatatgtacaactgatgagagcattaatctgtgttcgacagtgtgagaaggtgaaaaaaaatctcgttttctatactgtacccgaactaataaatgatgtgttttttcaaaagaaaaatctataggaaatttacttcaaaaattcatattaatccattttttaatttaaaataagtaatactacttaaccacattattttgtgtatcttaccattgttctattttctcatttactcaaacacactcaaagcggtagttattttgggataaattttaaacccaaaagagcagtttttttttattgtaaacagaggagtaaatttcacctttagacatttttttttatcgccgttgtttctatttggatcacctttcaaccatttttttcagtgttgtccggataatactacctttgtcgcattttgtaccatcctcaaccgttttatccatttacatctaaattgtcatatatcaaagaacggactacgacatacagctgagggagtttattgacaaataagaacaagagtactcgagcttgttcatatgcatgcaccaaaagaaagtaacaaatgcaagattagcccagtccgaagtgaaaacattggtcaaaggtgatcaaaagtgaaacatcggtaataaaatgtggcccaaaataaaaatttactcaaaagaactttataggaaagttatcttaaaaaatattaatccatttttcaggattaaaaaaattaacactcattaatcatatgctaatgacttatctcatttttcgtatctatcattcttctcttttctccttcactcaaacacacccttaggtttagtagttattttgggacaaattttaaacccaaatgagcgattatttggagatggagagagtaattagaatgtgaagtgggcccatagggcatctatataagtaattttcttatctattgttactagggtaaaaaatcaagagaaatattaattaataaaataaaaggacttaaacataaaaggtagagagctgaaatacaaaatctaccaacggtacattaaggttatcgtgcatcgtgaaacatatgtgcttctattgtgaatacctcaaagtgcatgatcttcacaagaatttgataaaagttgagctaattcctataaagtctagcaaaatattttcattaattgcccttgccaatatatacaagccatacagagaactctaaccagcacgtttattttcccgaagagctagctcttgccttcgctaagaatcgttaattatatggaagaattgctaaaaagtgttacacgtgaacgtttacaacattggccaaataaaacattctgcattttagcacaataatattttttacttcttggcccattatacagcaaagtcatgtctcttttgatatattattttgagcttagatttttttttccaagtttccgtttatctaagtgaaatatgtttgtcgggaaataaacatttccatttttttccaactagaaatattgcagatcttttttccaaataaaaatatcacagataccaccgattattgtcgtttggttctttttattccatttcatatatatttaagaaatcaaactaattctaaataactctacaacatttatatatcttaaacgaaaaatataaatattcacgggtacttttagttggtgagccaatggcgcacccattttctagtttgtctcgaaattaaataccgtgaccgtgtcaggttccacattattcaacgttcctcattacgtgttgctgtctgaaatgtgagaaggacacacctacctaagctgacagcaactagggtgaaacggatcagatattaaataatattccatctgatccgatccgaatccgtccgaaataaggatatgatattggtttttaaaaatctggcggatatggatgtggatatggatagtatgatacagatgcggatgaggatatggtatatccaaaatccggcggatacggattatccgacatttttattggattatccgataggtcctttaccggataatccaaaattataaacacatataaccactctatctattgcatataacataagttggtccatccaatggcctaattcatctattacccgagatttcttactctgaggcttttaccgtttcatgtcacacttgtgtagctgtatttttttatattatgaacatcaactattcatgttgtttagtacttaagcacgtaattattacaatgggtcgtttattgactattgtattattgtcccttacattgctaactcaatgttgtattaaatgtatacacacgtaacatccgataaatttaatccgtttcttaaccgattccgcaccgactctgcaccatttccgacatccgaaacaatccactccgcatccttatccgtacactatccgcatccgctccgaatccgcttaaaaaatatagtttaggatatggtataaccactgtccgtccgaatccgctccgttttcaccgttagcaacactatcctgtacgataaatacaatatacctacctgtgacccacgtaatcaagcctgacgttagcacaatcgtataccataaatacaattcgatgatataattagcatgaggacatagaattctaattaaactcttaattaaacttacgttcgagatgttgctttcccaagcgatcaagtgatcaagaaagcgcgcaaagtggatcagtccgaagacaaagtcctcaaatccatgattccatgcacagtatgaaaatgatgtcaatcaaacatgagtggggcctgctttgcttcttcctctgccaaaatattatttgcattgctttttcaatctataaatccagggctaatttcaggatcattaattagttacggagccgagatggaaaaggaagcgagcgcgatggttgcgaggagaagcaccagccgccatgattggaggaggtggtggtggcggctgctgcctctcgcctgctgcttcgtttgttgggtggcctccacggcggtgacggtggcggcggcagccggcgtcgccgtgacgagccttcctggtttcgacggcccactgcccttctccctggagaccgggtatgtatactgtatgcaatgaatgactgttcttccaatcgagatatgtctcttttttttttctatttgattcgcgaaatgttttgatatgaaggtgcatgtattgtcagtggcggagtatgccaaaaaaaaatataggtgggtcgaacacgcgagacatataaatcatcatacatcaaagtagcagttaaacaaagttaacaccattgaattatcatatataaaagataggaacaattttgtttttaccactagtttgatatccaatattaattttacccctattttttagggtttttgtttttacctcagtttttccaaaacgaaccagccgtttattcctgtttttaacggaagtgagcggagctggagttattgcggtaaagaaatagaaaagaagaataaattatatattttgcaaaatatgtagtgacctttgttcctcctggttattttgcaaatgtttggttgtatcgccccgagaaccgctgcttcctctccccgatccccatctcaaacagtagaaagtgaggtggcggcagcggcggcggcggtgacctggtcgggcgatggcgacggggagcaagcggcgtcggagggtcggccaggcggcgggagcagcagccgtcgtcggcgacccgaccaggcggcggcgacctgaacaagccacgaggagcaagaggccgccatggctgagaggagcagccgtcgtcggcgacctaaccaggcggccgccacaggctcgcactcagcctcgctgctgccgcccgttctgcttgagctcattctttagattgtcgttgtagaacagaatcacttctgtctaggataggatccattgtgattgctgcactgccgcactggtggctaatgattgttcattcattctttttttttacatatagtaaaaaaattgaaatgctgccaaaattatcaaaatcctgaatctgatcatgccactattatgttgatattctatccaaattattatattagtcaaagattgtcaaaatcatttgattttcgaaatgttccgagccacatgtataatatagggataaaaacacaatgaatgatggttgcaaatgtgcaacaataagtgagggtataaacgtcattttgccaataacttaaccatataaagtaaaggtaaaatgtgctttcgttttgaaaaacagggaaaaaacgaaaaccctaaaaaagaagggcaaaattaatattggatgtaaaagtaggggtaagaatgaaattgcccctaaaagatattatgagagctgagaacatttggaggcataggtaagtccatattccaagttttcaaggcctggaatgtcttcttaattgtatcaacacgaagtcctcgaaatatctcattttcaacatagcacaacatcaagtcattgagccactcatctgacatcctattgcacaaatatgtcttattatgttcatagctgagaaagctctttcaacagatgcggttgccacagataaaagcaatgctaactcaattagacgttagactaatggaaaagtcacgttcttctcagtttctactatcttaatggccaaacttccaaaataatggcagccaacaaaatcatcaattcttggaacatgtagaatgaaggtctcaagttgatcccttatattagaaggatcagcatttgagaaatcttgatcatatatttcagtcaagcgagcaatcttatcaatatcaaacttagagaatgggtccttggatcaatagaagaaaagctaactagtagctctgatgagatacctcattgaagcgatgattcatctcagtgataatagcatcaagagctgcaaagaaagtgtcaagacgctaataatgctcttgagtgattaagttcccttgcattcttgatcgaccaaatcttggtattggctcatccatatttggcactggaatctttttttttttgcatcacaaaatgactaattacctcttcaaataatggctgccaagcatcatttctcaaattgaccaaacgtgtcttcacatcaacaagcaatgacatggcttgaacaataatgtactatatattcatttaaaaaaaactgttcgttcattctaatttgggtcctaccacaagcagtcccccttctgcattgatcatgcatttattttgagatttattattgtgaaccctccatgttttttccttactgtgatttgtaaacttggccgatttgaaggtgcccctcaagcaatgtgtccccgacatgtttgcggtgtccaccttcttcgtgaggggcaacggcgcattgactcacttctagacgtatcgatggattgagggtcacttagtggcctccttaataccggaccttctccttatcgttttcccacgtctttgggcctcgctgacggttgcttctggccttgccgaaaactcatgggttagggacatccgtggcgctctcacagtccctgtcctctcccccgggactctcgccctacggatgaacaagatggagctacaacataagacatacaaagtatatactactcaaagaacatatattcaataaagaaatatataaaccgtgagcataaataaataaagaagataattctattaattcaactatagtcttacacaaagaggaaagtactagagacatactcaaaactccgagaagactatgggaccgaagctcctaagctttattcatactaaaaactatagagaatacaaagtggaagagtgaattgctcctttaggtgtgtgttgtgaagtgaaatgagctcctctatttatagcctccgaatgatggtagttaagtcggttgtaggtcaggaaacgggcataactgctagcaagagtgaaggaggagtcgccacgtggaagctcagtggcggggctagcaagcctagttcggctgaaccatggccaccacctttcgccatcgcctttgattagaggatgacatgtgggcccctatgacggttcccggttgtttgttcccattctaagtcggtttgcattgacttgtgggcccatcaatcctcgtactagcatgtgattcgccggaagtgtgtttcttcgtatgccggcttcatttcctcttcactttagtgtataattcttgcatccaagttaattcactaatcctaatacaactacattatttattattgatatacgtgtaagaaatgctaattttccctttattcattgtgctagttagtggtcgaaattggtacgtaatgaccatcaacacagtggtgaggacaacggcttgggctagggggcgtagctatgatgagtgaactagccctaaactagatcggtcttaatctagtcaaaccacctccttgaagagtatctatttgacaacgtcacagatggtaaccatcggtgacagtctatagagggacaccgtcacggatggtagcaaaattctatcttcctatatagttggtacccactaagaggtatttactcctataaagcaatacatgcaagaagccacatcatcaataattttaagccatcagatgatattagtacacagataacaaccgttggatcaagaagctacttattcatcaaattcaatcatttattagttatccattcacctccctttgcttcacctcatagtcacacatagcaccattacatattttgtgcataacaccattttttcttaatacaactcaaattattgtttaatatgtgtgttctgttttattatgcaagatataaagatagcatataattattaggtatcgttatctgaatccattttcagaaaaaacttgagtgaagtagagagatgcaaattgtaactacaatgatacccatattgagtatgaaaataatattcatatattataacaatacataatgatgcttggaaaaataaagcatgaattgtattgtaataacataagtcatatataaatccatattatcatatattttgtatatacatagagtcgcacctaaccatttaaaaccatgatttcgtttgacgataaaactacaaaacccgcggtaaagacgtggggtgccaactagttgtactaaatgattgaagcttcgcaacaatagcaaatcaaaataatacaaaggcttcaattacgaggataggccttcaatgtgatctgaacaaacatacgccacgtcttctttagtgtcatcgtctaggtctatgtgtgaatcaacatggaggtttatgctgtaatcgtccttatcgccgatattgtcaaccccaacaatcattcttttgtcattcctaaagatgcgcagcttcttgtttgcacaacctattttgcaagtacaaatggttcatccacgtaactaatcctgcttagatccaaatttgtcaaaccttcctaattgacttttactccagtgcataaattgacccagcggcaacaaaacaatgagactttgaacttcgtgtagttcagctcacagatcagctttatgcggctgtagtttgggttggacccaagttgatccagaaatgcctatatacgaaccccgctgttttataatcttgtttgacggtgtaaagtgtgtatccattaatatcgtatcgctgccatgtgtcaatatccaaaaacagtcctactggaaaccatgttaatgtttcgcttacgccttctgtcaatgttgcaatatgattcttaaaccattcgttgaaatgggagttatggttcttattgatccagttatctgatcgactcatgttctcctgctggatcttcattacatgttcttcaaagtatggcgtaacttctatcatattttggagcatagagaaataggcctactcataggctagttgggcctgctatattctttttttgcctactgtgccgacatcagataaccttccttcatgacgagatgttagaactcaaacatgtaatcaatgtagaactcaataacctgctatgtcatgtaacattcaatgatgctcctcttcgctttagctctattcctaacatacgatttcagaattcccatgtacatcttgaatgggtacatttcgcttagaatatgtgggccacataattttgtttgcttctcaacatgaacagggagatgaacatgatatcgaagaaaggcagtagaaaatacatctccaggtgatagagggttttgacaatatcttcctacaagctatcaagaccaattgtatctataacctttgactaattgcattgaagaaggcgcacagatgcatgattgtgtgatagaaattagttggaagaatattccttacagcaactggtcagagctgtgtgattaatacatgacaaacatgggatttcattccaaccagttttagatcgtccaacaaaacatacttccatatcatcgctgaatagcccgaaggaactttatatcattcaagcaggattacatatggatcctctcttccatggccaatttgtgtcaagcaagagggaggtacgctcttgctatgtctagattagttaatggagtgagttcacttcaaatattaatctcctataaatctagatgtgcgttcaatccatcttttatctttgctggactattcaacaatagccctatcaaactatcatactcattcttttctacatgtttcagatcaatgcaatgatgcatctcaatatctttctagtatggtagtcactataatatgtccttagtattaatatgttttcttttcttcccaaactcattgcatatgtgttctcgtgaaattcgtcgcacacggaggcctaggagatttgcatcgatttagtgcaggtcctaaatcttgatgaggtttgggcatgccaattaatttgattccgcaactaacaaggtggaaatcgatcgatgatgaagaagtttttcatcaacttgggaagccgataatcaacttagggagatcgaaactaagatcttgctagaataaaaggtggcgatgcatcaaaatttgatagcagctaactttgtatgttttgccttacatccgatgtatagaggtgtctctggccaatctggtgaacttcatgtaatctttcttgttgtaagatggcgaacaaggaatagtcatgcgaagcgcttcccaaaaaccatattgccgccttctcccgatgcagggcgttgaaggcgaaggttccagagacctgctctcccgatcaccagcgcacgccggcgagcgggatggagttgactataagcgatgatgcagtacagaagaggaggaaaaccctagattgattttacgtgtgttgcgtggagacggcggctcaactaatgtagagatattaggacgcacgtatgatcactactccgcataatcgaaccagacatgttgcgcataacttatctggactccacgccgtttcatgcactggattattcggagtgtttccaaaaaaacaaatctgaatatcccgcagcaaaacaaaacaccaaaaggaggcaacatctgcgcaagggtgacgaaccaattttggcggaccattcgacgcgtacttcgtgcactcgcgccgccatgccattccaggccaggtgaggcaagcgagcgagcatgcacgtgtgttccccctcttctctccacctcacatgcctcaagtggcaaggagagcatcctcccttatatagagatctctctctcctaaggtggtattaaacaccctatgcatgccatcagatgaggtgggcttgtaattttccaaagaattaatctttaaatgggataaggctcatctattaattccaactacccccaccaaatctcaaaatcccactgagatttgcctttttccaatgtactgtttatagaccagcggttcgatggagactaattaaggttgaatatccacctggaactccaagctacacttactcacaacttgaacaatggactacgccttaaattgcaagccttatgcaaataagtttcactcaaagtcttatctggtactagaagactacccttcgggtggacgtataagtcgtactccttggtctcttattaagcttcctagaagattcacccaaaatctccatagactgcgaccaacagtcaagctcacaaatgtgagttctttcaagaatgctctgcaggatagcatcttcgataattaaagccaacagaactcattaaggcatagccaacctgccttgcagctcacgagagtacatgcatcttcacttagagagagtttagattgctactctcctccagttaactaatgccttgttcttcccaggttctaattcgcgggatctctgatcacatagactgggttaccgcttgatgaggatgtaaggtcccgatcttccgataggtattgataagcagtcgatttgagcagagtcgtgacacaactcaatccgacttctaaatgaacatcctcctgagccccacaatcgcagcaccacgtctcctctggttatcaaccgtgccgaaacctggttgacctcaccgaaaaggctaatccctgcatgcgaatcgaagaacacaaacaagaacaagatagattgcaacagaatgcatatgaatgattaagcactcaaatttcgggttctacgaatcgatctagtggcaaaactattctcgacagattaatctaagcaaaacccaactctaaacgacgctggctactgaataaatatgattaggaatgtcgtagggttgccctagggggcacaccctattgggctaagcccacaactcaattacaaggcccaaaacccaaattagattccgactggatgaggtacatggcttgttttgcaggttcccgacagctcggtaggaattttgatgtgggaccaaaaccatctgaaagtagactccataagctttccaacaaatactaatgggccccgaaattccttctagatcagcagctaggtccgtttacagttgatgctgtcaagaggcccgaatccgaatttaaaacgtgtagaactttatctcttgtcttctatggaccaaaaagtgatgtggtaagatggaagtggacttagagaaggtcttgatttggtccccaataaacttctttaatcatccattcattccttacgcacagtctcttttctttcgcccaagcaagtacctctgcaaacgaaagcacacaaaactcattgtgtagcaacttttgttcaaatatataacaagtaaatcaaatatagaacatatgtatctttggttcattaatacataaggtaatcatggttatatctgagctagttgtgttcctatcatcctccccttcttgattggaaaccgtcctaggttttaggttgtcatggagcgtattgaacttacctttatctatcacaacatccggtgaagaacatttcttgatggccatatggttggatcctgaaatctttgtagtcgaaaaaccacaacactcctcttcttacaaaccaacttgtaactcatttaaacaactagaggaacttgatagagaattacgtatacgcatgcggtcctttagacaatacctttcatcatgaaaaggaggtgtagtcaaattagaacaaatatatactcgatgcatattatattctcctttactatcataattgccataacatgaaaaatcacattagaagggtatggtatttaagaaagatagcaatttaagctcttcattctcgctagcaatgtgaataacatgttcaaacgcaacacatggtctcaaaccatctccttctatgcattgtctatcacatttcgtgatagtcccttcgtgaaggatctaccaggttgcttgctgtttggatgtaatccaatggtataacttcggagtttctcaatctcctgacaaagttcaattgtcttttcacatttctagacgatttcatgttatcattagaactgttgactttgacaattaccgtttgattgtgacagttcataaaaatagctagcaccagtttttcaaccatagacagatccatcaacagaacacgcagccattccgcctcaacaatagcagtatcttctgccatcagctctgcttctatggatgacctcatcaaaatagtcagtttgcaagaccttcatgaaacagcaccaccacctgatgtgaagacatatccactagtggttttgatctcatccacatcagagatccaattaaaaccactatattcctctagtaacgcaggatacctagcacagtgaagccccaattccatagtaccttttagacagtgcatcactcactcaagcgcacgccagtgatcatctcccaggttagagataaaccggctcaacttgctcacagcaaaggagatgtcagtcctagttgtggtaggtaggtacataagtgagccaataatttgggagtattccaattgattcctagcaattctcttcttcttgcgaagcaacaagctaggatcataaggtgttggagaaggcttgctattagtagccaaagtgactcaagatcttctccacataatgggactgtaagagtgtaatcccatcctcacctctaattagcttaatgtttaggataacagcagctactcccaaatctttcatatcaaaattttgagataagaatgatttaacatcattaatcaactcaagatttgtccaaaatattagtatgtcatcaacatacaagcatataataactccctcaccccctccatggtgatagtacacatatttttttgcatcattgactgcaaagcctacagatatctgtcgacgggggatacccgtagaccggatatagagggtattggggtccgttggtatgaggatctacgtagtacgacatcaagccctaatctagttggtatgggattatatgatggaaaccgcagattacaaagggaataacataactcgatgaccccgatgagaacgtagttgagttgattcgactagatctcccgacgacttggcttctgtaggctccggctccgtaggctgtgggggatgtgttggcagtaatcttcgatgccttaggtcctttcccagggcgtcccttatatactgcgggtcagttgatatccaagtaggactcagagatatcggacccctcacgatatggtaacgacccagtctcgtccgagtaggactcctttcatccgcagatcctgcttctatcacgtgatacatttccttaacgtatacggaaactattcgtatacgcgcgggtataccgtatcggtacccatcgtacatccaaggatagagggtataccttatccgtaaccctgacagtagccgacttctgcttaaatgaactcatgttatcgatcgcgacttctaatgtcggaattgttgtcattctcttctggtcgatctcgctgtgaaaactgtagagactaagagtcatcgacaacactgcgtgaagttcaacggtcatgagtgaatttaaattgaagtctgaaaactgccgcacataacggacccagaattttccggcggcaatctctctcctttccttgggatacgtaccgtcggtagtgtgcttattttgggcatccatttgaagtccgttcgccaggaaactctcctgccttctagcgctcttcgtcttctccgctccccgcaaagaaaaccctagcccacttccttcatcctattctccggcgatcctccggcggcgatggatcttgagaagtcaactttgaccaccgcatccatgaagaagctctaggacgacggtgccctccccggtcgcgggaccttgcagtgggaggctggaggtacagtaccggaacccatcttgggttgcatggttgtagtcgaggattatatttcttgcggttttcttcctccgccttccgagtttcttcttctcgtcttgaacttctatggcctttctttgcttcacctgaaccccaactctatcgcctttctgagcgtcttctctcatctttgcgaggcctacattggggtagagcccttccttgatctcttccgcttttattattagctgcgcttgatggaatccagcagggtatctggatgtgttggattctgacttcaggatgccctgaagtcgcgttacatcacctactagtgcccctcttctcgcatcaagtggcggacgaggtggttctatctccagatagagaactcggatcccgtccttgttgtccctgaggagcaaccggaaaaaattccagagtggaccaccaaacccaccctaactccctccctccaatcctttattgatatcatcgatgatctccgaagacgggggttgtcgggatacgaagtcgctgccgacttcgtaggtcggcggattcagccgctgcaggcccgcgcccatccagcctttgattattctgggccagaggacacgacccgggtctctcctgacttaccgagtttccgttctcgatttattggtctaaacagtgacatcgtggggcgccatgttggtcaaataatgatcagcgcactctcgggggtgggcaacatccacatcccaccttgcgacatggacgcggccgaacgcgccaacacgattaatgtgatcgtagtcgatgattcctttatatcttccctgtctagactgcaccgtgacttcaagttatgcaggcgctccctttgacggacgtcatcgggccccttgtggaccaccaggcagcagcatcgttgaaggagagcgtcaccaaggaggcatctgacgctgtcactgccaccacgagtggcagcaatgttccgaagaggggaaggaaattctcctctgtactcgggactcgccggaaggcgacaaactctgtggtaagctcttctcttgttctttaacgcgtagtcggaacgacttgacctcacaccatttcatcttggtcaggactcggacgcgtctcctccacctcagcgaaggcaaaggctggtgacgatcggtgagaagtatgtaaatgttcttgaggtcttttcattctcgaagttgtgatcgactagcctcatgaagaaaaagaaaatcttcgctggaaggcgcgggcaaaggtggtgcacggtgggactgatgctgtctctagcgcgtcccctacggcgacttcgacagaagtcgtggtcgctactaaggaccaggaggcgacaccgagtagccctgtcgtcggcctcatgcccacccggggcttgtccaccgatgccctcacctggggggagctccaagtggagatggagcgcatcctccaggccggcgctcgtggcataggtcacgagatcgaggaggccagggcggtggcgttgtcggcgaaccagcgtgccgaccagctggcacgcgatctggcggaggcccgcgaggacctcctaaagatgagggagctggtagccggcaacgagatgcagcgacgcgggctcgaggactggatgtcggagctcaagggccacatgatcaacatccgcggttcgctgcgaacgtcgttcaccagcctgcaccaactcgccagggagtgcggtgtcacgactaccatcccggcacaccccgatgagttctcgttgacgtcatcgctcacggaactggctacggcgatggaggagatcccctccaagcactcggccatgatcggcgaggagacgtccaacggtatatgcaccaaggcgtgccatgtccttgcgtgcatgaggctagcgcattccgatctagaacttaagagggccttggatcagggggtggccgatgacgcgcgcaaggttacgatggaagaagtcggtgacttgggggagtctatccactccctttttgaagagtaggatatccatttttctttgtactccttaatctacatgcttgtaaaactctatgcgggtcccaactgcttttatcttgaacatctgtttcccttgtttccatagcatgtgatcctgagtacttttctcgttgtagatatgctgttttcaaggatgtccagcagcgtgggcagcccgatgtgccggtggtcattccgctgctcacacttgagccacatacgccgctggtggagggcgataagagcccgtccgtggaaacaaacatggccatgacgtccttaggttcgtgccttgatttccttcgctcctcgtgttcggatttaattaattagttgtgttctcgagagagaagagtagcttgacttagtccattccgtgttgggaagattttgagaacatgttggctgatcgagatcgtcgaatccagtactggaagacgaaactcgacgtgaccaaactcgaaagggccatggtggaggtgaagaaggactaggccgttgaagctcttcgaggtcgcgaggtgtggttcaactcgtacctcaagagctgctacacggcgatggcgggggtttgcaaggagcttcgagttcaccatggaaatcccgaggagtcagcggctggctacatctcgtggttgaatggggcctatgcatagctcgaagggattggcaagcgcatcgatgaggccttgaagcaggagtgtcgtcgagcgagccgttacgccggagggcatgtgctggcctatatccgagatctccgcccgcagctgcaccttgagttctttcgtgaagggttctcgcattatcggaggacgcccgcgaagatcgatggtcttgcgcagtcgatggcgccacttgccgagaacgttttttgctccatcgattggcgttggccgtcctggtagcttttgtgtcctatagaaaatatctcaaggaagcatgtaacatactttgaagtatttatgacttgtaaggaatacttgtaaaatagaaatagaatgtatctaactaaatttccttactctgggtatgttgtgtatgagtgttttctcactttgcgacttcggctagtcacttgagccatacactctccctagcccccacccttgtcatcggagaatcgttctcgggggataaggctcttggacccttgacctgccttggttgaaaaagcactgaccctagcccccaaccgtgaagttggaaaactcaatttccgattacacggcttggttaatacgcactgtgagaactcgtagatgaccagatcttacatggtcgtttgtctctgcatgatccgacaaggccttatccgctctaggcgtccccagccgaagttcccttaggttccttaaaggccttgtcaggatggtgtaaaaggacatgaggataggtttcaactttaggtgtcatcgtggtctgggatcgtcgggaatgaacactttgacaatattatttacctgaaatcaactttattgaaatcatgagatgtcttacaaatatggatattttttatttatacataaaatttacgtagggaataacagaactcgatgatacgacgagaacgtagtcgagttgattcgactagatctcccgaagacttggcttctgtaggctccggctccgtaggctgtgggggatgtgttggcagtaatcttcgatcccttaggtcctgcccagggggtcccttatataccgcgggtcagttgatctccaggtaggactcagagatatcggacccctcacgatatggtaatgacccagtctcgtccgagtaggactcctttcgtccgcagatcctgcttctatcacgtgaaagatttccttaacgtatacggaaactattcgtatacgtgcgggtataccgtatcgttacccatcatacatccaaggatagagggtctaccttatccgtaaccctgacaatatcaatgttctatcaaatttgcacaccttgccttctataccttcaactataaacccataaggttgatccatatagatctcatccagctctacattaagaaaagctgtcttaacgtccatttgatgaatgagaagaccatgtgaggcagctagggaagtagtacatgaattgtggtcaatctaccaacaggtgagtaagtgtcgaagaaatcttcgccttctttctgagtatagccctttgcaacaagctgatccttgtacttttcaatagtaccattaggccaaagctttttcttgaacacccccttgcatcccacatgtttacacccatagggtcactctgtcacctccaaaatcctgttagcaataatggaatccatttcactatggatagcctccttctagtagtcagcaccaggagatgcgtatgcttctaaaattgacttagactgtgttcatttgggtgtgttgggatcaaatctcctgtgcacggaaaacggagtggtccattagcgcgtgattaattaagtatttattaaataatttttgaaaaatggatcaatataattatttaaagcaactttcatatagacaattttggcaaaaaagcaccgtttagcggtttgaaaagtgtgaatgcgggaaacgagggaggtgagttgggaaagttgggggaaagagctcaatcttaggagtgtcatctacgaggtacacagtgaaatcatgactaaaagacttagtagtcctttgtttcttacttctccaaggagtctcactgtcatcctcctcagtcatcctcctcagtgatatattcatgtgtatgttcagtttgtcctggtggtgtgattgaactgagaattatttcacaggattggctagaagtactgtgtgtatcctttattggaaaaaagctttcaaagaaggtagcgtcatgagtctccataattgtaccaacatacatgtgaggtacctccgatttaactattaaaaatctataggcaatgctgtaatgagcatatcctagaaagacacggtccacagtattagttccaagtttgcacttcttcgttattggtacattgacattcaccaagaacccccatgtgcacaagtaagaaagtgatggttttctctcgatccattgctcatatggtgttttgtccttatttctattaggaaccctatttaagacatgattcgaggtcaacaatgcctccccccaccatgcctgtagtcccacagtatccaacatggcattcaccatgtcagtcagtgtgaacagggaggcgtcctctcatgtatgatgccatgtttctcacagaataagtcaaactcgtttgagaaaaactctccactacgatcagacctaaatctttttatctttctgtcaagttggttttcaatttctgccttatagattttaaaatagtctggaccatcatctttcgttttcaacaaatacacatagcaaaatcaagtagcttcatcaatcaacgtcatgaaatatcgtttttctcccttctcaagaccccatccatttcacaaagatctaaacgtaggagttccagaggtgccaagtttctctccccggctgccttgtaaggcttgcgaggttgctttgattgcacacaattatgacacttagaacctttaacaatggagaacttatgaattaaacacatactgtaaagccgagacatcaagcctctacatagacgggaggcactcataaccaaccaataaaatgtgacataaatgtgagtgccaaacattagcctcattatccacactcatagcctttaccaataaaatatccatgtttagacacgactactttattagattcaaacaccaacttaaatccatctctacatagatgggagacactaacaagatttttgtcgatagtagggacatgctgcatgttcttcagttgcacgatctttcctgaagtaaacttcagatctaccgtgtcaatacatgaactgaagcatgtgacctattctccattaggacggtggaatcccgtgcgacctgataagaacaaaatagtgagatgtcagcacaaacatgtacattggcccctgtatctacccaccagttagtagactgattaacagaaaaaaatagtaggtaaattaccatacccgctttcatctccagtgtttccaatggtcacattggaagacttagaagactaccctgcaggtgccttcatccccttgcgttgtggacaattcttggccagatgaccaggcaagccacacacaaagcaagttctccttagacgcgatgtctttttcccgagttttctcctcaacatcaagagatgctattaacccctcaacatagtattcatgtctcgtgtgttttaagtgcaatattgaaatttttccaaaatgaaggtagtttcgcaataatgcacccgaccacaaatttgtcgggtaagacacacttaaggagttcgagttccttagcctttgtatgtgtttcgtgagtctgctcaactacagaatggttatcaatcatcttgtagtcttgaaactgctccatgacatacagatcattgctagcatcagtagcatcgaatttggtattcagtgcatcctataactccttagtgtcaatcatgtgcatatacacctcgactagacgattgccaagaacgctaacaatgcatccaattctatcatttatgaattttttctgcttttcagcaatgagaattcctttagatttgccattactaacccagaagcatttcatcgccgtcaaccatagagtgaccctgttctaccatcccttaaagtgtataccggagaatttatccagcctcagtgcattggcacaataagccatagttaaaccatagtgcctataataaggtttttggattgttgaatatataaacacataatgatttagtttattccataaataaatcatgacactgcagatgtaaactagcattatcgcatcatacgatctacacatgtaaactagacagtaaagcatgagcagatggaatatgcgaaacatattgaatgcgtatcgagggttttcgaaaaccagcttctcagtaggaaggactcacaataccatgcgttgacgacggtgcacagcacgcgagcgaagagaaagatgagctgatgtgggcgaacaaggagcagtcgtgcgaagcgcttcccaaaaaccttattgccactatatcccgacgtagggcgttgaaggcgaaggttccgaaggcctactctcctgtttgccggtgcacaccggcaagcgggatggagtaaactacgagtgacggcgcagtacaaaggaggaggaaaaccctagattgatttcacatgtgttgtgtggaggcggtggctcaacttatatagacatatcaggatgcttgatcagggtgctgttgacggtcattatcaatcagtttcacccgtcaatattaccaaaataaaggagaactagttatgcttccaatgcaaatttatgttggaataacttatgttccactagcactacgattctaacctcttgcaaagaataaatacaaaatggaggagaattggcagcaaaacggacaatcaatcaatcggatactgtcaagaatcagacttgtggacaagtgggctgaaaacacagaattgacacgatccaacaggcccagaattcactgttctggataagggagaagtcaaagaggccacctgctgagattgggccagtttggctcagcccatggttcggccgatctcgtcgtttagccgttcaatgcaagattggcgttggactgtctggattgctttcttatggcggttgaagggtattactgaccttcccaacaaccataaccgtcattactaggctatttaaggccttcacctcctcacttcttccacacactcaagcaagtagcttctcacattttctcaagttttgtatagtctctagagtatagtagaatagaaatagaatagagttcttcagtcctcggagtcttcggaagagttcgggtatggctcttgtaccttttccttctttaataagacttgtaatatttatagaatatttttctcaatatatttacagtactttacttcatttggatcattcgagtaccagcttctgatttattatttgagatataattatctagctagattactcgagagatgcaatggtgtgggtataatgttcatttatatgattgctctatgtcatgacgatgattgtagagtagtatttggtagcataagcgaggtgcttaggctattgaatatcattatttggggttatatgctgtgggacagtagaggtgggccgctggtggtgacagctcagtatgtgtattcctccacgttagtatataatcctgagttactttcctagggatggtactccttcgtattttagccgcagttggatggccatgacgggttgtcataaggaactcggcaaccaggggtggtctctcgaaacaccaggaggtcatcgtaaggggggtattggttatatagttatatagtagataatatagactaaagttgtacgtatgtatattagaagtataggaaatgatttttttcttattcttttccacttagcctagaattagtatgtatgagaatattgagtgcttctactttgtgtcactctacacttgaattgaattaacccctgcttagactttgattattacaagtaacatataaatattagcttggttctctctattataatcttcccacgggattaaacaaatacgatacccttagaatactcttgggtaaatgctacaatggtatatccatgtgcttgcggatataatctgtaaccataatataccatgaatatgtatgtgccattgctgagaattatatttctagtaatgttaagaaataccaacaggcgcttgcacgatctccactccgtgtaaccgaactggataagtcgtgcgtaacttatccggactccacgctgtttcacgcaccgggttattcggagtatttccaaaaaccaaatctaaatttcccacagcaaaacaaaactgcaaaaggagactgcatctgcgcaagggtgaggaaccaattttggtagaccattagacatgtacgtcgtgcgcgtgccgccaggcatggccaggcctggcgagcgagtgcgtgcgtgtgttccctctcttctcttcacctcacatgcttcaagtagtcaggagagcatcctctcttataagaaggtctccctctcctatagtaggcaagttggtattaaactccccatgcatgtcatcccatgaggtgggcttttgtgactttccatataattaatctctgaatgggctaagactcatgtattaattccaacataacaaacatgcacatgtctgctccatgttcttcctgattttgtgatccaacacccgcttcatcttcaatattaataacgactgatcatgc

SEQ ID NO: 10481 - DNA, 5435 bp, Oryza sativa
caaccgggacttcccgctatttccaaattctttttaaacctggttagggttaagaaccgggactactgataagcgcactgaatattattttccattatatatgtgtttctaaaatagaagataatgcattacaattgtttaaagtaaaaagattaatgacaattacttcgaaaaattattgttgtctgtaataacttaagtggataaaacgtaataagcaaatatatgatttaaaattaataaaaattctaataatcatatattcttagcatatgaatgatattattaaattggtaaaaactctaattaacatatgtatatacatacgacatgatttaaaattaataaaaattgtaatcatcatatatacttagcataggaattatatgaaattaaattgtgaaaaactctaattaacatatgtaaatgccacatgcatgatttaaaaattttaaaaattcgaatagtcatatataattagcatatgaatgatagtaaattaaattgtgaaaaactctaattaacatatgtaaatgccacatgcatgatttgaaacttttaaaaattctctagtcaattataattagcatatgaatgatagtaaattaaatgttaaaaactctaattaacatatgaaattgccacctgcgtgatttaaaacttttaaaaattgtaagtatcgcatataactagcatatacatgatttaaacttgttaaaacctctaataatcgtgcgtaattaacatatgccatacatcaattgatttatatggataatcaatacatccaaaatagtttacatcgtgtacacaataataattacggtaatacatcggcggtgacagttgaccgcacgtactttctcctcactattgttccctccttgtgatcgctacgtgagtaaggggtgtcttcatttgataggaggatgctagggtcaatcgtcaccgtgaaagggggttgcccatccaactgatcgtaatcctcgtcagtcttgtcctcaacttcgatgatttttcttttgcctaggagaaccacgtgacgcttaggctcgtcaggccctctgcccttctttcctttgctagacatgtccttcacgaaaaagacttgcgttatatcattggcaaggacaaaaggttcgtccgagtatccaaccttgttaaggtcaaccgttgtcatcccactgtcatcaatcattacgcctccaccagtcaacctaacccattggcaccggaacagagggaccttgagaggaccatagtcaagttcccatatgtcctcgatggcaccgtaatacgtgctagttgttccatcgtgtcccatggcatcgacacgaatagcgcggttttggttcgtgctcttcatgtcttgggctctcgtgtagaatgtgtacccattgatctcatatccttggaatgtcgcgatcgacccagacggtcccctcgccaggaaggcaagttgttggttgatcgactcgttacccatgagatgttgtcgtatccacgcggggaaagtatcaatgtgatgccgtgtaatccatgcatcagacttaccgatgttcctggcgcgaactagagccaagtgctcctcgatgtaaggagctaccaatgaagattgttgcagaaccgtggaatgggctttacggaataaattgttgtctaccgtcattattgctttccttccgagagttccctttccccgtagttgggtacattgctatacaatattattaatcaaggccgtgaacccacacgaacctgccttaacccaaggcctacgatgattcagaccgaactggcaacccgaccctgggtcccagctcgtcccaagccaacccaggccaaccattccacattttagttgttaagcaggttttaagaattaaacactaacttgggtacattgctcggcttgcccataaccgagggcgcggctattcgaatagattaaactctgatcaaaggtgtacatctttacccacaagacacatcttcctcacgtgtaaccacgtgccacataccaccacggtatacggacggaagacgtgacatagtttccaacccatcctagccatagacaagagtaccgacccaaccccacctacggccggaacctccgggacaggtaggcaggactgagcccctagcagcaggacaccggccctgtgccatgacatctcgactaccgggccgcagcttgtgtagccttcatttgtcctagagatgtccatcgacccccgacttcatccatctccatccgtgtacttttgtttataaccagactgagccacaaactaagccttacccactagacatgtggaggtacggtagtgctttgcaacagaggcccgaagaccggtccttatatggccgaggtgctactatcaaaaccatgcaccccgagcccaacctaaaaccattttggggattttgaatagagggggaggtgtgaatccaattccacaataatccaaccattccatagtgtccaggtgataagagtgttcccaaagtctagagttgtaaaaccacctaatgttgcctaattaatcagcgaagcatctacctaaaatcatactagtggtaccatgagtagagtttccactagttggggttttgtttattctagggtgaaaaaggaaataataacaataacaacaataaggtcataacaaaggtacataggcatggctagataaaacagtgataacgcgggaatttaaataaagcgataatgcaataatttaaatcaaaataattttataaactgggattcgatatgttcaaggatgatgtgacttgccttgctcgctttcccaaacgtcggcttcaacctccacgaagagcggatcttccgaagctgcagcgtctacacgaccaacggaaaagaaaaggcttttactctaataaactccatataacaagcaggaacaaagcacaaaaatgggttcttgacttcttaaggaaaaattagagacttgaacggtctaattctgagttcaaatggccaagttatggtcatttgaagtttatatgctctttaaatgaatatttgtgaatttcttcatttaaattttaatattaaaagggtttattgcgtcagccgaggggagggggcgcgcggaccatgtccacgggagtggggcccacgcggcagcctaacggtccacggtggaccgggcgcacccgggctcgcaccggccggcgccgtgggtcccacgcgtcagccgcacctaagggcgcgggcggctgacggccgggccccacaaggcagccactcggcgcgcccgagggcggccaagccggcgcagccggcgggaggcggcgcccgcacccctatggtcgtcggcggcggccataggcacggcggagcggcggccgaaagtggggaagggaagggggaaaagaggcggcggtccacggctcaccctaggtcgacggcgacgacgaaaaaggcggccggagcggaggaaggcggcggcgtggctcgggtcgaaggggtcgaaggcgttccggcggtcggcaagcgaaacggagggatggacgaggtcggcgaggatacggcgaagccgaaggaggcggcgccaaggtgggaggtggtccggggcgacgacggcggcggaccggagctcggcggcgacggcggagagagagagcgacggcgcgagctcgattccggcgaggaggaagggcggcgagaggcggaaacggacggaggaggtgcggggagggtttaaatagagccggggcgagagagggcggccggggaagggaggaaactggcgcgggaggtcgtccgtcatcaatggcgccggcgagatttgcgggggcaaatccgcccgtttgaacgcgagagagagagggaaaaaatggggggaaagggagaggggatcacggggagtgatttccccctctttattgcacgcggggacggcgggaggcggcgggattcgcggcggcggcggcgctagggcgcgggcgaggcggcgggagcggcgggaggaaggggatgacgggtgggccccacccgtcagcgagggtggcgggcgggcccgcccttcagcggcacgcgcgcggggagaggccggatgggccgcggggagaggagagagagggggagggagatgggccgagccggcccaagagggagagggagggaaaggggactttttagagtttttctttttataaaatcattttaactttgtttatttcttaataattattatttgtgctctgaaaattccactaaaatttatttacgcattttaggctttttaggaaatatacaaaaatcctccaagccttatttgacttttaactttgcatattttaaattgttggaggctttcacacggattttaattattctaggcataatttagaggatgtattttagagtcgttttgggacgtgacaactttcactatagttttccttctcaactattttataaaaccttctttagcaaatcaactaaatttctatatattctttcttccccacacaaattttctccctcatcaacttacaactaaattttggagacaaaaaagtgtgcaaaacatagttgcaaatgtaacatgacaaaaaaaatattggaggatgaagttacaaaccttttaggcacctccgatttgtacgtaatcaccaaaataaattcactagaaattttggcatgacctcccctcttttttaaagaaattttgaagcttgctcgggcagctggaggagaaagaagacatatatataggggtcggactttagtcccggttggtgttaccaaccggggctaaagatccccgagatctttagtcccggttggtaccaaccgggactaaagttacgaaggttagtaacaccaaccgggactaaagatcccggggggcctgacaggcgctggcagcatttgaaccgggactaaagatgatctttagttaccaaccggggctaaagatcaaatatgcccgttaccctttttaactaggactaaagatcatctttagccccggttttgtttgtatcggggactattgtggaattcggccgaccgacgaaagatggtttctccaccagtgttataaaatgttttggctttggttaaaattaaactaaccaagtttataaaaaaaataataattttttcgacccaagataaagttattataaaatatatttaattattaatttaataaaaattaattggtaatgtaatacaacttgaagcagtttaactttgactaaagtcaaaatatcttataacctgaaactgtcaattaactatattacaaagttgaaaagttgttttttaaaaacatattctactaaccgtgtatatatagaatttgttttataaaatcataacgtttagcttgcgaagtgtgctgcccaaaatatttattcattcatgacattcgaacagggcaaaaggtact

SEQ ID NO: 10482 - DNA, 1731 bp, Oryza sativa
attacaaatctaataatcttatactaaaactcaaatagtgatgatatatgctaagtctaggtgatgtatattgtaggaccctagctagtcaattattatatactaagtctaattagaaatataataatcttatattaaaactcaaataatcttatatgctaagacaaaaatagccatgtatgctaagtgtaactgtcgtatattagaaccctacacaatcttacatgctaagtctaattacaaatctaataatcttatactaaaactcaaatagtgatatatatgctaagtctaggtgacgtatattatcgaaccctagctagtcaataattatatactaagtctgattacaaatataataatcttatattaaaactccaataatcttatatgctaagacaaaaatagccatgtttgctaaatgtaactgtcgtatattagaaccctacacaatcttacatgctaagtctaattacaaatctaataatcttatactaaaactcaaatagtaatatatatgctaagtcttggtgacgtatattataggaccctagctagtcaataattatatactaagtctaattacaaatataataatcttatattaaaactccaataatcttatactaaaactcaaatagtcatgtattctaagtgtagctgtcgtatattagaacactacacaatcttatatgctaattaagtctaattaaaaatctaataatcttaattgcattacaaatataacaatcatatatatataattacgtcacttgcctgggcgaattccttcgagggctagctctaccagtccggcttgagggacgactccgacaacgtcttttctgcaagatacaaaaagatgtattaggataaacgcgaagtaacatatattgcatttgacgttcacgtttcgttcacgatatcgttcatgttcgcattctcgttaaggtcacgtttcattcacctacgtttgttcgttcacgttcattaacttacctataattgcatttcacgttcatgttcgttggctcgttcacgttcgtccgacaacgttctagttcacgttcattcaccttgttgtcgttcacgttcgttctctcgttctcattcacgttcgttggctcgttcacgttcgttcgctcgttctcgttcacgttcattcaccttgttatcgttcatgttcgttcgctcgttctcattcacgttcgttcgctcgttcacgttctcggtgtggcggtagcgggacggcggtgtggcggcagcggagcggcggcgggatggcgcggcagcagcgtggcgccgcgcgcggcattggcgtggcacggcggcagtgtgcggcgtcgtggcgtttcgtggcgcggcgtcgtcgtggtgcggcgtcgtgtcgtgacgaggtcggcgtcagcgtctgaaactcggtggccggcggcaaccgagagggagagagagagagatcgagatcggagagagagatcaagagggaggcggcgcgcggcggctctcaccccagagatgcggcggcggcggaggaggcggaggcggcggcgacgacaacgagcgcgagacgacggcgagatacggcggcggcgtcggcgcgaggatgccctaggcagtggcggcgaaggagaagccgagagagatcgatcgggcaaaaacttctaagtgttggtggagaagacgagggcgcgcatcgggaatatatatagccctagatctttagtcccggtt

SEQ ID NO: 10483 - DNA, 3327 bp, Oryza sativa
ttgtcccaagctccaccaaaatcaagagcgcaagctctcaacatatcttccaagatttgattgacccgctcggtctgaccatcagtttgtgggtgataggccgtgctgaaatttaaatgggtccccaattcttcctgcagcttctgctagaattttgaggtgaactgactccctcggtcagatacaatctttttgggtactccatgtaggcacatgattctcgaaaggtaaagctccgccaaccttttgcccgtatatgtggtatgtactggtatgaagtgagcaaccttagtgagtcgatccacgactatccagatcgaatcgtgacccgatgatgtccggggcagtcccgttataaagtccattccaatctcctcccatttccattccgggatttgaagaggttggagtaaacctgctggtctttggtgctctgccttcactcgttggcaaacatcgcagagtgcgacgaattcagctatttctctcctcatgctgacccaccaaaacttttctttgaggtcttgatacattttagtgctgcctggatgaatggagtactgggtctgatgagcctcggtgagtatcagatccttcagttccttgtcgtcaggtacacacaatctttctcccaaccagattgtgccatgctcatcttcgtggaaatcccgggcttttccgactctcatgttctttttcagctctgctatttcagaatcatttacttgagctgctctgacttgatccacgagcgtaggccatgcctccagagcggctacaaaaccgtgttcaacaattcccacgttgagatgctcaaactcctgccgcaattcttcacacatgccctcgatgcatagggcagtgcagtaacttttcctgcttaacgcgtctgccaccacattggctttacccgggtggtagtgaatgctcatgtcatagtctttgattagttccaaccatcttcgttgtcggagatttaggtccggttgggtgaagatgtatttcagactcttatggtccgtatatactttgcagcggttgccaatcagatagtgcctccagatcttcaaagcatgaaccactgctgccaattccaggtcatgagttggataattcccttcgtgtggacgcaacagccgcgaggcatacgcaaccactctgccctcttgcattaggacacatccaagtccgtgacgggatgcatcgcaatagacttggaagtctttcatctggtcgggcagaattaaaactggtgcggatactaatttcttcttgagctcctcaaaactcttatcgcactcaactgtccatttaaacttctcatctttcttaagcaactgagtcatgggtcgggcgattctggagaagttttcgatgaatcggcggtaataacctgccagtcctagaaaacttcgaatctgcgacacggtcttcggtggggtccatttggtaactgactctacgtttgatgggtcaactgccacaccctgagctgtaatgacatggcccaaaaatttgacttccgtcaaccagaagtcacacttgctgaacttggcgtatagctggtgctccttcaacttctcgagtaccaggcggagatgttgctcatgttcttctttggactttgaatagataagtatgtcgtcgatgaataccacaacaaacttgtccagaaattccatgaacactttgttcatcagattcatgaagaatgcgggtgcgttggtaagtccgaacgacataaccgtgcactcatataatccgtaccgagtggtgaaggccgtctttggaatatcctcctcccgaattctcaactggtggtagcctgatcgcaggtctatcttagaaaacactttagctcctttcagttgatcaaacaaatcatcgattcgcggcaaaggatatttgttcttgattgtgacctcgttgagtgcgcgataatcaacgcacatcctcttcgtcttatcctttttctccacaaaaatgaccggagcaccccaaggtgaagtacttggtcgaatgtaccctttctgcagctgctcatcaacctgcttcttgacctcggctaattcattagccgccattctatatggtctcttgtaaattggagcggttcccggtgccaagtcaatccggaattcaatctctctcttgggtggcatggtagtgaggtcttcggggaacacttctggatactcgcagactatgggtatatcttccaattccctcaagttcttctccacggtgtccactgggatttccgcttcaatttgattcaaagagacccctcgctttggtgcgtctggtgattcgtacactaccgtttctcccttctcgttggtcaaggtgacggtacgattcgcacaatcgatgactcccttaaacttggtcagccaatccatcccaagaatgacatttaggtctttggattcgagaagaatgaggttggctagaaatggtgatccttgaatttctattgttatagaagggctgaattgaaccgaagtggagctattccctggggtatgaacccgcatcggtgtgctaagttcctctcttattaacccatgcatcccgacaaacttctttgaaatgaacgaatgcgttgcaccagaatcaaaaagtactgttgcagggattgagttaacaggaaacgtacccagtacaacctctggtgctgcttgagcctcctccgcggacgcgtggttgacacgagcctggataaaccttggcccggcacgcctaggcttcgggcatttgtcagcgaagtggccaagctcgccacagttgaagcaagaccctggttttgttccagtctccttcttggcttgcgcggacgggcctgactgtgccgatgccgttggtgggcgtggagctgcaccgctgctgggctgacctccatggtggttctgactgcctctggcgccctggggaaagttgctagggttgaacgggcggtactggcggacgatcatggtggtaggtccaccctgctgcccggaagcgaagcgcggcctctggtgacttccctgaggtgccctgaactgagcggccttcctcttcctatccatcttgttgcgttgatcctcctgacggattgccttgtcaactagcctctcaaagtcagcgtagtccccagatatcagttggttggtcagctcgtcatccagacccgccatgaacttttcctgcttctcggcgtcggtgcggacatcctctggtgcatatcgcgcgaggcgattgaactcatggaggtactccgtcatagtcctgttgccctgatggagtgcccgaaattccctcttctcttgtgccacgaccccgtct

SEQ ID NO: 10484 - DNA, 22392 bp, Oryza sativa
agagggaatcaccgggaataattcccccctattgattgcacgcggggaggacgggggcggcgggattcgcggcggcggcggcgctagggcgcgggcaaggtggcgggagcggcgggaggaaggggatgacgggtgggccccacccgtcagcgagggtggcgggtgggctcgcccgtcagcggcgcgcgcgcggggagaggccggatgggccgcggggagaggagagggagggggagggagatgggctgagccggcccaagaggaagagggagggaaaggggactttttagagtttttctttttataaaatcattttaactttgtttatttcttaataattattatttgtgctctgaaaattccactaaaatttatttacgtattttaggcttttaggaaatatacaaaaatcctccaagcctcatttgacttttaactttgcacattttaattgttgggggctttcacaaggattttaattattctaggcatcatttaaaggatatattttagagtcgttttgggacgtgacaggaagcacgttgatttctatgtcccagtgtgttgtatattggccttgcactacaattttgatgtattccttgtttcccagctgcatctattccactaacgcctcattctcatttgttgcatcaatagtcaacagtgagttcagcttgtcgtcagcctaatcatacgcctagcaattactatatggtgcaacaacctctttcattgcttcacttaggccagagtaatacacattaaactcttgcacagattcgacatgagtttgttccaagaactcatcaagtaaataatttgaggaagcagaaagttcttgttaaaatatacggaaaatagcaaattgtacatgtacacaagaaactagaagctggctccatggaagcatttcatcaagcaacttgcatgcagcattagagcgggttgagctctcacctgctcaccgtgtggttgcagccgagaaaaagcggagaactgcaggggttcgagggaagatgcgacacgctgctgcgtatggacgtcaatgggaggagcgaggaggcaacagacggggcggcagcgctgcctccgcagctttgatgactccactagtattgccaggctataccctttcttattcactctagctacaaactttctccaacttccagtgcatgcaagttgtactacttcccactgccaagcatactcaccccttacaggcctcacagttttgataacaaacttttgaacaattggatcaaccctaaacatattatgcagccaccctaggacatcgtacataacctactactctagtgaatttaggcatataagttcaaatctaccctgctaacgcaaaattagtataggagcatcaccgtcatacgcacaaataaccacatcatatgtcatcttgatagaacatgaaaaaatgtcttaccatggaactacccaataatttcacatgtggttcagtttttactgatgcaatacaacttcattaaaatacggttcaacgtcaacttaatactccgtgttaatttttactaccgccaattatgcacagtaacatacgtgctaccaaaaacctttttcactgtaataataaattaatactaagtaaaaaagacatgtactcaccaagtacttacttaaatatttaactactctaactattctagtaaaactaatttaaatctgtgctaacatccagcattttacttagggattgggaatttaaccttgcaatcacctgagggagggcctccactgccgctcctctcccgctgtctgcaggtgtggcctccttcctctctcgtggcctccagcagcgtcctctcccacagctgcactccccattcattgccgacgccaatgtgccctctaagtggtcctccctcttcagatcaaaacgacccctgtcgagctgtggggaaggatttaaaagggctgtactgaatgcccattgttcaataggggatatactggggccaattgaactactgtcattagacagggcctgcggctgttagttgtgggcctagtcgaactatcaaagttcaacaagcccctattgaaccacccgcagtttgaatggcttggctcaccgcgcttccaacaattgatatgcctatgttgaacttgtgcccttcgacaagcctcacatcgaacatcatgaatttgattggcttctactttcacgattataattaggcacaaaatatttttttctcattttccattaaaataataatatattttttaaaaatccaataacttcaacacaatgacagagttaggcatcataaaaaagtttgcgccggcaataatgatcataatagttataaattcttttatttgcatatacgtagatcatagtacttgtcttccacccatttgagatgaacgctactataatgatcttctccaaactacgacttgctacaatagcctccaaatgatagttccagtatattccaaaatgtcgtattcgtagggtttgatatgtatttctaataaaatcaatgccacttctattaatttaatcatgtggctaaaagtatttgttttctaaaccacaatgggtggttagctacatatgtttctccttcttcaacgattgtggttccagccttggtacaaagaaatgaaaacttattggctattcaatgccagcgatccatatatatcatgtgtgcgcaatattactgttgcagatacgtggaggtgaacgagagtactagcgtgcgcctcttctactactttgttaagtcagagaaggatcctgatgtagacccacttttattgtggctatcaggtgggccaggatgttctagtatctctggcctaacccacgagataggtaaattaactagcaggttttttttctcaaattattaaaaagtttacattgagttccttcggataaacaatatatattatattataaaccatgcttataggtcatgttacaataaggcttgttgtacttaacaaattgtttatgtccatatatttatagggccattccaattcgctgcaaaacggtattacagtggaggattgccggaaattatctaccgaccagagacttggactaaggttgcctacattttttattgaatgtggcaacaaagaaaattatttgtatctctgtctcaaatgaaaaaaaaggcatatgcccttatccaggttttaagggatgaactttgtatggttttgcaggtgagcaacataatctttgtggattctcctataggggcagggttctcatacgcggcaacaatggaagggtccaagtctagtgataccaagacagtgaaacagctttatattttcctcagaaaggtaactctgtgctgaccaatgcatgcccagaatttcagatttttactctatctgtcttgtatggaattggtttaatattttttttatttgccttatggttttcttcgagaacatctgcgggctttgaatgtcatttcagtaacatccaccatcagttacaaaatattttttttaggttgctcagtaaattctatggttaggtcaaaagattccttttttgtcacttgagttgtccatttttaaattttaaataccttagattttctttctaagcatctgattggttctaggatcattgagatgatggaaatcataagaatcaatgcaggattgcttatattgtaatataaaattggaatcctagagctccttatattttgaaatggacggagaatgagaaagtacatgtacagcacataattaagtgtgacttcaccatactggatgtatcaggaagtaccacatttaccatttagtaactagcagttactatgaggtaccaaattctgcaacaaaaaatattcttgtactatttgaaatgctgcacaatatatatagatgtaacaaataatgaaaattgaccattatactcccctgatctacttcaataacttaatcatctaaactatttttttggctcactttaatccctacacaattgaaaatggttcactttagttttttttaaaagaattgttcactttacttcttaataatatttctgttttagttcctctttatacaagatatattttaatctaaaatttttcatgaacgtttgtgtcgatggtggatacccgtagaccggatatagagggtattggggtacgttggtacgaggatctacgtaatacgatatcaagcaaacaaaagacaaggattatactggttcaggccccttgataggtaataaccctaatccagttggtatgggattatatgatggaaaccacagattataaagggaatagcggaactcaatgataccgatgagaccgtagtcgagttggttcgactaggtcacccggcgacttggctcctgtaggctccgacttcgtatgctatggtggatgtattggcggtgagattcgatgccttaggtcctgcccagggggtcccttttataccgcgggttacttgatctctaagtaggactcggagatatcggacccctcacgatatggtaacgacctagtcttgtccgagtaggactccttccatctgtggattctgtttctatcatgtgatagatttccttaacgtatacaggaactacccgtatacgcacgggtataccgtatcagtatacgacgtatatccatggatagagggtataccttatccgtaaccttgacagtttgaactttaaaatctccatgtttagttcagtatttggtgcttccaacatatgtagacagtgatataaaagtctaaaaaaatgttaagacataaactgtaatgcatctatctccttatgtagagagaagaaaagaaaagaaaaatatcgttacgaagtaagccgaactaatttcactagttaggggtgtgaattgagctgcatatagtttaggcggtttactgctttcacaaaatagttcaagagactacaattaactttttcataaagaaatatcataaaaaagaaaaaacagttttttataataaaataaatgtgtgatttattttctctagggaaacaaaagtttgtgtttacatcagacatagtagtccttcatgtcaaattatccccaatgtatagttctattcaaatgtgagagtgtcatgttactttccttcgatagcaaacacagtaacagcaaaacataacaatatgagaaggcttgtgtataaggtctatcacggaagtctgcctacgaaaaagccctccattttcacatgcggccagctatatgcagccatggatctgtcaaaatagccttgtcccaggcagccacctatggaaatagaggctttacggcatctattgcttgggacaagatgttttcgcatgtagcccgtgctttattgccttgtccattaaaaattaatgttagactttcttccaatgaaaatttacctttgttcaccttaattgggtttgtttgcagaatttgctattctaattttgatgcttgtagacaaaatttagatttttgctattctagtttccacacctatgtatgtgcaacaagttctctcaagctatacggaccaagctgtgaatcaagttaattttctaatctaagctatattgccgaagctatgaattaaaatgagtaaattctttatttccccatggtagccaactatacggccattttcaagttttctagattatttgtccaatgatccatcaaaagaccatgttgtgtgtcataccatggaaaagagtttccgaatacaacattaagtatgatattatgtctatatggtaagtaaatcgataatgatgcatcatacagttattatgttcttgagaatttttgacacttttcattattgcctttttacgcccatccggttggaggacgctacacatgccacataaatgcatactaacagttacaatatttttttcttaaattatttttgttagttatatgcatcatgttaattgtgacaaaacaatactattatgaaatttagtttctacttgaaatatgaagctgcgattgtcagggttacgggtaaggtataccctctacccttcgatatacgtcatatatcgatatggtatgctcacgcgtatacggacgttttcagcatacgttaaggaaatacatcatggagttcacagatggaaggagtcctactcggtcagaactgggtcgtcattgtgtcgtgttcggactggcctctccgagtcctacttggagacagttgacctgcgatataaaagggaccccccgagaggacctaaggcatcgaatcttagagccaactcacccaccacagcttacgaagccggagcttgtcagagccaagtcgcggggagatctagtcggatcaactcgactacgatctcgtcggtatcgtcgagttctgctattccctttgtaatctgtgatttccatcatataatcccatatcaactggattagggctagtacctaccaaggggcctaaaccagtataatccctgtttcctgtttgcttgatgtcgtactacgtagatcctcgtactagcgtaccccaataccctctctatctggtctacgggtatcccccgtcgacagtggcgcgccaggtagggggacttggtgctcaaggttctactactatgacatccagcttcgccgacaacagcgtcaacaccaacctcaaccaaggagttcctacttcaacaacactggtgtggactcaagtcggtgaaatcatctttccggtttacaccacagtgccgatctcagctggtccgccaatggccagaaacgagaatgcagtggctacaacctggggcgactccatgtcgaaggatcctcccaccgaagcggagatcggaacgtcgacgacatccgagcccgagaaggatcctaatgcggccaagccttgtattcccaataggaatcacaagccgacgaggattacttccgaggtgacaaggtcctgatgtcctatcacaaaaccaggaaacacaccctgcaagcctgctggatctttctcaacgtccatgctgaaattcgtgcctgcaaagagcgtggaattcagcgtacctctccaactcatgatgtctattgtcctattcacaagacaaagaatcacgacctctcgagctgcaaggtctttctcagcgccatgaagacgccacctcctaaggtccagcagtcacacatccccatcagggatgaagacaaggaacagggagcgacgccattttcagatcgatttgttggggtaatcgacatcgatccccacaaaccatcagtcttgcactttctcgaagactatggatcatcgacaacaagtatgccgcatgaggtattggctatcgacgatgtcggcacgtcagcagcaccaatacggaagcggagaatcaagtgactactccggcccagcacatcagagccgtcaacacaatactgagggaaaccccctacgatcctgttctgaacgacgatctcgcacgttggacagaacgactacgggaatcaatgaccaacctcaacaacgcgttcgaagagaccgctgctgcagcgcacccggaacagccaccaactggcgatgctaatggtgaagaccctgaacggcgggaatcgcctcatcgagccacccctccgcctcgcggcaccggcgatctccgcgatcacctgaatggccgccgagaggcacgacgcacacgagacaacgagaaccgttcccggcgtcatgtctcttcacggtgtcatgatgacgaagatcgaggaggccgttcaagcgaagaccgagaccatgataaccgccacaatcacgacgatcacgaatggcaggtgctgggcgatactggtcaaggacgtcgccataatgatgacgatgatggagacgacgacaggattctcgagaacccagccgacgtcctcgtaataatacgctggaaccaagcgacccatcgtcatcgtcatcatcctcgtcatcttcatcatcagatagacatccacgaagaacgtatgatcgccgacaacccaccgcccccagcgctgggtgtagagctttcggtcgttcacttcgggatgtccgatggcccgaaagattccaacttggagcaatagagaaatacgatgggagcaccgacccggaagagttccttcaggtttagtccacggtactctacgctgccggagctgacgacaacgcgttggcgaattacttgccaaccgcattgaaaggctctgcatgttcatggctgatgcatcttcccccctactcgatctcttcgtgggcagacttgtggcagcagttcgtagccaacttccaaggaacttacaagcgccacgcgatcgaagacgacctacatgcgttgacacagagcccgggcgaatccttaagggattatgttcggcgctttaacgagtgtagaaacacaatccccgagatcaacgatgcttctgtaattcgcgctttcaaatccggtgtcagagatcgctatactactcaggagttggcaacgaggcgcatcacgactactcggagattattcgaaattgtcgaccgatgcgctcatgcggataacgcactgagatgcaagaacgacaaaccgaaaaccggagaagagaagaaaccagccaaggacgcacctgagtcaagcaagaagaaaaatcggaagagtgggaaaaggaaagctcaatcagaagttctcgcaacagaatacgcggaccctcccaagcgcccagacccacaaggcagcgacacgaagaaagcatagtgccctatacacaagacggacagacattctctagaattgcctcgtcttcaaaaagttgctcgcaaaacacatggcatcgaaaaaaggcaagcgagtacgcgtggttgagaaggacgctgaggcgcctactcaggaatcggagtcagcatacccagattccgatctccatgtctcacacattttcggaggttccacggcatactcctcaaagcgagaatacaagaaagtggaacgtgaagtctgttcgacgtggcagggggccgcgcccaagatgaagtggtccgagcagaagatagaattctcagaagaggaccaccccaagactgctgtcatcctagggcgatatccgatcgtggtcgaacccactattcgtaatatcaaggttgcccgagtactgatcgacgacaggagctcaatcaaccttctcttcgccagcgccttggacgcgatggggattccacgaagcgagttgacacctaccgatcaacccttccatggaatcactcctcagtcatcatccaaaccattgggcaaaattacgttgcctgtgactttcgaccaagcaaacaacttccgaacggaacagatcacctttgatgtcgctgaattcgatacagcatacaatgcaatcattgggagaactgcactcgcgaagttcatggccgcatctcactatgcgtatcaagtgctcaagatgccaggaccgaagggaacaatcactattcaagggtacactaagctggcagtacaatgcgacaagcggagcctcgacttggtcgagcacacgcccagcccgcctgccacaacagagccaccaaagaaagtgagcaacacaaacacgacgccgaaaccagatggtgcaatcaagatcattccactctccagtgccaaccccgacaagaccgtcaagatcggggcatcactaggcgagaaataggaactcgcgctcatcaccttcctccacgacaatgctgacgtgttcgcttggcagccgtccgacatgccgggggtacccagggaggtgattgagcacaaactcatggtgcgacccgatgccaagccagtaaagcaaaaaccgcggagatttgcactagatcgaaaacaagccatacgagaagagctcgacaagcttctcaaagccggtttcatcagagaggtactccatccagagtggctagccaacccagttatggtacggaaggccaacgagaagtggagaatttgtgtcgatttcaccgacctcaacaaggcgtgccccaaggatcattttcctcttcctcgaatagaccaactggtggactcaactgtatggcaaaagaggatgaggagaagataacattcatcacgccgttcggggtattctgctacgttaagatgccgtttggactaataactgcaggaaacactttccagcgcacggtccaaggtgcacttagcgaccagctcggaaacaatgtcgaggcctacgtcgatgacattgttgtcaagaccaagacaagcaactcattgattgacgatctgcgagaaacgttcgactacctccgacgatatcgcctcatgctcaatccagagaagtgcacgttcggagtaccatcgggcaaactactcggcttcctcgtctctggcagaggaatagaagcaaatcctgagaagatcaaggcaatcgagaacatgaagtcacctacaagactcaaggaagtacagaagctaaccagatgcatcgctgcactaagcaggttcgtcgctaggatgggaaagcgagcacaacttttcttcgctctgctgcaaaagcaagacaaatttgtatggacataggaggccgaagaggcattcattgcactcaagctctacctatcaaatccacctgtatttgttgccccccaacctaatgaagaattatttatctatattgccgccacaccatattccgttcgcactgtcattgttgtcgagagagagaaggtgcaacgaccagtctactatgtcaacgaagctctccacgacgcaaagacaagatatccacaaatccaaaaactgctctacgcagtaatcatgacatcaagaaagctacgccactacttccaagcccacaaggtcacagttgtctcctccttccctctcggtgaagtcgtgagaaacaaagacgttgtcagccgcattgccaaatggatagtcgagctaagccaatttgatatccacttcgtgccacgaacagccatcaagtcccaggtacttgccgatttcgtagctgattggaccatacctgataataggtcagacaaccaaatcgacaacgaaacgtggacaatggcattcgacggtgcactcaacagccagggagcaggggcaggatttatcttgacatcaccttcgggagatcaattcaagcatgcaattcacctcaacttcagggcaaccaataacacagccgaataccaagcactactcgttgggataagagttgcagctgcactcggagtcaggcaactgatcgtgaaaggggattccgaactagttgcgaaccaggtgcataaagattacaagtgctctagccccgagttatccaagtatctcgcagaagtcaggaagctagaaaaaaggttcgatgggatcgaggtccgacatgtataccgcaaagacaacatcgaaccggatgatctagcacgacgtgcgtccagacgagaaccacttgaacctggcacctttctggacgtcctgacgaggccatcagtgaaagaggcaaccggcacagacagcccggtcgcccccaacatcggctcgggggctacagaggcagagcgagccgttgccgatattgagaccacagacaactggcgtaccccactcattaaattcataggcagcgaagagttgcccgaggatgacgtagaggccgagaaaatatcccgtaaagcaaaagtctactgtatgatcggcaacgatctatacaagaaggcaccaaacggggtactcctaaaatgcgtctcgtccgacgacggcagacacctcctcctcgacatacatgaagggatctgtaggtcacatgccgccggtcagacattagtcggaaaagcttttcgacaagggtttttctggccaaccggcctcaaagacgcctgcgacatggttcagcggtgtgaagcctgtcaattccacaataaacatacaaagctgccagtgcaagcactcctgactatccctcttacttggccgttctcgtgctgggggctagatatactcgggccattcccgcgaggatagggtggctacaggttcctatttgtggcgatcgacaaattcaccaagtggattgaagcgacacccacgggggaaatcaaatccgacaacgccatcaaattcatcaaagggatattctgcagattcggattgccccacggtatcataacagacaacggctccagttcatcagtgccgatttccaggattactgcatcaggctgggagtcaagatctgcttcgcctcggtttctcaccctcagagcaatggacaagtcgagagggcaaacggcatagtactacaaggaatcaagacccacgtctacgacaggctcatgtcacatgacaagaagtgggtcgaggaacttccatcaatactatgggccgtgcgtaccacaccgacaacgtccaacaaggaaacacccttcttcctcatttacggctcagaggccatgctccccaccgagctacgacatcaaagtacacgagtacagaagtattccgatgagtatcaggaggaacagcgatacgacgatgtgaatctactcgaagaacatcgcgaacgagttgccgttcgagcagccagctaccaacaagcccttcgacgttaccacgagaagcgcatccaagcacgcacgctttcgatcggcgactacgtcctccgacgggttcaaagccaagcagggcgcaacaagctctcacccaaatgggaaggaccgtacacgatcacacaagttctgcggccaggcgcattcaaaatcgcaagcggcgatggtcgcgagttggcaaattcctggaacattgatcaattacgtaaattctatgtataagtcaatagtatccatacttataagacatcttacagcctcaataaagcctatttttcaggaacagactacaatcaaagtgttcctttccgatgatcccttacccagatgacacttagcattgaaacctatcctcatgttcctttacgccgtcttgacaaggcctccgaggaacctaagggaacttcggctggggacgcctagagccgataaggccttgtcggatcctgtagagacgaaagaccatgtaagatctggtcgtgtaagagttctcgccgtgcgtattaaccaagccgtgtaatcggaaataaactttccaacttcacggctgggggctaggatcagtgcttgttcaaccgaggcaggtcaaaggtccaagagccttatcttccgagaagaattctccgatgacaaggctaggggctagggagagtgtacaactcaaacgactgatcgaagtcgcgaagtgagaagacactcatacacactacatccagagtaagaaagcatagttagatagatttcttttctattacacaaacatttcttacaattccatcaaaatccaaattacactttttcctaagacatttgtcacaggacacggagactaccaggaaggtcaacgctagtccatcgactggaaaaccttctccgccagcggcgccatcgacttcgccaagccatctatctccgtaggagttctccgagaacgtgaaaacccttcgcggaggaactcaaggagcagctgcggacaatgatctcgtacgcaggccgacacgagccccccggcatatcagcttgagcgacgacactcctgcttcaaggcctcgtcgacacgttgaccgatgccttcgagctgggcgcaggccccattcagccacgagatgtatccggccaccgattcctcgggatccccatggggtactcggagctttctacagactctcgacatggatgtgcagcaactcttcagatacgagttgaaccacacctcatgaccccggagtgtctctatggcctggtcctttctcacctctagcatagtcctctcgagttccgcaacctcaaacttcgtcctccaatactggatgcgacgatcctggtcagcaagcgcactctcgagatctgctcagcatggaaacgactaagtcaagctgctcttctctcctaagaacacaacaaattaagtcgatccagacggaagggcaaaggagatggtaacaaagacaaccaacctaagggagtcgctgccatgctcgtttccactggcaaacttcgatctacatcgctttccggcacatgctgctcggacgcaagtaacggaacgaccactggcaactcaggctgcccgcgctgctggacatcatcgacattaacatctctacaaaggacaacaaagtactcgagatcaaaatgctaaagaaggttaaggcaatgatcgcacacaaagcatgactaaagagtacaagagagctaagaccctactcttcgaaaagcgggaggacggactcccccaaatcgccgacctattccatcacatccttgcgcgcgtcgctagtcgccccctgatccaagatcttccgcagatcgagttcagggtgcgccagcctcacacacgcaaggacttggcacgccccggtgtagatcccgttagacgtctcctctccgatcctggccgcatgcttggaggggatctcctccatcgccgtcaccagctccgcaagagaagacgtcagcgagaactcatcgggattcgccggaatggtggacttggtaccgcactccccggcgagctgatgcagaccagtataggtgacccgcaacgagccacggatttccgacaacttgttctcaagctccgacatacggtgctcgagcccctgccgttgtcgcttgttgctggccaccagttccctcatcttctagaggtcctcgcgaacctccgccagatcacgcgccagccgatcggcgcgctcgttcgccgacgacccagccgccaccctcgcctccgcaatctcgcggctaacacctcgagcaccagcttcgaggaggcaccccatctcaacctggagctcctcccaggtgaggacggtagccggcgaaccacgaccagccacgtgatcgctggccagaccgctaggtctcgcctcacggctcctgggcacggccacgacatccgtcgaggccacggcagaagacgcgctagaggtccctccagacctatcttgcgccgccttcgcccgcgccgccctgcaaaaggctacgattgagacagagttcgacaaaatcatgaaacgtcaaatccattcacttacttctcgctgagcgtcataagccgctgccgtcgcggaggcgggggagacgcgtccgaggcctgtagtacaatcgatatgatgtgaggtggaagttttccgactacgtgatcaaataacaggagaacttaccaaggtggtgggtgtcttctgatgatgtccaactacagaggagaatttcctcccctttttcggaacgtcgccgctactcgtcgtggcagcggcagcagcagtgtcagacacccccttggcgaccttctccttcagtgatgccgccacctgatggtccacgagcggcccgatgatatcagtcaaagggagagcctacgcttcataaagtcataatgcgatcccggaagaaaaatgcaaaaggaccgctaagtacacttacattgatggcagcgtcgctcggctacccctttctcgcaaaagggggacggggacgttgctcgccgttgttgggccgctaatcatccgttagccaacacagcgctccacggttgcgctatccaagcctgtagatcgagaccagaattcgataagccgggaagaacacgcacataagggagtcaatttaactaaaaaggaaataccccgaggagaaacccgggtcgcgtcctctggcctagaataatcaaaggcaggatgggctcgagcctgaagcggctggatccgcctaccaatgaagtcggcagcaacttcataccccgacaacccccgttctcggaggtcatcaacgatatcgatgaaagattggagggacggggtcaaggcaggtttagtggtccaagatggaatcttgtctggctgctcctcaggaacaacgaagacaggatccaaatcctctatctgaagatagaaccacctcccccgccatttgctgcgagatgaggggcactgaaaggggatgtatcgcgacttcagaccatcccgaagtcggaaaccaacacactcggacacctttttggattccatccagcgtaactcatagtaaaagcggaagaggtcaagaaacggctccaccccaatgtaggcctcacaaagatgcgtaaaaatactcaggaaggcgatggagttggggttcaaatggagcaaggaaagaccatagaaattcaagaccaaaaggagaaattcagaaggcggtggaagaaaaccgcagagaataaagtcctcaaccgcaaccatgcgacccaggacaggctggggttcagtacctcctacttccctctccgcggtcccgcgaccgggaagggcgccatcctcctgtagttttttcattgacgcactggtggaggtagacttgtcgagatccatggccaccggagatcgccggagaaaggaccgagatgagttggctagggtttttgcgagagcgaagaagacgaaggacgcttggaagctggagagtttttttaacaggcggacctcaaattagatccccaaaactcccttaaatagacgcacctccgccggtgcgaattccaaggaaaggagagatgaccgccggaaatttctaggtccgttacgcgcggcagtttttcggacttcaatttaaattcactcatgaccgttgaacttcacccgatgttgtcgatcactccttgtctctcggtcctcacaccgagaacgacgacaacttcgacatcagaagttgcgatcggtttcgcgagttcatttaagcagaagtcaggggctactgtcagggttacgggtaaggtataccctctacccttggatatacgtcacgtatcggtatggtatgctcacgcgtatacggacgttttcggcatacattaaggaaatacatcatggagttcacagatggaaggagtcctactcggtcagaactgggtcgtcattgtgtcgtgttcggtctggcctctccaagtcctacttggagacagttgacctgcggtataaaagggaccccctgggaggacctaaggcatcgaatctcagagccaacacacccaccacagcttacgaagccggagcttgtgagagccaagtcgcggggagatctagtcggatcaactcgactacgatctcgttggtatcgtcgagttctactattccctttgtaatctgtggtttccatcatataatcccatatcaactggattaggactattacctaccaaggggcctgaactagtataatccctgtttcctatttgcttgatgtcgtactacgtagatcctcgtaccagcgtaccccaataccctctatttccggtctacgggtatcccccgtcgacagcgattataaaacacatgttgttatgaggccatagcccaattttatttttaatagcttaggtataagattcagaattaactaatcaaggatttatctcctggatttttcacaatttggtccttttgaaaaacttttttcacaaatagattcctagaaaaacttttcgtggaaatagtcatttttggggcgtcagagtggctggcgccatcgtccaatgcctgccaacgtggtggccaggtactgacgtggcagggggagcgcgccagcctctctggcaccccccccccccgcgaatacataataccaaaaagtgtctcacaaaaactaatacgggtaatatccgtatatttatccgggtaatatccgaattttaccggataatccatatccgtcggatactacttcccgaacccaataccataaccaccataaaatactcgtattcggacccaatatccgtgaaaagtcccgggtacccgaatttatcctaaaatacccaatgtggctgggcgggcgggcgggaaatacctgccccatattcacccctactcctaagtgtgaaaaaatatgaaaaaataaaagaaaaataaaaaagttgcacatctctcctctgcactagagaggagaggaaaaaaaatggcgtgggttggacaggggtggcatcagccttattggcgtgctcccccgccacgtcagcaccaacccgccacggtggcaggaggacggcaccagcgactctagcgtccataaatgactatttctatgataagttttttaggtctatttgtgaaataagttttttaaaaggaccaaattgtgaaaattccagtaattatctctcggtggagatactaaatcttgctccgtgatgtacggagtttgttgagcaaaactctgctttgattgagcataaatcacagcttgaagatgcaaaagcagtagcacgttatgtacttttaatctgatgcgctatcacagcacaagactgaggtttttttttctcatattcatttatattgcccctcggtgtatagcagatcttccagtgatcattgttctaaaacatttgctttatacagtggcttcacgatcatccccagttcttgttgagtccgctgtatattggaggtgactcatatagtggtatcattgtacctacacttgcgctagcgatcgatgaaagtaagcttcttgccttgtgaatggataatttccttagacatcctcgtactgttacacaacattaaatttgatcaacaagcagtttcggaatatatttcggtaaataataccatctctcatatgggaaatggttgtcaccatgtatcaattactatcacaataattactagaaagatttttcttttcctactaactaaatactatcacaacaatattaggacagagatatatatatatatatatatattttttattcatgagttaaagacaaatttggtgttcactttctgcgcggattaattgtgcgtgtttccaactactaactactaactactgattatgcatcttatttttcaggcaatgattcaggagataagccaattttgaatctcatggtctgatcgatcttatcagataaatatcaatcatgaaattttatatttggaatcttaattacgtcaatagtctacataaattgcttgttaatgtgtactaccaatctgccctgtaattaacttttgccttcaaccattttatttaccttgtctttataacgcaggggtatgttgctggcaatccagtgaccgatagccaatttgatgaagatggtaaaattccatgtctccatggcatgggacttatatccaatgaactttatgaggtaatccataatccagtaattaataactttatatgtttcctatagtacattcagcaaatatttgtaggtattaattccaaaaaaaaagacaccggcctgtttcattatgaataacagatcacggcagtatatatctgaccaactaggcaatattctaattcttttcagctgaaaggatgaataggatgatggagtatctgatttttttttataatacccgagagcacgaactaataaattgacaattaactatattacaaagttgaaaagttgcttttaaaaacatattctaccaaccgtgtatatataatttgttttataaaatcataacgtttagcttgcgaagtgtgctgcccaaaatatttattcatacatgacattcgaacagggcaaaaggtactattgcctacgtgcaaaatctattgtaatatttcttacatattatatactgaccactcaaaccaattttctaccagcatgctaaagaaacctgcagagggaaatacagtgccccagggaatgctcggtgtgagcagtctatccaagctatacgcaatgtaagtattccaagaaaaactatactccctccgtcccaaaatgtataatggcgttgattttttatatgacgttgaacgacgctgttgactttttatataacattgaaccattcatcttattcaaaaatttagattaaatatgcaaaattataagacaacattataatttctttgatgataagacaagttaaaacaaaattaatattatttatatattttttcataaaatgaatggtcaaatattgtgctaaaagtcaatggaatcatatattttgggacataggtagtatcagtactagctactgtttgtgtgtatacaattgtcaataatgtaattgaaattgctgtgtatagttctctgttatgtggcctaattacatattttacaaattaatcagtgcacaaaggacatcaacatgctacatgttcttgagccattatgtgaagaagtctggagccccaggatccataacacatcagcgacagatggaatgagtaggctcatgctggagtctgctcgtgctgctgatgatgacattattgaattcaagtgtagagttgagtgcatgaaaaatacaacattaattactacatcccattgaattccaatttatctgctctagttttccttggatagcacttgacctaagaaagtctaatttggcttatttactgcagaaagcttcctatgtggttttaaaaatatgggcaaatgataaaactgtaagggagagtcttggtgtgcacaaggtatttctactatggtactatgtatgcttccattgacttttcaaagtatatgcactttgctactggtggatggaaatccaaagtttgcaaagtgaatatataaattcactttgcagttggtcttccgcatgaaattaggccgattatcatattacaaattcagcattgtccttacagaaggctaatcattctttgaatccttttatatcagaataattctttgaaccgaaactcagcctatccgctgtgaaggccaagggaaaggattaatttgcattgcatgatagttatgcatatatacgagtttaattcatagaagttgctatacaatacagggaacagttggaaagtggacaagatgcaattacgatatagattacattaaagatgtgtatagtacagtggagtatcatttgacgctaatgagagaaggataccgatcattgatatacaggtaattatatatcgaacaaataattgatcaatatgtacacttatgtcctctgataccgaactgttgcgtttctcttattcacaaaatatacatgcagttatatattcttacatggaactcaactactatacatattggaaactaaaattcttttataagattatggaatcctcggctacatcatgccatcttccgatcctttatatattaaatttgattgcaaccttgcggttcaaatccaccaaattgctcttctcgtcgatagcaaattaaacaggctaacccatggattattttttttcatttaattaattaatgatgcagcggtgatcacgattgtggaattcctttcactagtacacaagcatggattagatttctcaacctttctgtagttgatgattggcgaccatggtatgttgctggacaagttgccgggtaagaagtaaatatttccgttgacagtcaatttcaagagtgattataatttcgggggatatattgcactttctagtgtgagctactgcactttgtagcacgagatatgtttagtgtaaatattggtatatttcagtgccttcgtaaaaatgatgtaaaggaatcccaaattaacttcaaaaattacggtacccccattaccattccaagcaagagtatcatgcattaattttttttttagaattatacagtacaactcagacactcacaacgcacgcaaaccctacccctataagtatcttcgaagactgggccagtaaaattggagaaattgacgaagtcaccataggcgtttcgctatcgctgggtacgtcgcctcccactgggagcgaacccaggacctcaggtgctactgaggttcttgtaaccactaggctacagacccttttgcatatcatgcattaatttttaatacaatagaacacaatgtcaaatattatacgcttttggttagccgttaagcaaataccgttgtttctacagttaacctaccatgaggtgcaaatatattagcacaagaaataattgtactccatcacattataaatttgaacaaacttgatgaagaatttgactcccaaaatgacttacaaagggagtagtatctttcactggctttttaacaatagtaaaaattaataaatgtgaagattatcatacttataactaataaattctgacatatcatgaaggccagttggggaagtggctgatgagtggaatatgtatttacagttattttttaatacaatagaatttattctgttcattatttccatgaagctatacaaccagtattatagagttcaaatatgatgaataattgcgaattagaaaattatggtttgactaaaaacaagaaaactactaccaatattacctcaaaagacgaagttgtt

SEQ ID NO: 10485 - DNA, 10280 bp, Oryza sativa
aatgttatatttcacatctttggcgattataatgatcttggaatatattttgtgcatagagtttacatctgctcagatttagaacttcctgtacatgtggataaaacatgcaagctagagaaaaatgttcttgctaaccaaattgtctcgagtttgccttgtttgattggaagaaacaggttgttgtaaatggactacgcaaagagcaccatatggaaaaaccgaggacggttttccatgatgaaggggaggatgatgtgaccatggctaccacggatgcaaccattgctcacatcatggatgaacaagaagatatcgagatcaagtactccaagtgctggaatccgattcggccacctattacactgctgacttcaaacggccaccgaatctacatacgacctccgttttcggcccgtgagtacttgatggaaagctctcggagccctctttctaacagatccagcctcttctctgaattccatctcgtgtggccggaatcacaagaacaaggtgctgcgtcacctataatgggcctatgggcttgtaacttcatttgggaccccggcccaggtggggcccatgtggggtgcgccccaagctggtggagcatgaccctaggcacccctaggttgtcctcccacccctatatatagctagttaccccttcagggtttctggggttttgatagattaaagtttagccattgctacttgcttgcagtgcgcgtgtctgctagactgtccgtctgcttgttcttcggaaccccaacttatcatttgtattaaattcctatttgtaatatcatattgcttttatcttgttcttgcttgtttcttcgatttgcttgcaagaatagggttgatctgcaccggcaagatcaacaacccacggagaggtgtatcgatcgctaaggcgcaacacaacgtctcgtacggttgtagttggatcgtcaacgtttctcccaaatcatagttatcacaactcaccgaaagatcgggccaataacagccttgagtgttgagaggaactcagggttcatcaggtggtatcagagctttcgttgctcggtgagttttcatttacttataaccagaaaatagcccgaaaaaaaaaattcatacattacgtagccacatttgtgccattgcattgttcttttcagtttttgctttgttgaattttgtgttgcatcgtcacgtcgtgttgctggtcatagcgtttagttcgtttagagtttcgagttctggtcacgttttgtaccactgtcatcgtcgtcgtcgtgtgctttgttgtcgtcgggacctacgaaaacggaatcgtctttccgccaaggtttcatttttctagttttcagaagtttctatcggtcggttttgttgttgctgagttgcatctagttttttgtggtgtgattctgcgctgtcccgaggccgtgttgctgccgtgtgttccttttgccgtgcatgtgtgtgcgaggaagaaggaaggaggagagatctgtctagattagattggattggtttctgtttggtggccaacgtagaaaagaaaaaggaagggagggatttgtctctgttttcacatggagcctttccatagatcgggaatcaatctccacccgtgaccgagatctccagccacagtttcctctcggcattggtgagtccgactccctccatcccctctcctcacggtatagatagcttggtgaaaaattttcgtgtatcggattggagatccgtctgcaaaaacggaacctacgggacgagagcattacatttttatatagttttaattttgagtttggacatttacagttgagtccttgtattttttttatatttacatttgagtccctgtaaacttgctttatagtccttgaggttgtttttgttagaaaaatccaaaaaaaaaaggcagaaaggtgcataaaaaaagaaaagaaaagccgcaccaaaaaaaggaaaagagaaaaatcagttgtatctttgaattttctttcatatatcagagttgtgcataagttgttcctagtgctatcttgtggtaccgtttgtgtctagactcgtgtctctagtacgatctagcctaggaccagcatggtacttgactttgaaccattattcaactttgcattctctgatttgaaccattgctttcctttgctacatatttaagcctacccagagctccacaaatttgattgcagccgtacaacaagtgtttgccgaggcatcgatacatccaacctctattggggtgcttggttgagtcaccattccacctgcattggtaagatcttgtaagagcttggttaaaagcttgagtgtgtgtgagatttgagctgccactacctagtatttgataggagcgtgtatattcttgtatatgtttcttgtttgctgctaaccatggcaggattgcgcaaggggaaacaagatggtcatgctcaacgtcaacatcttcaccatcaacgagatatagcgacttcttcacgcatcacatatgaggtacatgataatgatcttacaagggtagaatctaaattgcctagttttgatggtaagtatgattccgccgcttatgttaattgggagctagcagtagaaaaacaatttgatgaatatgatttttctaatgctcaaatgattaaggctgctagtaataagtgtaccggttctgcatctttttggtggcatactgtgggaaataagcttgaaacttgggatgaatgcaaaatactgatgagaaaaagatttgtgttttcatactatagacgtgctctccttgagaaatttgaacatctaaaacaaggtgacaaaactgttagggagtactttcatgattttaaaatatgtatcacttatagtgatttacaagaatctaatgagaacacaatgactagatttttcagagggcttaattccaatattcaggctgggcttgttaatgtgacatataatcatataggccaattgttcatgcttgcttgcaatgttgagcacaaaattttggagaacccaacggagcaacaagctatgcttgtgcctcctatcactgatgttttgcaggaagttcagaacagtccccaaaatgagaagaacgatatgtttgagatgtcacttccttcactcgcgaatgaggagaaggctgatgcacctacattatctgaagaaggcataaaaggtaaattaaatggtgcagaaattactcaaggtgagtatgcttctgatgaattacatttttccactttccatgctgacctagagcaaactttagtggaacctacttctgaattgcctttgtcacaagttgatttgcattctgttccttgtgataaagaagagttgtgcaatagtacttcacttatatccattctacaactagtgaatgaacatgcttcttttaatcttgattctccatgtactgaatttaagtatgttattcacacgtccggcgagaatgatgaacttcaattgcaatcttctttaaatacattggggtattttatgtttgatggttcttgtgagctcaattgtttgaaggacaaaatatttgctcattctgatttgccatgtcctcgtaatgttatatttcacatctttggcgattataatgatcttggaatatattttgtgcatagagtttacatctgctcagatttagaacttcctgtacatgtggataaaacatgcaagctagagaaaaatgttcttgctaaccaaattgtctcgagtttgccttgttttgattggaagaaacaggttgttgtaaatggactacgcaaagagcaccatatggaaaaaccgaggacggttttccatgatgaaggggaggatgatgtgaccatggctaccacggatgcaaccattgctcacatcatggatgaacaagaagatatcgagatcaagtactccaagtgctggaatccgattcggccacctattacactgctgacttcaaacggccaccgaatctacatacgacctccgttttcggcccgtgagtacttgatggaaagctctcggagccctctttctaacagatccagcctcttctctgaattccatctcgtgtggccggaatcacaagaacaaggtgctgcgtcacctataatgggcctatgggcttgtaacttcatttgggaccccggctcaggtggggcccatgtggggtgcgccccaagctggtggagcatgaccctaggcacccataggtcatcctcccacccctatatatagctagttaccccttcagggtttctggggttttgatagattaaagtttagccattgctacttgcttgcagcgcgcgtgtcggctagaccgtccgtctgcttgttcttcggaaccccaacttatcatttgtattaaattcctatttgtaatattagattgcttttatcttgttcttgcttgtttcttcgatttgcttgcaagaatagggttgatctgcaccggtaagatcaacaacccacggagaggtgtatcgatcgctaaggcgcaacacaacgtctcgtacggttgtagtcggatcgtcaacgtttctcccaaatcgtagttatcacaactcaacgaaagatcgggccaacaacagccttgagtgtagagaggaactcagggttcatcaaaacaggttgatgaaaacctctaagagatggtagatatgctatataatctagattaacaacgatatctaaccctatcggttgcgttccattaatagatgttggccggtttagggttggattatgatactaataaagattatgaagcatataagataactcgacgatttacataaccaatgaagcataaagatgtaagcactaatcccgagaatgcaagccgtcataataagttttacctcttgttgaagatcgaaatcgatgcagctcaacctgaaagtaagaactcatcgaaacaatgaaagtagaaaaaggtggcgatgcgccgaaagtgttattgaactgtcgttagatgtttacatgggatcgggttatatttatacccgatatacatgacaggtccttgtagggcacgactcttatctctaacaaactctaatatacgaacaagttttcatggcagactcttgcggaacatatctgtaaagaaactatttaaaatatcctaattaatagatacaattgcctatccgtgagcttatctcaatcatggcaatccttgcatagcatgttgatcaatcccggagacaattatataaccatcttaacgaaatcggctacatcggatgtcttctgtctgatctatgtcagccgatgcagtctttagccgatgtcctcgtagccgatgtgcactctattttcagaagacaaatccgtatcaaatcctcttcgatcccgatacgaatctagttcatggcttaccaaatttggtcgttaacaatatgcttgcatgttgatttgtagaattaaatagattgtagatgctcttgcatgcttgcatgaggttgaatatgtaattattgttagtagatgatgatgttgaagtatagattagaaagagaatagcatagaacggtgacacaccaaggtggtcactaaggggtgttaagcgacccggctgattattcctgcaagtgaaaaagaaacggctaacactaaactagacgctcataaaagagtaagcgaggagaagaagaacatgaaaagctaggtgtcaaacaaagctcccacagggctggctgtggcctctgggctctggccaaaactgtcctttctacgcacaatctgttcgaccaccatagggccgcgaccatggttagaaatttcgtttcaaaattttggtaattcgacccccaccgacaaacacaaatctctttgaaatttttggttttttatcaaatatttttaatttgatcaaaatttattcaaattcagtcaaaatatgttaaaagttcaaataatttcggttaaaaaaaaccctgaaaatcataaaattttcaattttttggcaaccaccgaagcattggaaatttctgtagcaaccgaaattgtaaaccctggctgcgacaggtttaacaacttaattgttccaattagaggagtcaatggtagtactccgtccgtcccattttaagtacaaccataagtttctgcgctctctcaattttgatcgtccgccttatctaaaatttttttataattagtattttttgttgttatgagatgataaaacatgaatagtactttgctcattacttatgtttttaatttttttttaaaataaattttaaataagacggacgatcaaagttagacgcggaaaacaataactacacttaaaatgggatggagggagtaagttggtatgtcaagaacgacggctttgccatctggtgtggcatcgttgtcatcgagatgtcggtcgtccagccggctggttcacttggagagctgggaatagataggttttggtgctacggttgtttcgatgtgtaaaacatcaggagccactgtctcatcagcttgattatgatccttttgattgattatacggtttctccgtttcttcagtcaaccactgttatcctcattgggcttcccactagaaacctcactacaaaggtcatgatttcacacaatctgtcttcctacttagaaacacaacctttctatgtggcagataatagtctctctaggatgaaatttgcacatctataatacataagaatattatttcttggatctttaggtcatccatcgacaatgaaagggttaaacttaaccgcatgcaaatcaaatataattaataataatccaaaacatgtaagatttcagtttcacattactcatgaatacattgtttatctttcggtgtaattttgtcaaaacttttggaatattgacatgaccatgtgcgtagagaccaccatagttggagtacttgtaagcgaagaatatgcagcgaccgtcggtggtggagatcgtcggctcggcggtcgtcggcgaggccgtcggccggatatgctcgtacctcatcagccgcggtgaggaggaggtggccgccggcgatggagccgagcatgacgaggagaggatggaggtggcgctgctcaagattcaggccgccgtcgaggaggccgacggctggcacatcaccaaccgcccgctcgtgcggtggcgcgacaagctcaagcgcgccgccgacgagggcgagtgcgtcctgcgggagtacaggcggcggcggcggcggcgcctgtgtgtcgacgatgatgatgcgcgccgcctttggtttccgaggcgcgttgctcgggccgccggcaagaagctcttcgccttcggcggcggagacgagcagcggctgagcggcggcaccgtgcggcggttcgagcggctggcggacggcgtctgcgacttcgtgaagctcgtcgagagcggcggccgcgccaagcggtttgtgccgttccagccggtcgcggcgtcgctgctcgcgcggagagcggtgagcttctccgtcaagccgccggcgtcgccgggcgccacggcgcacgcgttcgcgttcccggacctcacatcaccgtggcgccgcccgcgcgcgcacgtcgtgttcctgtacgcggacggcggcggcaccggcgagaagctggagctgttcgtggagctcgacctctctgagagcgctgacgtcatggcgctcgctctgtcctccatggacgcgctgccgccgcacttccgcttcgcctccgccgccgccttcgggagcttccaccgcttgcaggccatgacgcaggacgacggcggcggcgaccacctcccagcgtgggacgcgcactactgcagccagccgtcccggtacgagcagccggagtggatggccgccggatacggcgacgagccggcatcggtggcggcgctgccggagcacgtcctctacgtggtcgccgagtgggacagcccggcgagggacgcaccgcgcacgacgccgccgccgccgccgcccgtccacgtgagctaccacctcgggcggcagggcgcggactgggcggtgcggcgggaggagatggcgaggcggatcatggacggccggttcgggacgcgcgcgcggcgcgtcgagaggcacgtggacgccggcgcggagaccttcaacggggtggtgatgtgcacggtggacggcttccgccggcgaagtaaggcggcggtggcggtggcggggcaggtggtgcggtggtgcttcgtgtccgggtgggtggtgtacttgtccgtccggggcgtcggcgccggacagccgtacgaggtaggcttccaaggatgatgatgccattgttgttgaatgttggtactcatcctctcacaaatctcattatgaattgaaattagggatacaagcggatcgatccgtgagtttaaataaataataatttatgggttttcgcatcgtggcctaacttgctgcatctaaatatacaaatggatcgatctataaacctatttatagttaaattcatagttaacccgctagttaaaccggggggttacgcactatttttgtctataagcgggtttgcaggtaaacccacttgcacccctaattgaaatcaaatatgtgctttgtgtactcttcgaagagaaaattgcctaaattttaaatattgagagggagagcttgaaaagcaatgagcaaagacaaaagagtctctttgatcatcatgtcttagagcaaaacaatgtataaagtgaaagtaggcattaatatgggcccaggtggataccaccattttatatggacatcttcacagtgtatattaaaaaagtgggcattaaggtggactccatgttcccaattactactactctctgcctcatcctcatccccatccccatcccgactacctcatccccatctactccgactccgagagagagagaccgcgagaggcggcagcgtggcggggtggcggcgtcggattggcgatgacggctgttgattcggtgacggagtgacggcggcggtggttgatccggtgacggagtggtggctatgtgcgaccgcgcgcgcgggcaaatccggtagcggtcctaagtggatctccggcggcgtcggcgatggtcgacggtggatccagcgtcggggacggtggtctcgagcagatccggcagccgtgtgagcgagcggatctggcgggagtcgtgggcagatctccgacggcggtcacggcctcgcgggtggatctccagcgacggagacgacagtggcgggcggctctccggcgacggccatgcaggtgctccccgtcctctttcactctcccatggtgggctcgttgctgcttctcctctcccatggcggtaaccaactactttggagagagacaaagctagagcaaataagatcggattgtttattccttatgggtggttcttatgggtggttcttatgcataatgctacctcaagaaaaggatagctataagaaccacctccacaatatataagtagacctatgagcataataccctctcttattttcacattgtgaatgcccttatatgtagaaagggagtcgaaggacggagccagagaattgttagcgactcaccacgcggagaaatttactcgtgaagggaaaaaggcaaccgcccaatacccggatcaggactgacaatttatattggaaccccttctattattgcatgctccctctaaataaaaaaatatttacaaaggcaccccaatatgctagtcgatacgcatacaacccgcatagttagggcttgtttagctcccaaacaaaatttttcacgccgtcacattaaatattcggatacatgcatagagtattaaatgtaaaaaaaaattacacagttcaccagaaaattgtgagacgaatcttttaagcctaggtggtgtttgaaactcttgaagatgacgatgaagtaaagattaagtgttttacgcaaaatgaggtggtaataacatgtgattcattgagttttaattacaacaaacttaaaaaatgattaatcttatattttagaacaactctcatgtaaagttttcgcacgaaatgcatagtttatcagtttgaaatgcgagccacttttatctaaaagtttatccaatttttattggagaaaagaacagggcccaaattgcgctatgatttgacaatgtggtgctacagtaaacatttgctaatgatggattaattaagcttaataaattcgtgtctcaattttcggatggaatctgtaatttgttttgttattagactacgtttgatatccgtatatccaatgtaacatacatgcatt

SEQ ID NO: 10486 - DNA, 21003 bp, Oryza sativa
  unsure (1)..(21003): unsure at all n locations
cttctaaaagcaacttgtaatttgcattttgcagccgaaagtaaatgcattcagatactaacttgttaaatatcatattatacgcataaatattgatcgctgttcacttttattatttttcatgtaattcaggacaattttatgggtcttttaaccttgtacagtactggtgtattgtgttattagggtaagttctacttagcattttgcactacaggagaagtgatctttactgggtcggctgattttcataatagttttggttctaacaaaaaatgtttttagtcccagttaaagaaaaattgatctttaatcccggttggtgttcttcagtcccggtttaaatttttttgatatttagtcctggttaaaaactaaagatgatatttagtcctgattcatcccctgtcagggggccgaggagctttagtcccggttgataccaaccgagactaaagatcaccactttagtcccagttggtactaccaaccgggattaaagattatttagatctttactcccgggactgaaaatccatctttagttccggctggtaactctaaccgtgagtaaatatttctctaccatatttgttcggttaagtcccagacgagactttcctcctcaccaaaatatctagataagattggatttgagagcctccaacacctcagatcccttcctcctctcgtcccctcccctcctgtcatccgcggcagcgggcaggcggccagcggcggtagggccgcgcccggcggggtgagcagcagcaggcggtgaccgtggtgggcgacggcagcccgcgtagcggtagagggaggcggcggcctgtgcgtggcgggtgacagcggccccgcgtggcgacggcgcggtggtagaggcggcgggcgcagggagaaggcggcgcggatgggaggcggccgctgacggatttgtggatttgtggatgattttgtgatgtaaatttgtggatgattttcagatatttctatgaagttacaaatgaatctgtgatgttgaatgattttgtctgtgtggatgaatttattattgacttcagtgcaaaatcaatatgaaagtagcaaaaaaaataaaaaaagaaaagagaaagagaaagcgctacgtggcgcttttatttttactcccggttggagtctccaaccgggactaaaaatccatttttaatcccggattttttcttccggttcgttacccgggaataaagggggttacgaactgggagagatgtgcatctctccagcagtgttggctgagaaaaaactagataagtcattagcgtataattttaatcaaatattagttattacaaacttaaaattagattaatataatttttaaagaaatttctatataatttttttcacacaataacagtttagtaatttgaaaatcattttaaagaataacgagtaaattatcgtttcaagtcactcgaaacgctaggaccacgatttggccagacctaacaccttcacctgttcagtccaggctattagacttctccctcagtcccacaaaatatcaaaccctataatcctaagaaagtagtggagagtaaaaatgaccaaaatacctatcattattagaaaaagtagtaatagtgataggtaggtatagggtatttaagggataaaacttgtcgttttatatgctgagagtagatagagtgttagaagttgattttttatgagataaaactcaaattccagaagttgagtttttttaggacgaagggaatatctctggagtcgagtcgatttagaccagcgaaaacccatagaactacctagtcttttctgacccacgtgatacaaccaaccaatcatatataagggcttgttaactttgtagccactttttaccctactaaaatttgccacatttgtacattatcaaattttaatactgttggatatgtttagtttaaaaccttacaatttgagggaattttcaatagtgaaatcttgtaagggcttgttcgttttggaggaaaaacaaagaatttggattcctaaagatcaattcttatgagtgtcattcaatttatatgattgaagtataagaaaaccaaagaaaaaaaattccttttctacaagttatatagaggaaacataagaattattccatccagtcaaatctcttagaaaaattccaatagattgatgtgtacaaacatttatattccttcatttttcctattcctatggattcaaattcctccaaaccgagtaagccgtaaagttaccaaatattggtaagatagcattgctatatatgtataagttcagttttttactttatcaaaagagtaaattacacccacagtacaacacgttgatacgtgggttctatttaggacaagaagaatgtgacgtctaaagtgcaataacttagcaagtgggtgcactttaatacaagaatttgataatttaatattttggtgcaataacttggctagatatgtgctaccttggttaatgagtgctatgtaagttttttcacgatgttaatatgtcatcacatagcaattccgtagatataattaatcttataatgtttgatgtaatctgtaagaatatattgttcacctaatttgcaccattgatttagatttttttttaccatctcaaatatcaactagaaaatttctacacagtaattttttttacttttaaatttttttactcagacttttagttactagaatgacaaagaaaatatgcttgtacaaatctacataagtttattaacaactgggtaagtaaaaactgtttacatatagccaaaaatacataattaagtttttacaccacttctcaagttattgcatcaaaatcacacccacctttcaaatagtcgtacccataaactcatttattaagttgttgtactacgttgcatccacttagcatgttgttgtcatagcatgcttatttctcaaattccttcactaaattgcaccaacttactaagttgatgtaccgtgaatatgcaatttactcatatcaaaatttaataggattggtagtaacgtcaaagtaagcaagcccataatccctgaatgaacgtatgcaaagaaaacctacggttcaaccgaagacctgaccgggtcaatcactggtcgggggataacactgcttatgcagatgatttataattacctgaaaattgccaaatgaaataatcaacatacaggagtactaaatatacactcgtaactagagaacctatcatatcggtgcttcattaatagcacataaatattaaggcaaatagttggtacagaaatactcaaattggcctctgtataatttctggactgtgaatagttctcactatggaaaagtaagccataatgtgaacattataatgaaggacgaagacgaatacaaataatacttccatgtctatcgaatatcgagaaggtaaatacaaaatgattttggcatgttagaacacaaaataatggaaaaaggatggtttgcgatgatataaggataatgtgagaaaatatatttttgatgatataagtaaaagagaaaaaaaggcacattttgtacctcaattatggtccttgttttgttcataataataaaaaagttagattatgggcctgtttaaatcccaccctaaaatattttaccctatcacatcgaacgtttgaacacatgtatgaagtattaaatacaggctgaaaaataactaattgtatagattgtgactaatttgtgagacaaatcttttaagcctaattgctccatgatttgacaatgtggtgctacagtaaaacatttattaatgacggattaattaggcttaataaatttttctcgcggactactggcagattttataattagtttttttattagtgcccgaacatcccatacgataccctatataatatacccgatgtaacacgctattacacctctagtaacgaaatcatatccataatgcttaaactatctaaattactgcacaattcacgaggtgagatgagttgtctgaatttattgactgagctatcagtctcagatgtctgaagctggaccataaggctataaataagaattcagaaatgtacacaaaccattagttcatcaaagaggatacagagagatacaataaatacatggttccaactttcaacagacatatcaataataacagaagtaacaccaataatgatgcaggatgctggcataaggccgacacagcaaacaccgatatgagatgtcatgtacccaaaaggaataagtttattcgaggtcccttaacttacaccgaatacgattttcatccttgaaccaaaaaaccggaaacaacacatccccaatttacaaaactagtgcaaacgagatccctcggtagtgctgaccccggttttggttgacgtgatgcctacgtggctcctttaactaagtcttcatccaacgtggcaaagacgtggcaatgtgatctggaaaataataaaaattgtaggcccacatgtcagttacaacaaaaaataattaaaatggaggggtccgcgtgggcccaacatgtcattctcactcccctcctgtcacatcctgattttcgtttcaggatttataaattatttaataaattattattagaagttatattaaatgttcattaatttacaagagaagttaaatgtgggaaataaaattttctaaataaaaagcatggctggatttaatttctattaaattctccatggttaattatattctctggaattttttcggatttttcggagctcaactcttaattttaaccatacaaagaacatttcagtaattattcacatattaaattaatcattaaatggtctgcttataatttttttaagtactttgagtgtccaagtattttcaggatttttcttgaaactatttgagcattggaagtatttttaacaattcaaagatcatttcagtgattattttaattggaaagttgttaaatcctctcctaagccgttgggctgatttcagcccaacatctctctccttcgcgcgcgtgctgtgcagcccaagtcggcccagccgagctccccttctctttctttctttcctttgtttttcagccagcccaagacgaaagtctaattgcgtcccgtatactgttcatcttcaagcttggacagaagcccgagctgccgtcctgtgctctagccgacgccgcttcctccaccaaatccgccgcatcccatgctccgcttgcaaaattagttgaggggaaatattcctcttatcctcctctatcttttcccccaagaatcggactttatcccgaagaaatcaacgcggaatcgaattcgttttcgagtttatctctccaactaaccctcggtttttccggcttcgattcctctcggttggagtccgatctcttcaatccaagcctataaatagcatcccctggtcgtcctctttcgtttgccccaactcccgagctcccccgtcgcccgtagagccgccgccgccttgctctagccgccgccgttgccggcgatcctccggccgcgttgcgctgccgcggtagccgtcgccgctgccgtccgtcgccgtcgtcgggtgcgcacggaggagaggaaccccgtccgccccttcgcagccgccgaagaccaccggagcgccatcgccgccgtcaagccgaaccgtgccgccattgaacctcgtcgccggccgtcgttcgtcgtcgtccgtcgttgttctttgcaccggtgagttcgcgtcgtcgtcctctacgcgtaggtgtcctcggatggcccaaccgagccctcttttgccggtggtcgtgacaaccgtgccatggccggcgatgatgacgtcagtgatgacgtcataaatccctttttctaggttttctttattagatgaaaatcgattaaacttcggaaattcataactaaatcatcgtaactcggattcgagtggttcaagttgctaaattcatctaaaatcaaaatctacatgttaaaaatatccacatgtactgtttatgcttgttttgtactgtttatttggtttttcttagtctttttcttcgttttgcgtgttagcttgtcgtttccgtcgttgcgaaggttcgtgagtgcgtcggaagtgttcaagaagattaattgaagaccgattattgcaaggcaagtcacacagatcctaaacacaatcctttgagcatgttgattctatatttaaattctctatttattttaactgtgcatttattttcgaatgtcaccgggtggtgtgaaccttttcctttgttatggccaatttgcattgaatgccctattccttgataccttgggtaataaattgattagcttgaaccttatgtattggtttggttcagctaaatgttatatatataattgcttagccatgcttagaaacattagctcactaatgggatgaatcatatatactacattattatttatggttatatttaatggtagctcacgatggttaatcgtgttatgataattaattggtaattaaaatatgattaatggtgggttgtgagcacatggttttgaaggtcgtgctcatgacaattaaggaccggttcgcgagctactgttgtgaaacattaaccgtaccaaccacaagccagcgtgggcaacggctttaccttttgtatagcatgattcattgcggggcatcagactgagaagcggcgagaagtccgtgggggtcgctggggagtccatgcctctggttatatttatagagggggtgattatgattcaggaatggtgcactgtggtgagttgtgttgtgcagggggtattgtcacagcctctattcgggtactttctagtatcgcgacgcatggtagacatgatgttgaggctgtgtcttgtgggtacagtggtacacctctggccagagtaaaactattcgaatagccgtgcccgcggttatgggcgggttgagcaatgtttttcgtgattagtctcacacatctcacaaataattattgatgctataactggtaataatttgtttagctcctggtttggaggtttgatctgtacgaccggggttggttgttcaggtttggttgggcctgtgcagcattggggtgctattcagtgttgattaaaattgatgattaattactctactgttttacttctcttaaatgtttgctaaatgttgtcttcgcaaatgaaccctatattatgccatccttcggaatccttgtgcacttgcatatttgctgtgtggcttgttgagtatgtcatatgctcattcttgcaataatcaatcaacctcaattaaagaaaaaggatccagaaggagaagacgtttggcttataccccagttgagctgcctgtgggagtggagctgaagccatcgctagactgttattccgctgctgttttcttttcttttgtaagtatgtaacgttattattatgatggatttgtatattaaattatcagtttgtgtacctcggctgattcctggacgaggattttatgcacaaattagttcggaaattattagtgaatttccgggcgtggcacctcctcttctatcgcctctgtcctggcgggcttcttcctcctctatctccccatctcccctctcttcatctctctcccctctcctttctcttctcctctctctaggcacgacggctgacgagcggcggggaaagggcggtggccagtggggagaaggggtggtgcaaagcggccgttaggagaggagcaagtagagacgatgggcgtcacgcctagagagagaagacggtcggtggccaggttcctcgatgaggagaggatggaggtgagggagagggagctgatgagcttgagcgatgcatcgtcccatcttggccgttgtgttcttcggccgcaccctgtcggtcgcgctcgcattgatggcaacctctcttcctcttcccttatacaagcccgagagcgtcggtggcgcgatgcccagacaggctccagctccgccctcaccgtacgtcggaggaggcggaggaggggactgagccacgtcaggggccacaaccagaagtggatgggggaacgaagaggggaggagggggagcaaaagtgcggccctcactcaagtctagggcggtggagttgtgttagcggtcgtcttcttccccagtcgtcgtgcccgccttccatctcacggtgagtggctcgcccacctccatgcctcccggtgccacccccgctcgccagcctccccacgcctccgctatcgctcgctggcatgccggtcgatgcatgtgcctgccacatctagggaagaggaagaagttgagaggggatgaggtggaggaagtggggcccattgacatatgtgccccactattttttaatcttattatttgactgacatgtgggcccacatattttgttttatttattaaattgttaaattttgctttatgtgccatgtcagataaataccgagttaaattagccatgtgagcaccacgtcaactgaaaccgctgtctaaactggcttgagacttattttccactggttttgtatctggttttccggttgaaggacggaaatcagattcattgacaagttaagggacctcggatgaacttatttctgcccaaaacaaccttactgtttgaagaaaaataagcagagaagcccatttgtatggctggccttagccctttagttggcaaaagcccaaatccgtgttggatcatatacaaccagcttttgccaaaacatgttgtttctcaaaacatagtacgtattttgttctgtgtgcacgcttttcaaacatgttatttctcaaaacatagtacacattttgttccgcgtgcacgcttttcaaactgctaaatggtacgtgttttgaaaaaaaattatatatgaaagttgctttaaaaatcatattaatttattttcaagttttttaagttaatatttaagtaatcatgcgttaatctattgctctgttttgcgtgcagaggagagaggtttccaaccctccaacagaacatcatgtatataaacctaaccgttaatttggcatgttccttctacagcatgtgagcatcaagatagggtttctagtcagatggtatataaagtagtatctttcaaacttaattttttttaagaatgtacgatgctcaaaacacgtagataaccaaaggtcccccgtcatcaaacctagtaacccgtcagcggtatattcatctttatcacatactgtattaaaaaagactcttcggtcacaaaagcaattgccatttactaaccatctgaaatgtaccattgtgtatacagttatgaaatgtcatgccgtttagcagttaactacaccttggtatcaaaatatagtaatttttagctatatgtctgaaatgcttgtctagataaatagctataaattactatattttgaaacagagggagtaacattttgctttgggcaaaactgtcagcctgataaaacaaaattaatacttccaatgacatgacaggaaggatttttgagttttgaagcaatagggcattgcggaagcaaaagattatggttctggaagaaggaatgaggggaggggcggggcatcacttacctattgttggaggaagcgaagcgccgcctctgggtgaggaacaagcggaagatgggcgagttttcacatcatagatcatctccaccgccatcgccgcggcggcgctggtggtggtagcctggctcgtcgctcgcttgtctctctccggcaaccgcgaaggagcaagcagactgagttggagacatcggaaagatgatcaactagttttggtccgggcctcggggccgtgggctcagtgaagcccagggacaatgtcagattaggattgttgcatctgatttagttttttttttgggggggggggttgtattgagggaaagtgttgacgaaaaaatcgaacacaccggcctgggagatctgcttaactccagtgcaggtccaaatatgatgagatgcgggcgtgccagtcagtttgatcctgcaactgacaagttgcagatatgcaaatagtagatcaaagcagccaatcggctgacaagccgatggagtagttccagccgatagccgataatagctgatgccgataccagccgatagcgatagggtttaggcaatcggctatatgtacaatgtggataatgatataaaggcaatcggctgatgatgatgtaataaaataacaatataatccaatataaaccaatcggctagcaatgatatgataaataagcatcgatccgaaggttaaatcacacatcggctggaggtccgatgtcatgaaatccacaagattagattaaacagtgaaacctttgttgtcatcggctcaatacaacttatatgtatatgcaatccttatgagccgatgcaacgtccagataactcaccggctgaaaccccgatgaaacccttattggcaatcaagaagtaggctagagattatggttctaagcatgacttactagatcaaacttaactgatgcaacactaagtatgaaaagaaacatgatatctagacaatcaagccgttgactgagttttcagggtggtagatgtctaagctaatctaatctagcaatgcgatttagccgataccggcagaaaccctaaaacgagaagcagccgatagagctaaattgatatgctaagactagattaacagagacatatgataaataggtaggaaaatatatcatccaaaccagagcaatccaagaggtcgaatgtactgatgcagccttgaacgacgccgacgtaaacgatacaattgcctgggccggcggaacattggacttaccccttagctggagatcgaacaccgatgcagccccgcatcaggtgccaagtcacgccgaaacataaaaacaaaagtagaaatggtaaaaggtggcgatgcgccaaattgtattgatcgtagcgatagattacatagaccccgggtgtacatatttatacccatgggttgatacaagtccttgtcagacaagaaagaaactaacctaaagataaaaggaaaatgtaaagtccttatcggacactaaacacactttcctaaagataaaaggaaactaacaaactattcctaattaatagataaactgccatgccgcatcctctttaaacttggtcacttagggataagcttcctttagtagattgattttcttaaccgaatatagcaggaatcttactattggcgacttgataactcccatcggctgattccgagatgttgcagccgataatgattataagccgatgacgtctttgccgattaccaaatttcactgttaacagaaagagatatctttttagtcacattttataaactaaagttgtaatttgcattcttaggtcaaattttaaatcttgtagtttctaagcaaaccattgcgacatatttcgcctcttcttaatataatcaaggcagatctcatgcctattggttcaaaatacttttttaataaacttaattgtatatattttctttcgatgcttttcattgattgaaaatgcttgaatttttgtgtattggaataactatcctagaagtaataatgttttaatacaatatttaaatagctgaaatgcttatatcttagtatagagggagtattatttaacttcccatttgtacaaaaagaagttagatatttaaatttgaagacatgctgaattcaaaaggataactagaagaaaaaaggaattgctaaaatactcagatctttgccgaaaagagctataacttgattatacacttcacttccaaaaataaatagatgaagggagtgtctctagggtcaagcgggcttatttgtcgtccccagccctaggggcgatcagaacagcgactctacgtccactaccaccaacccccttcctcctatcctctgcatcaccatcacccgaatggcccgttggtaaccgtgcggctgcaaggaaggcagcggtgaggctctctcttctactctcaagggtgctattaggctagggctctgaggcaatcgtgaagacagaggtggcgctgccggatccgagtctccatggctagatccacacaaggtgaggccagtggacggtggagggccgagccaacacatgctgtgattgaggatggcagagtaatggtcatagaggtggcggtggggatgctagatcaacatcctattgggcagatcttatgtccttctagacggatcctgtgtgtctccagtgagaggtacagatccttgaaagcaactcttgatgacgacgagaacgacgtgggtggtgggcatatgctctgcagacatggcgtggtggccggtagtgatatggagagaggcgtaaaacggtgtagccacggtgtcaagggtggccgtgggcattgaaggccgacgtgcagcgaggaggcagggtacctggagtttgggcattcagcaaggaggcaccatggagtggcatgatacagaagtcgacagcgtgtggtcatccctcttgggtgaagttggaagaaggtagcagtgcaaggcaatggcggtgggacttgtaagctagtgaggcccatcggtggtgtgtggggaaactggaggtggccagcgtgttgacggcttgatggagtctagcggtgagaagggcacattgttctgtctcgggaaggggcatcttgcctgatggccaaccgacggtaaagtgttggtgcggtgattgtgagctgaaggttgttggtatttcttatggtcacatataaattcgcaagcgcacggatatcgctatagcatttcacccacgagtactcccaagggtatcgtatttgtgcttccacagcgaagggggtggtataaagatatgtttttttatatctcttaatcaacctttaattaattcaccatagtctaaatagtggttaggataataaatgataaggtagtggacacacacagaagattcacctctataagaatatctagtagggacttatcattaggaaactacgattcatatatacttgaatactaatcatttctagtatacacttaacatatacatgctaacaacataggacttagttctaggcacacagatactaccgagagaccactcactactagtctgccagcatggttatggcatttatgcattcttacgtcatacttgaatgtgtaggaataaaaaggacggacatggctatcaccacctgccacctacctcactttccgtggaggcacacccggatccaacaacatttatttagcctatataccatgcttgtgcaagtaaacaatatcactaactcccccaagactctcaccctacggatgaataagttggagttaaatcaatctataaaggttattggaccgttaccgtagcatggaccaatatacaaagtctaggatgaagcatatatacaaagtatatactattcatagaacatatattaaataaagaaatatataaaccatgagcataaataaataaagaagataattctattaattcaactataatcttacacaaagagtaaagtactagagacatacccagaactccaagaagactattggaccgaagattctaaactttattcctactagaaactgaatacaaagcggaagaggggatttcttctttgaggtgtgtattgcaagtgagggagagctccttttatagcactcttatgatggttatatgacggttattggtccgccagccgtgcataactgccatcaggtgcgcaggaggaggtgacacgtggaggatcaggctgagcggtgctagccaatgttcggttgaacacctagttcggtcaaaccaggaaaaccgcctttggcgagaggctgccatgtgggccccttagtcggtttccaggtggttggccccactttgagtcgatttgaactgacttgtgagtcctttaatctgtgtgctcgcacgtgattcatcggaagtgtgtttcttcacatgttgtcttcatttctccttcactttgatgtatattctctacatccacatttgtttcccaatcctaatacaactacattatttgttgttgatatacatgtaacatatgctaatttttcctttattcattgtactggttggtgttcaaaatttgtacttaacaatcgtcaacaaatgtgctttagatagtaatgactgttgttttctgttttcgatagggactcaacaacaggttgaggtaggaagattgctaggcgaaagcctagcccgttctggggcggcagcgatgatgctttttgcggtagcccaacccctgttagggcgctgttgtggcatatctcattcctcctgatggttttgttgggagaaaatcacgccctgatcctcaagacgggtgatggtggtagtgttgtcgcatcataaccttcttggaggcgttgtttgatgatccatttcctaccaattccatctccagacagttgtcctcttctggtggcgcttttagccagcacgatggccacgttggcgggactatgtgggcgacagatatattctttctcgccctcgccttctccaacacaaagcgtggacaaagttgagcttgtcgggttgttctaagctcctgttttttcttcaatacgtgtttgtgttgtggggttcacatccactgccattagaggtaaatggcagaggtaaacagtaaaacgtgagggatggtacagtgttttaccacagctacagttaaaaacctctgtacaaacaatgtaaaatacctaccggtagtacggcattaatttactgttaggtactgtagcgatcgatctcatccatccacatctaatctaacggctgaaaatggctcatggtagagagtactatagctgtctgccattctagtttcaatggtagaggataagttcccaatgttgtgggtgagggcatggtgctttttttttcctttttctaattataattaaccttccaggattatgttcttatataatttttttagggcctgtttggtacagttccaactcctaaatattgcttcaggagttaagtctggagtggagttgtggagctgcctaaacccagctccacaactctagtatattttgtgagagagctccacccaactctgcttccagttttggtggagctgaaactgtttggctgagctccagctccaggaggtgtggagttggagctggagctgtgctaaacaggctgttactgtcatattgacatgaaacttcgtaatatctacacgggtcatttttttttataaaacaggtgattgactatacaccatacaactagcactctagcagtcctaattcccggcggaaggaatattggccagtccaaaaaaaccctaagtatgttgctacgtacttgagctactatatagtttcacaaatggattttataggaatttcatatggattatattagtacttgagctactatatagttccacaaatggattttaaaggaatttcatatggattatattaggcgcaattcaaattcgtgcaataatcaaggaaaaaaaaaccatggaaactacccaaaaaaacaatggaaacacagagaaactatggaatgcatcgccaatctttggcaacgtacgaggattcaacccaaatcttgtttgactcgaccaccccaaaatcgccgtcccgctcgttagtccgttacaaataccctacacacgcggacacgcctcgcctcgccgatcacgccgccgccaacccgttccccccaccgtcttcggcaatggcgcctgacctcgacgacgacctcatccgtgcggaggccgaggccgcgctcaggctccaccgcaacggccgccgcgacgaggcgctgtcccgcgcgatggacctcgccatccagcacaagcggtcctccccgctcgcgctcaacctctccggtgacctcaacatggccgcgcaccgccggaaccgccgccgcggccgcggcgccggcgccgacgacaaggcgctggcggagaggcaggcgaagttcgccgccacctgctacaagatgtcgctcgacgccgtcccggactgcgtcgagacgttcgccccctatgccgaggccctcgtcggaccgggaatgtgaaagccggcgtgggacgcgttcatgcgcgccgcgcgatcgcccaccggccngacccggcggcgcaccgcctgggcggctacggccggagcgcggggctgacgaggggggagagggtggagatggccaaggcgaggctgcgccgcgccatcgactgctactccaacgcgcgctgcgaggacgccgtcgccgaggtgctcgcaaccgtcgagcaccacggcgccgcctccgccgtgcacggcgcggcgaagctcgccgaccgctacccgtcgtcggcgcgggcgcagtgcctcccggcctacgtggccgtggagctagctcgcgagcgccgcggcggcgcggcgtacccggcgacggcggccaccccgaggcacaagacgctgcgccgcgcgctcgccacgatggacaccgccgcccgcaccttcgaccgatcgctcgtggtcgcgctgttccgcgcgaagctgctcgcctgcctccacgactacgacgccgccgaggccgaatgccgccgcgccctcgccgtcgataaccccgacgacccggcggcgcacgaaatccccctcggatctgcgatcggagaagagtacgacgacatggtgtcatccctcaggaaacaactctgtgatcttcagaagaagcttgtcttgttagccgtacacgattgggcatccatggaaagcgagaagcaatctcagatcctctccgtcagcatcgacgaactgcgcgaacactacagcaagatcgaccaaatcgcggcgaacacagtctccgaagcgcggcgcttctccaagacacacggttcatggtgtttctggatttgcccgcgatcttcgggccaatgtgcaggcaagaagttcctggacactgcatctttgctggaacatctgcgcaataagcacccggacgatctatgggtgaatttgaagtcatttcttgacacaaaactgtgtggaaaatttaaaactgagaatgcatcacaggatggctattcatgccacgatgagatgttacagtttcagagcatagatggtatgatcgagctagtgttaaacctacctcctggtggaatgaaatcagagaccctgtcagagatgaggaggaggaaatgcagtgaattagctgagatccttgacagaatcaagaagaagttgagggcttgtcctaaagatttatcaagctctgaggtctgaaactttgagcatcgtttcagtttactgttctctccttgtgttcattcttgttttgacaattatatgctctaattatcacggtttttttgcattgcagtttgatcaggttcgttctgaaatgcaagatctgtggctgaagtttaccgagttgtcggttttcgattaccgtgaagcagtcgtgccccttgcgaggatgtatcaatgggttagcttttatctgaaattcttgtcttgtccaactatccaactgtaaaattgcgcatgccgtgtgctcgttgattaatttaccatccgtgcagaaagagttaaagaaacgcatcagtgaagatgggagcattattgctgcttggagtatcgatgatatatttggtgatgttcctgcagaacatgcctcccttgatgaaaaagttggccatcaaactggggagaacaaagtgacaaataaatcagataacttgaaggttattcgtgctacttgttttttcattttacgaaaaagcttttatgtgacataactccaaattaatactatgtgttaacatgtttgcttatcgagctttttgaagtcggagtactaatgtatcaaattctctgcttctctgcaggcatgagctcccaaacaaaaggctcctattctccaacacaaagaaagggccagctgcgacgcaatatcccgatctttttctacattatattttataaatttgaaatcttgtgtggcactatgaacgagtgggacatgagaatagtttgctagcttttgaagttagctagttagtgtcacggaaaaaatgagaatatcaattagcttacgattatttaagtactcgctctatttaaaaatataatgcataactatttttttaatgtttcataattcaatgcatgtgacatatgtaattaactattatatttatgtaatgtattaattgggatgattcaaatggggtgataataattgtttcttttatctctagtttaggatggaggaagtattaactataataaatttgagaaacaaatttatttgtttttttaaaatacatatataattttttttttcaatttagccgtttgataaatgtgctcatgataaacgagaaattattctaacccaacgtaaccttaggacgcgcagttaaaaccttagaggagaagcgtgattggacatgacagcaagaagatggagtgggggagtgatagtggagggcacgagagaggggattggtagcgatggaaccctattttcatgtaaaagtaagagtaattattttacattaggagggaagtagggcagggaaagagaacgggacaaggtgaagcacgggaatagaatttacaaatttttggtggcttgctatagtggatacattaatatgattcatactaaggcccccttttattcaaaggaaattcataggaattttagagaattttattcatataggaatttttcttacaaagttctttgaatcaaaggaatgaaccctatagaatcttatgaaatttctatggaatgcctcttctcatataagttttggaggatttttaacaagaggtggaacctcatggaagaaatccttagtctttatctctcctcaaattcctgtgtttttcctgtggtccaatcaaacggtcattcctatgtttttcctgtgttttgcaatcctctattttatacttacattcctatcagaatattatgtttttcatattcctccgtttttttcattaacacattagtttttactagcttttcatagcaacttaagaaatcagtaatatctcccccttgttcgtttacgaaccggacagagacttgaagagtttgcaacgatccgtgatatccaacatgtagtagtaatacttattcagtcccaaaaaatggctcttatccgagacgaactacaggccgacatctaccttaacttctccatatatttaattaactgaaccctaccaacgtaccttacaaacaaatcgaacaccaccgtatgttgtctgacgacccaggtgccatcgatctcatggcgccaacggaggaggatgtcaccgtgtcgacggtcagcaccacggcgaccaccggatgccatatgctcaagatcgacggctacacgcggatcgccaacatgcacggatggtgggcaacttcgtcgagtcctccaagttcaaggtggccggccacacctggagcatcctctgctacccaaacgggaggacgtgtccgggtttcgtctctgtttccctcacgctccaccacatcacccaggcccaggccgaggtccggtttagcctggtccctcaacaccactacgggctgacgctgccgttgggcgagccgcacgagaagaggttcacgagggtattctactccggggtcacggaggggttcgacaggttcgtcgttaggaaggagctggagaagtcgtggtacctcaaggatgacgggttcgcgatccggtgcgacatcgccgtcgtcaataagttggtcgtgaaggagcccgtggttcggccggccgacctggagaggctggggatggtttgcaactgcaacgacgatatgtgcacgctccaccataccttgagcttcgcccaagttgccaagctcaagtttttggagtttttcttagggtgctttcctctatgagagtttatcaatattcaatttattaatccatagttgatattgtattttgattttaatttttttatcaatgacgaagcataattgtttttcttttctctaagatccgcaaacatatatagagaatatttcagtgaatcacgaataacaaatccataatattagcgccaattgtatgtctattctaattttatgacatttgaaaatatgaaatcgcttgatttatgtatattcgaatacaaataaggcatactttgcacattccactacgtatgcgacatacccacgagtgcaccttatgacacacgatgtaatagatcgagcaagatctaaatcactattctcactaaatttcatttaaaaagtcaccatagtaagtatattattcgtacaggctgtgacataaacactgatgggtggagtacacatgtaacaccctgaaaattcgatcgacaaaatcaaaactctaaaaatacggattttcaaaaactttttaaactaattgcatcatgccaatcttattcgtctattttatctggatttgatctcgaagattattaatcgtgagtaaagaatagttaattaggaataaaccttaaaaacaaattggtaaaataaatataaattaaaaataaagattgggtgtggatagtaataaataaaatattatcgcgatcatatttggatcaattaaatttaattacgatggaataagaattaaccctaattaaaactcaaataaattatataaaaataaaatatgagtaatattaatctagggtgaattcattagttaagataatacaaatattgagtaaaatacatatatgtaaaattaggaattgtagaatcaaattcatatggaaaataaactaaaatcgggataaatagaaaaatacactggtcattatggcgtaagtgttcgatgtggaccctagccttccccctcctctcccacctatgtgctaacccgcccgagcccagtccgcgcgccgtcattacggtgncaccgtcaacgcgcgtagccaccttgcgccg

SEQ ID NO: 10487 - DNA, 1816 bp, Oryza sativa
tcatctatgatgggctttagttgtggcccgacacaggtcatctatgctcgatgagctgcacgcatgctgatgcagcatacatgaagatatactttcttcttatatatgtacagctactcacttcgtgtcatttacagctacaaactcacagttctatgatgccagatcaatcaggttgtgtaacctttggatcagcatgcatctgtaccaaacaaaagttcgaccaattatcctctcctatacaaaggctaaaataacaaaggacgttgcagccaacacacccttatttgccccttcagcccattcccagtttttcccaacacattatttttagataatggaatgaatcatcccggcttttgctcatgaaagctacagccaattattacaagaagtagcacactaaaatggcttagtccaaaattaaacaagcacatcaaccaaaaataaaagaaattctaacatgacaaggaaaacattattccattctattgatgaatctccatccatggttggtaaaaagttgcataaccgttgactcaaggttacgacatgcaacagacagtaattttccatcttcctcacacttttgtagttgggcccacagtcgaaaccaatatgttgccctgaaaattacctgcatataggaaatagatggtgatttgtcaaaaaccctatcatttctacacaaccacagagcccaacataaagccgaggcaccaaaaagtatcagtttactcttttccttgtccacaccctgaagccaactgttaaacatatgagatatacttctagggaggtataaaccaaaagaaaattaaaccgctctccaaataaactttgcataatgaggatccataaataaatgttgaatagactcatttttcatgtaaaaacaacatcgtcaacacccattccaatttcatcttgctaaattatccttggttaacacgacacccttaagcaagtaccacatgaagatcttaatcttaagtggcatcttaagcttccaaataaacttatttctgtcaatgtaaccattattaattaaagctaagtacattaatctaacagagaactagccattctgatgataattccatctaaaacaatcaaaagaatcatccaactggatatgagcaatagaagcacataaatcataccaaagggttaggttctgtccaactaaagctcttataaaagaaacatttagcggaaccaaggccataacactggcaatagtagcactcttccttctgacaatagcatataaagaaggatacttatctctgaaggccatgtttcctacccatttatcctcccaaaatcttatatgttgactataattcacaatccaagagcccatacttaaaaaggtgttttttattttcatgagccctgaccaaaaatgagaatcaccttgtttcctatccacttgggttatagagttattatgaagatacttcctcttcaataaatcttgccacacaccattctcattaattaacttatataaccacttacttaacaggcatttattttgaatctctaaattatgaacacccaaaccaccctgatctttgggttgacaaattatatcccatctagttaatctgtatttctttttatgatcatccccttgccagaagaaacgtgatctataataatcaatcttttgaagaacccctttcggaatctcaaagaaagatatcatgaacatagctaaactagaaaggacggaattaatcaaaaccaatctacctccaacagacatatgttttcctttccaactactaagtttcctctctattctttg

SEQ ID NO: 10488 - DNA, 20003 bp, Oryza sativa
tgctgcctcctcctccgctcgcccccactgcccgtccacgccgccgtcacacgctcccacctcgttgccgtcttcgctcccatgacgaccggcgcatctcgccgggggctcatcctagccggcgactgcgaggagcccgtccgccgccgctctgcctcgttctccgccggcgccgtcgctctgcctcgtccttcgccacatcggaccggagggagagaagaaggagagagaggagaggctgacaagtgtgacccacactggtttctaccttccattgccatgttggcatgccatgtgagcaaaagtggcaaatagttaagaaggcatctcgtaaaagtggcaaaaaattatgtccaaacctaaaaggggcatttggataattgtccaacctaaaagtggtaaatagttaaattcccccatggtaaacgggcacaggcgaagttgcgatgcgcgcaaaataatatcgtcggcacgtaagtctccgtgtaggcacacagggcgtgtacttttgattccctcgtatttgcggttgtggcgacccggcgcggtgtgaaggggtgatgacccctcctggcacgcacgatgcgtcgcgcgtgaggtgccattggaggtggtggtgatggtggtggtggccggcttgcttgcttgctgagcccatcgttttggtggtatggcacacggcttgcctaagtgtagtgctgcggtttcttgggcggtgcgtgaggcgtcgatgtgttaccgcgcgggaagtcaagcgcggtcgtcgcgaattgcagccacgagtacgtgaaccctttgttgcgctgtgcaacggtacgagaagacgatgaagtctttgtgtgcggtggcgtcgctgcagctcagtcggagtaggcagttgggcatcgagatgtacagagcgttgcatgaaacgatggcatgatgatcttgccggtcatgtttcaaggattgtgtgaagcggagcggcacacgagttggcacagcgcgactcgctttgtcttggcgtgctggtgcccgcggcgtggcgtggctcgcgattgggctgcgcgagcagcgggtgggagcaggcgacgcgcatcggcgcgtgcgtcctgcctggtgggctcgaccgcgatatcggccggttggctggttgggccgcctagccgagggaagaagaggaggaaaattggaaaaagtacgccgaaggtacctcaacttgttatcgagttaaagaattgtccctcaactgtaaaaccacatacagcgtatctcccaacatacaaaacctgtgcaaactagctccctcagcggttttcaccccgattttttctgacgtggtagctgagtcagcgtagaatccacattggccccgcatgtcaggatgccacatcagcacgccggcatatcccttcctctccttttctcctctctctctcacactcttctctctggacgcaggccggctggcggtggggaggaggtcaccggcgtaaggaggtccgacggtcggcaggcgatgcggcggcggcgcgctcgtactagtcgtgcccggcgcccatgagcctaccccaccgctccaggtccccaacagcgaagccgctgctgtccaccgctgcgagctccacgccaatcgccgcgtccgtgccggccatccagatccacccggtctccacgtacagcgtgtacacgcactcgttcttgtcgttgtccccaccggcaaccagctggccacggcgcggcagcgctgccatgccgtccagcgatctcgatccggcggcctgcgcgcgcgtatgcaattaacatggtcagatcaactcacaggtcacagcagagcagagagacgatccgaaaagaaaatgcacgtaccaagaccaccatggaaacgagcgaggcgaagtgcaagaatctgtcagcagccattgtcgtcaaaggcttgaagaactccatctatttggactttttggattggatgtgcccttttgtgagctaagctgaagagtgtttatatattggcagtaccagatctaacagtgacttgttagattttcttatagagagaacagttcgtgaacctcaagctccgcgcgcgtacgtgaacctcgccggcaacccggggatgaggacctcctcgtcgtggccgtcgtcttcttcgccctgttggtccttgctcacatacgaagcctgctgcgacgacagcatcggcagcttgaaccagctgcggccgtggcgctgccctcccctgtcccgtgtctctgccctgccgcgtcgccgccgccgtatcgccggctggccgtcggacctcctcgcgccggtgacctcctccccaccgcgggctggccggcctgtctagtctagagagaagagtgtgtgagagagagagaggggagaaaggagaggaacagataggccggcgtgctgacgtggcatcctgacatgtgaggcccacgtaggtcccacgctgacttagtcgtcacgtcggataaaatcggggtcaaaaccactaaggaacttagtttgcattggttttgtaagttgtaggatgcgctgtatcggttttacggttgggggacgattttgtaactcgatgtcaagttgagggacattcggtatactgggaggcgatagaaaataaaagaaaggaataagtttaccagtagtccatcaactttacatcgagtttgcattatatccctgatcccctataccaaaatcttcacccgtaacctatataaaaccgtgcaattttggtcctatggtagtatggatctctgcatttgcttacgtggcatcgtagttagtgaaaaaaaataaaaaagttgtgggacccaaatataagtggaaagaaaaagtgtgacacccacatctcttctttcttctctcctctcatctcttttcctcttttcttctcctcttctcttcagcgatttcagagagggaagaggcggctggtgatcccgaccaagctccgccgtcgctgccctgatgggaggagggaaagggggagaggtggggcaaccggcatgaaatgagggaggggagaggtgtggtgatggggacagtgaggcaatgggggatgtggagcggagcgggcgggcatcgcgagtggtgcccatggtggcgagctcctgcgtgctatgtacttgctgcatgggcggtggcgtggtagggagctgtcgatgcgaaaaacacacactggccttagagatttgcatactttagtgcaggtcctaaatcttacttttgggttcagggcgtgccagttggtttgatcctacaaccaacaagaaacatcgcaaacaaagttaaatccgtaaatgatagccgatcggatgggttgccgatgacgtatcgtttatcctaggccgatgtgatatggatcagatcagcaacgaagtatgcagcaaaggaggagttaaacctgctctatgggctgtagatatcaataatatgtaatctacacttcagagtacgtttaaaccaagtgattaggatagatcggtcaggataccgagagacattataaaccactcaagtttagagatacttcaaagcgaagattatatatattcacagcatagtcgataggcaaatctgacgtgtaactactagtgctccgatactactttatactaatatatcaatatatatcaaatattctaatcaagagtcaatccagtgttaggatagcctaatagactgacatcgagcttaatatattttatccaagtgagatcctaatataaaaggcagattcagtatatcaagaaaacaagacaactaaaccatgtaagatcggctgaaaccccaatgctatccttattagctatcatggaacaagctatatattatggttctagatattacttaatagatcaaactcaactgatttaacattaagcataaagagaaacacaaaatctaaataagttaatgagagcctttttgggatggtaggtatcctatataatctaattcaacgatgatatgaggtcccgttgactgtttttgatgatagaggcgggctgacaatgtcacatagaaaagtcgataagcatacatgataactcgacgatttgtgtaatcaggactagagtgtcgtaacgatgtaagcactagtcccaagaacacaagccaccataacaagctttacctcttgccggagatcgaaactaatgcagcccaactcgaaagcaagtactcatcaaaaacaaagaaaagtaaatggtggcgatgcgccgagagtgtactaaacttgatgttttttgtttacacggtctcggatcatatttatacccaaaatacatagaatgtccttgccagagatgactccacttctattacaacttgaaaatacgaacaagtcccttaggcagactcttactgaaaatatctataaggaaactaccaaaatatcctaattaatatatacaattgccttcttcagactcaatccatacttggcaataattgtacaacacttcgaccgataccgacaatgattctatgattatcttgccgaaatcggctacatcggcttccccgtatccaattcggtgtcagccgatgcagacaatagccaatgcgcactctgtttccgtgaataacgatttcctcccaaatccgctttggttttgacttcaaatctaatttatgatttaccaaacttggtcgttaacaggagcccagcaagctcaagctcgctccacgcgcgccacatcaccgggggcacgacgacgggtgggtgtgggcggtcccgctgctggatgccaatgacagcaacgatggtcgagacgaacacctggaagctcgtggatggccgtgtcgccctgaggtggtcgtactcgtcgcacatgtaggcgagctcttgccagagttgaccgacactagcaggtcctcgtcgaggcccttgtcgacgaggaggtacctgatcgcggtgacggcaatggcagagacactggctttctctgcctgtcgtgccctcaactcgcggaagggacctcgtgcggcacgacgaggaaggcgagggcgtcgggaggcgcctcgtcggggcagtccaagtcgtcatccggaggcggcaggagtggcggcggatgcgctccctatgctgcagacgcataggccgcgatgccggttgtggcgccgtcgccacgcctctcccctcccccatctcccgccgggcgcctcctgtctcctactttctgtcacgtcctgataaattcatcccgaaataaaaatcattctctaaaaggaataatagaattaattaaaatttaaaaagaaattagcaaacattaaaatgcgtacaagaaaaattcgaatgtggcccgaagaatttttgttaaattctccttggtctaaaaggagccctcaaattttactttaatttttagaacaccggaaataaatattaagcaacaacaacaattatcagagtttttaaaaaaagaaaactaaaaataatcctccttcctcctttgggccgagtctagcccaaagtcttcccctctctctctctccctcagcccgcggctgaagtccctctctcctccctcccttttccctcctctcccgggcctcccctcccctcggcccagctccctcctctcctcctcccgcctgggcctgccccggcccaagccgagccgcagccctcccgcgcacgcgcgttgaccgcgcgccttccgcgtgggtcccgcccttcaggcgtccccgacctccagccgccggcctccttcctctctctcctgtgaaccctagcgccgttcctccctccaatccgctcgattcaaatggctaattacaaaattgattagggggaattaaaccccattgattcctctctctttccccctaattacccccttgaatagcaccattaattgcccggaacagccgtgccatccccggccgccattctcggtgccgttccgccctatcccgtggccggctctcttccctccgctataaaatggaaccccctctgtgcgttctctcgtttttgcctcttcccgagctcccccgtggccaccccgcctctccctgccttccacctctctctcccgtgccgccggccacctccagccgcctctaccgcctcgcccgtgtgccggccgtgccgtcgccacccgagagcaccggaggcgcgttcctgccggcgtccagtggcgttgccgccactgcaccatctccggccggctgctgttcatcgccggtacgccgatcaacgccgttgtctccttcgtcgacgtcgtagcgtcgccctccgccccggcctgccctcagattcgtcggaacaccgtcgtccgcgccgcccctccttcggtcacgtcggcacccactccggcagccccttccaccgtgccaatgcgccagccgacgtcgccgtctccaccttcggcatcgcagtggcaaggtcgtcctcggcctcgcctcccctccatccgaaccccgccggtcttcgtcgtcgtcctcccgttgttcctggtagtcgtggtattcgtccctccgtcaagccgtgctgttcgtcgcccgcctttcgtcaaggttgctgcagccccgtcgtcgtcttcgtcctcagctccgcatcgtcaagcgttgcgccggccgcgtctcgccttcgtccaaggatagccgccgaagtcgttccctcgccgtttgcttctgtcgtccctgagctgtctccgttcccacgcctcgtcgcgtggtggtaaggatccctctccctcgttgccccgtcctcgtcctttcggtgtcgcccatgcccgttgtgcggttgtcggccccggtacccgtgtatcggtgtgggcagtcgttcatgtgtgcgtgtggtgacctgttagtgtgcccgctcggtagccgtgtggtttccacgtgtgcatcccgcgtggtgtctagtggagtccgtttgtcagccacttgcctcggttgacacacgggatccgcttccgtcgacccgtggaccgtctctgtgtactcggtctaccgtggtcccttaggttgacatgtggggtccgcatgtcaatagcgcagccttcctgtcttttccgggctagcgcttacacatgttttatagttgcaaagcctaattacaataattcgtaaatctccatgtaacagcattaaacttcggatgaccatatcttggtcatacgaactctgaatcgacccattcaagtctcttaatgtttgttataacctaaagaaccgtgtgctttctttttatgtattgttattgcttctttttaggcttgtagctttgcttgtgtacttcgcgtagcttctattgttctggaggtttctgaagcgtgcttcgctgtcatcgccgaaggttcggaaggccgttctctctgagcaaggcaagtcgcatcacccttaagcatattgaatcccagtttataaaattattttgatttaaattattgcattaccgctttacttaaatttccgcgttatcactattttatttagccatgcctatttacctttgttatgaccttattattattgctattgttattattaccttgttcaccctaggataaacaaaatcccaactagtgggtactctattaatggttccactagtatgaatttaggtagatgcttcgctgattaattaggcaacactaggtggttttataactttagactttgggagttctcatatcatttggacattgtggaatggttggcttgtgatggaattgaacacacaccttccccccccctttattcaaaactcccaaaatggttttaggctaggctcgaggtgcatggttctgctagtagcacctcggccactataaggaccggtcttcgggcctctgttgcaaaacactaccgtactaaccacatgtctaatgggtaaggcttaactcagtgctcagtctagtcctagcaagagtacacggatggagatggacgaagtcggggctcgatggacatctctagggcaaatgaaggctacacgggctgcggctcggtagtcgagatgtcatggcatagggccggtgtcctgctgctaggggctcaatcttacctacctatctcgggattccggccgtaggcgaggttgggtcagtgcttttgtcacgactaggatgggtaaaggggttatgtcacatcctttacgacggggttccacggccgtggaatgcggagtaaagatgtgtcttgtgggtaaagatgtacacctctgatcagagtataatctattcgaatagccacgccctcggttatgggcaagcctagcaatgtacccaagttagtggtttaattcttaaaacttgcttaacaactaaaatgtggaatggttggcctgggtttgcttgggacgagctgggacccaggtcaggttgccagttcggtctgaatcatcgtaggccttggattaaggcaggtccgtgtgggttcacggccttgattaataatactgtgtagctctaggatcgtctttataaaatagctttgggcaactaagtgacttttaaatgttgtttactgcaaaacttaacccttatattattaccccttgtaccccattgcattaatcatgcatctcccggtgtggcttgctgagtactatggttgtaatcatttttgctctatctctcccccctttagtaacagaagctttggagaagaagtcctaggtagagccctggcttataccccagttgagcacctgtgaagatggagccgtaggcccgctagtctgctgctgtttatttttgattgtcaggcctgaagcgcctttgtaataatgtaaatattatcgatggaataaagatgtgttttttatatcatgtttgtgtggtgtaccccggcttttcttgggacagggattaatacactagcgttcgggaaaatgcaaattttctcggtcgtgacactttccctcctccagttgggaggcgctcgagacggcggtggtggcggaggcactccgttttcttgtagtgaccttggccgggcttgcgggccgcctctcccctctgtgccatcgctaaagagaagagaagagaagagaagtagaaaagataatagaggagaaaacaggtagtggcggcctctcccctcatttgtttgccctcaggtacaaaattggagttctcacaattagtttttacacttcttcattattttgataagggagtttgagttcttttccttcatgtttctctttcattctttagtccattttttctccatccctcatgatgttgcttctcttccttttcctaatcttcctctagctcgctgctgcccattccgatgaccatcctcatgtccttctaagatgcatgttttcaactgaaaaacatgtaatatcttttaggtaaagcatggcacgctaaatgaatcattttttttcgaaacgctaaatgaactatagtagattgatgagtaccggaaacgctaattagcgcagacgcgctagctagcgatctagcgagcgtttttggcccatgttgttccggcccaccagcgcaccagcgaggaagcgggtcttttttttcgcggcacgcgcgcatgcatgatgactaagagaaaaaaatcgtgaagaggattaagagaaaacgtgattagtttaatcttttcttccgataatcacatattagttaactttttttcaggaggttttttcttcttttactaaaagtttaaaaatctctacgtaaaatttgaaacttttaacttcagttttgaaaactttcaacccgaatttcaaaaactttcaacccgaatttttaaaacattcaagtcaaaactttaaactttcaactcaaatttaaaaacttccaactcaaacatgaaagttttcaaatttgacttgaaagttttaaaattttatgttgaaagttttcaaatctgggttgaaaattttaaatttgaattgaaagtttccatatctaggttgaaagttttcaaatctgagttgaaagtttttaaatccgagttgaaagttttcaaacctgagttaaaagttttcaaaatcttgagttgaaagtgttcaaaatctcgaattgaaagttttcaaacccgagttaaaagttttcaaaatctcgagttgaaagtttttaaaccatagtggaaagttttttcaaatttgagatgaaaagttgaaaattttcaaattttggcttcaaaaattcaattttcgagttgaaaagcttttaaatctagactgaatgttttcaaaatttgacttcacatatagatttgttttcaatctgttacttacaaatatgttctagaaaaaaagtcttatcttaattaccgtcgttatctaaaactaacatgttagttacgttagatatactcgtcgaaaaaaattctacggaaaaaaatccaccggcatacgcgataaaaaaaaccacgaaaaaaatgaaaatccaaaagtgaaataaaagtaatagaaagaaaaaaaaaagaaaacctacctagggctgcgtgcgcgttgccggcacgcacacgccaactaggaagccccgaagagtacctatagttcaatcttcatccggtaaagcatggcacgctacggttgggacataccatcaaaatgagcatagagctggagatactaaagaacctggacattttggtttacgaaaaattgtaaaacttgaagtttcatatttcatcctataagtcattttattgtaaatacctagttatctatctcaacttagttttgttgaaaaaccgcacacatgcttaactgaatcagcccgttatcgttgatgtagagttataccactagctaagttagttgagttaattttgtccaagtgcttgaattagatttatttttcatgtttggttgaactttatttttgcgcatatagcgaaactaagtatcataatgtttaagctctcactgacaaaatgacttataaggtggaatatgaaacctcaagcgacttatgaggtggtttttgtattttcccttgtttttttttaaagttgcaactaagcataggaagaactacaggaaaaaatgtacaaaatttttgacaggagcagaaggcctaatgcacatacggcaaaataatgaattttgacaggatctggaccaagaattgttagactactctataggggacaaatagttaatactcctgcttttaccacggtttgctattctacattgttctattatactccctccatcccaaaaatagagctatttatgaagttcaagtttatttctccatccacccctcatctcaactaacgagagtcatccactagtacagaaaacattttcctgtgcgatcaaaatcgatttttccatacggaggtagcgcccgtctgcacccatatgtctgcgaaaaatcaactttatctcgtgcgggcggcccaaccgcacgggatcagtcagattaagtggaccgcacgagatatctcctatttaattcttcacagctttctcatctcagtcattcacaatcttccaccaccattcatcttccacccccattcaattttacctgcttgcttagttccaatgaaaccatctaaaatccatctaaaatttcttacattttaggatggggagaatatggtttaagtttttataagacatagatagtttgttggtttgttaacagacagtcgtacaatcattaaatgcaaacctaaaacaaataattatacatacaacctattgcactagttgtcatatatcatctcagagtctaagcatgacaaaaaactatgagcatcactacggtactttattggtagtactctttctatcctatatatattataggtctagttatactcggcacggtatccaaaactaatgtttaacttataattttccatatacaataagttctctaacaacaaaacaacaaccatatgaaaataaatttaaatgtcaatctaactgatagtttttttagcaaatataaattcaccttatattataataatttttcgtcaaatgttttcaaagttaaatctaaaatacgcgcgtgtgctacgttattggattgagagagtattatattaccagtataatcgatctgaaccgatgttttgtaagggcatttattttattcatctagtgattagtggtaaggttggtatttaggatattatacatccttaagaaaaagtttttatctacttagatagtatcgcttgggtactcgcactagtaaaaaaaattatttgttcagatgggccaaaattagttttcgtgtgcggacctccggcccatctacgaaaatccaattttttcatgcagatgattatgtcatccgcacgcgaagacaaaaacccaaaaagaaataaaagtcgcatcctcgccaccggatccgggtgaccctgtctgtccgccgccgccagtctccacccgtcgcagcggccgttctcctcctgccaccgccggatctgtgtggaggatggctgtcgactcctgccgaattcgttgccgcccacccgccaccgcatgtacgccgccgtgctcctcccgccaccgccgctgcctttgttgctttccagtcggctgccgccactcgtctaggagagagtttgagagagagagagaggagtatgaggagaggagaggagatgagataactagataagtacaagtatgaggtaaggtgagaggggatgattgaaaaaattgaattgttaaagatgaaaaaaaggaggaggtaactcagacatttggatggacctttaagaggcccgtatggaaaagttacccggtttttttgcatatggctccctaggagggccgtctgcgaaaataaattttcgcgtgcagttctctcaaggagtcgtatgtgaaaataggggaccgaattttttcaaacacgggcacttatgataggtctgcaatctattgcggcggctccggtggtcacgctcacacggccgttctttttcacttcttatcctccattcgttgcaccgtttcagacaggaagtactcctagaagatataaattgttggtcagcaactgtagcctagtcgttggcttagtaaatttcatgcataatgttcagccctgattctttccgcaggcaggagattgccgaccgtagacataagctaccatcgataggtgatcagccgccgccatcgcccgcgtctacgccagcatcatgtacgctcggcccaaaaatcccagggtttctaactgatatgcaaatttacaaaatcatcattcatgttaatatgataatagtgtaaatagagagcacagtaatatatgattaattgagtattaattatttcagattttaaaaaggattaatatgacttttttaaaaataaattttatataacattttttttcaaaaacatacagtttagcaagtcggaaagtgagtgcgtagaaaataagaagtttttctcccaatgggctactgccgaatgctaatgttcgaacagaactaaagtagaaactgaattatctgaattttcctggcatttgagacagcaatcaagcctgtgtacaagtcctttacacatgcctgaaattgtgagacactaacaacccagtccatgaagtccaccaaaaatacgcatgagtactactaaaacatttggacagcagtgacaaatataagaatttgaactttgtcagaacatactaccgatggccaaggccaaatgtttcaagtttttcggctttgtcatgtctaaggtcagaattaaaatcacatttacaaaaatataaacggaggaatcgctttttaaagaccacttagataatttgtacagtaagagcagagaaatcgagtgcaccaaatgcttagatcccatttggaagagaacattaaactctcacgtgagcctgttgaagtccaattccaaacaaaactttagtattttcatcgcagtacataaacagaagagaaacagacacctatatataacaggaatgcagagctagctggaaacgctccggataggcacggcaaatatcatatggacctctttcttcagttggagacagtgtgacatatgcaagtcttccctcaaaacataggattggtaggcaccgggaactccttgagatctcaaacacagaaccttagccatctagctagtatgatagcagcaacgcagcacacagtttcctgcctcatgactgttttcagctccagcgtgtgatctccatggagcacctggaggaaaattggctgcagacctacaataaaagaccagttaaaatttaaaaagttcagagtacagataaacctttttagtcaatgtcatctccgtagtatttgcggcgaatatttgttttttcattatctaaaggagctgaaaatgcaactgcaagaaactattacatggccagcagcttctacagcactgtggccgacatgtatccgtggatccatagtaaactccattcatttcatcagaatctaatctctctacaagaaaaatgttcctcctcctaatagtagccaggcacaagaagacacagcctcaacaccctgataccataattcaactctggcagcacatgggctgtttgcagatacccgatctccagcacaggggtgcagcaatgtgtggagtagttaagcagttaaatgatcctacaaagaggacaatttatttatgttgtcaaagttagtacaagaagtagcaatataatgtgtggagcagttaaatgatcctacaaagaaaaaaaaattatgtacatgttgtcaacgtttgaaccaatcatataatatcccagctactttttctgttttttaggaacacataacagtaacagccccacttaacaactccattatgtattttttcataaataacgactccattatgtagtagtaccccaaaaacagtcaacaaatggtcccaacactaataccttcattaagaagcaagaggcataggaattacggtgtgacaaatgtttaccactgttacctaacaaggaccaggctggtgttcacagaacccaaagcagagcttgaacaaagagcaataggttaaaccagaagcattcagtgagaattcgaaaaaactgcaagcagagggatgcagccaagcatgccctaccatctgaaagtccatgcactgctcacacagagtcaaagaaaggatgattaagatcccagaatagaattttactccataaaactttacctatacaagctaaccactccaaagcagaggtttgcttagtgcacattacctctactgtaccagtctacagaagctggatgcatgacagacaaccatgcagtcctgcaatgcaaaacgcattatcacaatccatctgctcccaacaactcagaagattcttcattcttgttctcctccccctctcctaacccctgcttcagcaaggagatgctcaccttctccacttcatcctcatcacagccacattgcattcgcaaccactccaccatctctcgccgatggagcaggcacgcgttggctcagccatgatcttcctactcctcgctttcctgtcagaggtttctgcatccatatcgcagcagcagcagcagcaatgcggtggtgcatcgtctgcaggagtgagagctggcttctggctgccatcctcgagccactactcgcctctcggcagcatcgacacctcgctgtacagccatctctactacagctcgctctccatcgacgagacccgctgcgccgtcgcgccgccgtcctccggtgaagagagctccattctttccaatttctcgagcagcatcaagtcctccggtgggggtttcgctgtcaagaccatcttgtccattggcacggatgagttcagggaggatgtgtccaatgccgccttctccaggatggcctcggagaagaaccttcggagagcgttcatcaactcgtcgatcgaattggctcgtgccaatggcttcgatggcctcgacttggcgtggaggtttcccgcaacgcagctggacatggagaacctcggagatcttctcgcggaatggcgagccgagatcatggaggattcgacgaccagatcgaccgagcctctcctgctgacggctactgtttacttctcgaaccacctgttcggcatggccgacactaacctcaactacccgatagacgacatgtcgagcagcctcgattgggtgaacattatcacgttcagcctgcacaagaacagcaacgtcaccacggctgacgcgcctctctacgacaaggattctcacttctcggctagctatggtgtcatctcgtggctggatgcagggctccctccatgcaagcttgtgatggggatacctctgtttggaaggtcttggttcctcagaaacaaggacaagaacgggctaggagcaccaactgcagctgctggaacaaagcagagaaagagcaaccagatcggcgtaatcgcgtacgcagagatcgaagagtacctgaagtctcagagtgtttttgttactcatgacaaccagtcagtggcagactacttctacagcggtgatctctgggtcagcttcgacagtgccgtggttgtgcaggagaaggtggagtttgtggcgaagtctcagttgcttgggtacttcctctcgaccatcagctttgatgactcaaactacacattgtccaagcaaggttagtgattgtcaaattctcatcacagatgtaattaaatgcctcagctaatccttccaaattttgtaatgcagcatcacagtcctggaatcaatatcatgtttcttcatatgcgcaaggtagttttggaattatgcaagaaggagctataatccaagatctgcatgcatcaacagggtcaccaagtagttggtattcaaaaactctcagctacttgttattgtcaataatacttgtattggaggttctataataccaagaacagccgtaatttgtaaacaggccagattgcacaaatagtttcagatgataaggcttataacactacatttatgaacagatgctctgttttatgccttccatgtggttcagagacattatctgaagttcaaataaacaggttgcacagatcatgtacattaccaggacttttcaagttttaccaacaagtgaggttttgaaaagagctatttgattttactttccggcttatgttgttgacttcttcttctcataaaagtaaaatcaaacagattttttccgaaaccccacttgttggtaagacttgaaaagccctgttaatgtacatgtcctgtgcaacctgtttaatgtcctatgggggtttcatccctcatagggcgttgatgggcattgatcaaaatttgcaatacgatttttgatggcttatgtgggtggtcttcgacaatcacaacctctgatctccggaagctgagccagcttgtgtggaagaagaccttctgacattctcgactcctagtgcttcgaggttgcatgtgaagtaaatggtgttaagctagcgagctggtttagttctcattaggagtttggttatgtgatcttgttggtggaaaacatcaggcacctccccccctctctctctcatttcttttatgccccctttgattcaaaagaaattcataggaattttagaggatttcattcatataggaatttttcctacaaagctctttgaattaaggaatgaaccctatggaattttatgaaatttctacggaatgtctcttcccatataaattttggaggaaatttaacaagaggtagaactcatggaaaaaaatcctgtctttatctctcctcaaattcctgtgtttttccagtggtccaatcaaacaatcattcctacgtttttcatgtcggaattctatgttttttttattcctctatttttttttttcattcctgtgattcatagtggcccttagtgcccttgggggtggttgtgttccccttttggtttctcttcattgtattccctcgtgtactcactctcttattctccaaggctcatgcgcttgcgcaatcggagttttcccctatgtaagttcgtttgatgcaatatattcaggtgggcaattcccccctagtgacccgtcaaaaaaaatattgttgactttttagcaagcaccaattctaaaagatatatatatctacaaagctattgaaatgtgcaagagattgtgtcatagatagccgagatggcctaaagcaaaagatcatggtgttgattggttaagaagatcctcatcatgacactgctactagaactcaccatgtcccctactcttttttccagtagggaatgagctgaaactagtagggaaacaagctccctaggctttttcatagggaaaactttcatgggatattattcaccgggaattagatgtaccttacgattttagttgtgaaagcgcagggaaaaaaggttccctgcggtttgaaatggtagagaactaggcttacatggcattatattcagtatgtaaagtgattctgattcccccaaggtttctaaaactgtagggttccaaaatagagagcttgcagctagcaatataacacaaaactatccaagaacaaaagaagctgcattcaacacttgcatcaaggttcacacttcagtgcaattcttccaaacattctaagatcaaaatgggccaagctcttccaaagaattccaaaggacacctgcaggtcgttagagtataagtgttttagattatatgttgaagggtattttagtcgtttcactttcttcttgtacacaatatatcgctctttagagctaactcaatgcaaagattcattctccaatttcctctaaattgtgacatggtataagagccttacacctaaatctagccaccaaatccccatcgccggcgcggcggctcgtcgtcgtcactggtcatcattcgtcatcttggtttcagtagcaacagcagtcagtcgtcatctttgtcttcaaccagcaaagcctttggcggccatcgccgaccagcctccattaccagtcgtcgtcttcgtatttgaatcttcaagcaacagcagccgcaaccgaatcagtcgtcccgcgcggtccttgtcgcgcgcccgtcgtggctccacatctcgtcagtcatcactgccagtcgccgtccattgcggaaccccctcgaggctgctccatcatcgccgggccatccgtgctgccccagatctggggcactgcatcatcgattgctcatctctatgcctgatctgttccgcatttgttgttgccggctgtagtcgtcaatctgggtcctccgtcgcctgcggtttcatctcgtcaccgccttcctcgggctcctgcgctgagcacgtcggccggcctgggtaccactctgttctgcaacctttgctcttttgtgtctttgtcgtcagctagtcacattcatcttcaagcagcatcaatagcagcagccagcaggccgatcctctgcttgctgtctacaagcacaggccctcatctggccatctcatctactacagctagcattcacagcaccagccctcattgtgtcattctttatcgagtggtgaaaagttttgaggtgtcacatcgaatatacggacacacatttaaagtattaaacatagactagtaataaaacaaattacagattccacttgtaaaccgcgagacaaatttattaagcctaattaatccctcgttagcatatgtttactgtagcaccacattgtagcaccacattgtcaaatcaagaagcaattaggcttaaaagattcatctcgtaatttacacacaatctgtgtaattagttatttttattatatttaatactccatgcatgtgtccaaacatttgatttgacacggtgaaaatttttaccagaggatctaaacagacccttcgctttagttcttatgcttgcttgccgctgctatgaatatatctactagtatcaggtgccttttgctactatgctgatgtaatcaatttcctatgtgtcgaggagtgatcctctctagcgggaggtcatgagaccccccctttgtgagttcggccggggaagcgagtgagatccgaggttcctcgagacaaaagagacacgagggattt

SEQ ID NO: 10489 - DNA, 2417 bp, Oryza sativa
tcaagctcgccctcgacggcacacggcctcaggtggaggcgctgctcgcgaggctccgcccggacgtcgtgctcttcgacttcgccacgccgtgggtcgccgacgtcgccaggcagctcggcgctagggcggcgcacttctccgtcttcaccgcggtcaccagcgcgtacctgacggtccccgcgcgccgtcgtctccaccacggggcggcgtcgtgcccgaccgtcgacgacctcgccacggcgcccgtggggttcccgccgtcgtcgtcgctggccaccgtgccgacctaccaggccgccgacttcacctacgtgttcaccagcttccacggcatgcccagcgcgtacgaccgcgtcgccgcctgcgacaaggccagcgacgtcctcgtcttcaagacctgcgccgagatggaaggcccctacatcgaatacgtcgccacgcaatacgacaagcccattctcgtcacgggtcccctcgtgccggagccgccgcatggcgagctggaggagcggtgggagacatggctctcctccttcccggacaacgccgtcgtcttcgcctccttcggcagcgagacgttccttccaaccgccgccgcgacggagctcctcctcggactggaggccaccggccagccgttcgtcgccgtgctcaacttccctaggagcgtggacgccgaggcggaggtgaagaagtgcatggcgccggggttcgaggagagggtgaaggggaggggtgtcgtccactcggggtgggtgcagcagcagcacatcctgcggcaccgcagcgtcggctgctacgtcaaccacgccggtttcagctccgtcgtggaggggctcgtcgccggctgccggctggttctgctgccgatgaagagcgaccagttcttcaacgccgcgctgctcgcgcgcgagctccgcgtgggtaccgaggttgcgcggcgagatggcgacggatggtttggccatgacgcggtgcgtgacgcggtgaacgcggcggtcgccgacgccggtggaggggacgacgacgagaggaagtggcgggagttcttgacggatgacgccgtgcaaaggagattcgtggaggagttcgtcagggagctgagaaaactcgtcctctgaagaaaatcaactttggccgagtttagttacaaacttttttttcaaacttgtaactttccatcacatcaaaacttttcttacacataaattttcaacttttctgtcacatcgttccaattttaatgtaaactaaacacacctaaaagtctgtcgtgaaataaggcgtgtaaaaatatggtgtcatgttattgtttgattttagtctcttttttttttctaagtctttgttgatacttcgtatcaaagtactccttgtcctaaaatataagtacttagttataaatctgtacacacagcttaaaacgtaagtatatttagttatgaatcttcatataaaaaatgtaagtatttttagctattaatcttcatattttaggtggtatatatttataaggtgagttctggtgtggtggcggcgtggcgttcatgggcgagccctcgagcacggccttcagtcgtgtatgtcactgaccagtggtagtggtcccaacgtggagtggagaagaagataagtcgtgtcatcacttaaacgcgacgcgacgtggcgccacttgtgccgaaggacacggtgtcgatcgagcaggttaattatgggcacgggagcaacgggggtgtgggcgcggcaacgtgcacgcgtgggctgattgacgatggaaggaagcggcgtacacggctttggtcgcgcgcgtgaaggatcgtcgggagagctcggcatgtccgttaggtaccgcatggtaaacggggaatttaactatttgctatttttaggttgggcaattatccaaatactccttttagatttacacataattttttgccacttttacgagatgacttcttaactatttgccacttttgcccacgtggcatgccaacatggcaacggagggtagaaaccggtgtgggacccactagtcagcctctcctctctctccttcctctctcccttcggtccgatgtggcagcggacgaggtagagcggcggtgccggcggaggtcgaagcagagcggcggcggacaggctcctcgcggaggcgagcagcggcggcggcggaagaggaggtgtagcgacggtggacgggcttctcgcggaaacggagaaggcggaacggcggcgtcggtggagaaggagtagtagcagcggcactggtggaggagaaggcatagcggcagcggatgggctcctcgcgacggcctaggaggcatagcggcggcgccgacggaggagcgccaccggaggaggaggcgtggcggcggcgccgatggaggaggaggcgtggcagcggttaaatt

SEQ ID NO: 10490 - DNA, 3976 bp, Oryza sativa
tgtgtgtgtgtgtgtgtgtgtgtgtgtgtgtgtgtgtgtgtgtgtgtgtgtgtgtgtgtctgagatatgtatccaagccatgtaatctatatatattagccctccgaagcacgatacaatgtgtccaatatcttcaatacatctatctcttcttataatattcaacatggcatcagagtaggcgacctatgccagccactgcttaggcttccgccgtcatcgcccttgggatggttctgatctctcggaggcaaccacccgtttatgtttttctttgttgccgtcatgccttacctaggggattgatcgtgatctcctaggcatgccttgttcttcgtcatgttgtccacacaacagcaacatgccaacattgtacttcatcagcaccagcatcaatcgtcatcgatctagatgtggtagtcatcgttctcctcgccgatctgttgcagctggccttgaacaatcgtcaacaccccatgtagcaggttgtaacttgtaagtggatattacctagttgaactcaccagactatggcaaagtccttagacttagtagtgttgacagtggttaagtgcaaacttccaccgtcaacttctgcataaaagaatataaaatataatatcaaacttagtgatagtgtttttttactaaccttttccactagtcttggtaaatattagtatgcaggtgatttctgaaggaaaatacactcgccatgcgacaaaatgtatctccgaccaattatacacaagaacaaggattgccgggcccacatgtcagtcaaaatcgactgaattttagctaatccactactaaccggcatcagggcccaccagtcatagagtggagagcgtctgtggcaagaggcggtatgcctgttcgaccgaaccaaggctaacccccatgttcacctgctcgcacgtggtgaccccctattggttggtaatggtggttgtgggtgcaccgacctccacaaaccgtcatatggaggctataaaagaaggagctcaactcacttcgaaaacatacaactcaagggaagtacaactcactttcatattttaggcatcactttagtatgtggaattaggtagagagtgagaggaagctccggaaagagtgtcccaaaaatcggagttcacttcgggatgtttaggaggagtgtcgggtttgttgacattcttccactggagttaaggagaagcgccagagttgtcggtctttttctcttgcttgtacctcggcggatgcttccttcaataaagtaagtataccagatctccttatgatatttaatttatttgcttgaatcagatatattcccaccgttgtgggctcatcgcttagttgatttattaagtgctataatactaggactctggataaagaaggaagtttctaaatgaggctagagtagaaatcaataacttagacgtggtgtctaggttagcggttaccttcgtttgttgtatgctccacaataagtgaggtatgcgataggtggtgatagcctggttcgtcctttgtatccctccacgttcgggtacatcatagagccataggtcggactcagcttggcagactaggggagagcaggtgcccaaagcaatcaacagggttttacctttaactcaagtatagtaaattaacccataggtaacatctttaaccttagcctaccattagttgttgcccttagatagaattatgttcttacatatatacacacgttccccgtgattcgataaccttggaatactctgtggtgaagtactacagcgatatccatgcgcttgcggattaatcaatgaccgtatcaattaccaacaagcatttttggcgctattgccgggaaacggttgatgtgtcatctccgaacctgagtcatcctcgtatctcttcttcctttctattcttaccatggagcacctttctattcaaaacattactactccatggggcgagttctgtgagccacctttttcttcaagacctatccgttcatttggccatgaacttcatcctagctttttagccatggttcgtgaacaataacttctaaagacatgaaagcgaaatacctaccatcatctacatgagtttgagcaattgttctcgtgcctaaaaatagtggacatgacataagaaatcttaaagtggaaattgtttttcttctctattatagagaggatgaagcaatggtacgtccatactgtgagaaaactgcatggtgaatgggaggaattaaaagctagctctgccttgttttcttcccattaaccactgtagtctcttaatgtaagaaggttctcagctttcaaaagaataagaaggaatccattggtgcagtctgggctcgtttctccatgttaattcaagatggccctaacttgtctctacccgatcacgggttcttgtaacatttccacttgggcttagacaaggagtttgtcatgtatctcaatatttttgccggaggtttgtttgcacacaaaatgacgttagaagatagggaactcttggattgtatcatggagaacacctccttcgtttgttgtgaaactgtcctggaaatcgaggatacgcatgaggaacctccgatggccaaatcggagaatacaacctctacatcccatgattcgaccgttgaatcatcacccgaaccacgggaaccgaaggtagaaattcagccttcggaatttccattccagtttgagggtgatctttttgaagattatggaagcccctcaaactattcatgccaaaagagtgcaccggtcctgcgtagttctcccatgccactcaaggagattctgttcaaagagatgcaacaggaattaactaccatcatgagggatgagtggttaagggaggtggagctttcttctgaagtaattcggattaacaccccatccttaactattacatgtctcatgagagaggccatggtgcaaactctttataatccaactattggcgcaaacattatgtctacaatctttgcattaaattgcttaggggatgaaccattggcaccaatagaaaaaacactttcagatcctatctggtcctatcatcgaaggttatgggattctttgtagatgccaatccggcacaatgatgtcgaggctatcttggacttccatgttttagaagtctttgacttcgatcttctcatgggccatcccatagagaaacttcgcattgatgtgccgcatacaagagtcctcaacatcaaacttgggaaaatggtgttttccatcccgatgttacgattgaaaatttgttggacgtaacccattgccaattccgagtcaactgaggaattgttggccatctctcctttcgagtccaatgaatccctcgtcgaagatgatgacaatccatttattgaagaggatcggaggacaatcctggagagctgatcgagttacccaaagctgatccatcctcacgacctccggttgagctcaaaccacttcctttaggccttcgctatgccttcttgtatggtgctatggattcactcgtcatcataagcgtcaggctttcgatggcgagacctcaaaactcacagctgtgttagaaacgcatcgctctattctaggctactcacttcaagatcttaaggggattagtctggccctctatactcatcatattcctttagatcattcttgtgcgtcctcttgagagccacaacaaaacctaaataatgctgtgagagaggtcatgaaaaaagatgtcttaaaactcttacatgtaagatagtgagtgggtcaacccagtccaggttgttcctaaaaaggaaagtatgacagatgttgaaaactcaaaaaaacaagttatttccacaacataccgtcatggggtggagaatgtgcatagactatagatagttcaacaaggctaccaggaaggaccacttcccgctgccctttattgaagaaatactagagcggctagcgaatcactc

SEQ ID NO: 10491 - DNA, 999 bp, Oryza sativa
catacatggctatttttgtcttagcatataagattatttgagttttaatataagattattatatttctaattagacttagtatataataattgactagctagggtcctacaatatacatcacctagacttagcatatatcatcactatttgagttttagtataagattattagatttgtaattagacttagcatgtaagattgtgtagggttctaatatatgacagttacacttagcatacatggctatttttgtcttagtatataagattatttgagttttaatataagattattatatttctaattagacttagtatataataattgactagctagggtcctataacatacatcagctagacttagcatatatcatcgctatttgagttttagtataagattattagatttgtaattagacttagcatgtaagattgtgtagggttctaatatacgacagttacacttagcatacatggctatttttgtcttagcatataagattatttgagttttaatataagattattatatttctaattagacttagtatataataattgactagctagggtcctacaatatacatcacctagacttagcatatattatcactatttgagttttagtatacgattattagatttgtaattagacttagcatgtaagattgtgtagggttctaatatatgagagttacacttagcatacgaagaagagaggaacgaggatccaaaccagtatttgaatgaggaagggaacgtggagagggatgcggaggggaaccaggaggggcacgtggaaagggatgtggaggggaaccaggaggaggaggctagtggaagtcaaccctccgttggacagaagagggcacgtgggcaacgaggtgccgcgaagaagcttgagggtcggcacatcataacgaaactggaagaagatggacgacctagtgctccggcagaagccgccaagaactatgtacgtcacagcggttggg

SEQ ID NO: 10492 - DNA, 5298 bp, Oryza sativa
tcatagattactttcacaagagtggtcttgcccaagcctccaaatccgaaaacggagacgatcttcaacttgctctgatcccccatggacagcatctctatgacctcatcccttggtccgtcaatgccaacaagctttgttgacattgcctttgtgtatggatcatgggtaggatgaccaacagcagtgtaattgcctgcgccatgcttggtagccacatatcgaagtcgctgcttcgcgacggcgtcggagaacatctgaccgtactccacgctcccattgaacagctgatcattcatcttcgccacgaggcgcatcagcatctcaaggtcggcttgctcggggtcagagccgacacgcaaggagatgaggacggtgtcgacgacgtcctccaggtcgtaggacagcatgcgcacatcgtgagcccagagcctgacctgctcgtcaagctgatgatcccgtggaatgttggccaccaagcgtagggtggtatccatggtcttgagacccctagagaactgcctgacccggttccttacgccctcctgcagctggttctcctccaaactgagcagctcggccagcctagagagcaggctgcccatcgccgcggttgctagctccatgctcgatcgatccccttcttgacacacacggcagttggttgagatgattaattggttacttggatgagtgatcgcttagctcctctcgccgttctatcgccaatatttctccaatatctacagaattacaaatgaaaggcatttaaggaagtgaaattcataaagagaggtagctatgtggaattggggaaaaaaatggatgaacactactcaccaagctaacagcaaaccaccatatgcaatttcatcgatccttaatttacttttgcttgtgaatagaatcagaaggttctatcttcttcagctgaaatagtaaagatatagaagctcacagttttgttgtaggtcagacagacgaagctaactgatggatgcgtgaaaggatgatttagctatattgtataaacacacgcatgctgattacaccaatctcgatctgtactgtattattataatttttttcaattggtgtactgtattgtaagttgtaacgccttgagaaattgcatgcaacaatacctccttgtttagtgattaacccttacaaattttgcatatagggactccaatttcacaaggataacagcaaaaataataaatgcataattagtcctcagtgcattatattaaatatgtgcaaaaaagcatccatgttgtctataccaattttttatggaaatctataatgcctattatctggtgagtcaagattatataactgtgcagattgcttgaatgtataatgaactaataaaactatataacgattgcatacccaattctatgatatagtcttagtcttttataaatagaaagaagagttggcacacacaattctaataatctaataataaactataacctatctttgtgcagttatgcggaaaattaatttatctacctatctgaatgcgtatgtaatatcattatattttctagtttaccaaatataagccattagggtatgcctctaaatttaaggagtaaatcatggaagactttctagtattccatttgtaatttaatttttcagcttactttttgatggatgtagtttcagcttattgcgtcttttcaataaaccatgtatatatatttacaaaatgggaagccgttatattgctaagttaacgtaaacagcccataaaaagagttaataggaataataatattgataagcaagcacgtttgctctcactacagaatatttatagcattaggggtacggtggatcaagattttgatgggagcagattgcaaaaagggataaaaaagtgattcaattcatcgagatatccacagttccacactaaaaagtaattgcaaattgctttgaaactactagcggcccaccgataactagctagctgcataaccacaagtaattttcaatggggcagattgcaaaaaaggattataataaatgatttatttagtattactcacttaaaaaggtacagttggtctgaaactactaccgacccactgataacaagcctagctaacaacgagtaattattccagctgaaaaattgaagtacgaaatacgaagtcaacgctaataatatatatccccttgctagcccaagagagggatctatggttctttctcttattatttttcttaaaaataaccatagctgctctccacagttcatctatcacccgaactaaccctgatatcttctactccatggctccatgccagctatatttttctgtgctctctttctcatatccaccaatttccgcaaggagagaaattaatcagaagcggcgagagaagaatcaagcatgagaagaattagcaatatccatcaatcaagtgcaagctaggcagaagtgtgaagtttcggggatggagactgctgtgctgagcactcttctgaacatgctagggccgaagctctacaccttcttgcaagagaaccatgagctgcggcggaacctggaacacgacatacggtacatccggaacgagctccggatgatcggcgcggtgatcgatgagcacgaacgcgggcagatgaaccacggtggccctctgcagggggcttggatccatggcgcgcgcgagctggcctacgacatggaggactgcatcgaccgcttcatgcaccgtatgacaagtggccataggctcgccacaatggccgtccgcaccaagtttgccaccgtgatccagaagctccggaagaaatcggaggatctgtctaagctgagagcaaactacacaaccgctggcaacggcaatggtgattgccaagcaagcacctccgggaccatgtcgtcatttgagacgacacatatccccacagctgacaccgtccctgtgggaatggacgggccaagggatgagattcttgagctgatcatggaaacacaaagccagcccaatcagctcaaggtcatctcccttgtcgggtttggcgggttagggaagaccctcctcgccaagcaaatctatgagaacaccaccatttgcacacaattcgaaccacaggcctgggtttccgcagcagggaagagtgcgagggacgtcctcaaggagatactatgccagcttggcttccaatcgcaagcacaggaggacgatgtcagcaagctcatcacaagtctgaaaaaatgcctccactccaagaggtaagaaatgagaattcattattcatatttctgggagggtattctctcctgtaatgaatatgtgaaggtttaggacaatatttagtcaaactttaaaactttggttataatatttttactagaacagttttataaaatctaattatgatagtactttttgaaggcggatatatgcataacgtttctttacaaaccaggcatctgataaattattcatagccaaaaaatcaaataaaaattgactacattttactcgacgagtaccattaactatataataaaaaaatccacgtgctcactttcttctcatgttgtcattataacatgactcaacattactaccaaagcgtttgtctgcattttaacatagggcaaataccacctcttcaatatgataatctgatgctgctgcaaattacacaggaatgaaaaagtcactaccacaagatggaaagtttcccgagtgcccacaaacacgggaaagttcatgttcctgccgaagtgtgtccgttgccacccatcttttcatatgtcacaaatgtacactcgggaagtctatccatcccgtgtatagcattctgcacacggaaacgtctctttggtttctaaaatactccataatgttcaggacactttcccatcctggtagagaattgagaataatatatacaatccaatattatacatatagctcagtatattaaatttctcattctattgttacaactactgttatttgtttcccttacacagcttcatcaagcgacaaccataaaaattagagtgttttcatggtccttaaggagattgttttaacactatctccctgtgaacaatagacaatgtcacagctcctaaagagcagtaaagagctctacaaattaggctattcacttctttgtgacttgcatccgttttcgatgcatatcttactcagaccactgtccgtgctactagttacaacttacaacatcaatgcttgaaaaccagtatgaaaaaaaaaaggactcataatggcaaaacacaaatcaaattaagaagcaatctgctgaaatgacttatcagtggctaaaacacaaattaaggttgcaatctgcagaaatgacttatcgatggcaaaaaaacaaattaaagttgaatctgttcatggactaattccaaggtacctaagatgacatgaatattgcacatcgagagtgaagattaaataattaagcatagggaaaaggacaaattaacaatgtaagaatatttggtgcaatcagcacaacaatgtctggccttattagacaattattagtaacactatttcatggttccgagaactaatagaaaagaatatgcctaaccatctagagtaaataacctagatgaacacatgtaagacaaaagaaaagggacaaaccaaaagttgcaaatgcagcctacatgtgtggtaagtttaagctatggattatgtaagtttacatgactaataataataagaaaaaaactgctattaccatgtctactaagcactgatccatttaccttatttctaaatacatctctataggttcttcattgtaattgatgacatccagagggaatattggaacagtactataaaagatgctttccctgtagatacaggatcaagcagcatagtgctggtgacgacggccatccattccatagcaaatgcctgcagctctggtaatggtcatgtatatatgatgagcactcttgacaaaaaatactcaagaaaactattcttaagagaagcatcatggggtgactacccacctggttcagaaacagtgctgagtactaaatgtgatggtttaccacttgcccttgtatcaacagcccaattcttgaaaagtaaaggtcaacagctaccacaagaatatgcaaagttgtgtggcaatctgggtatgcatctggaaagagaggatactttagaaagaatgaagcatgtacttgttcacaactataccagccttcctggccatgttatcaaggcctgcttgctctattttggtatttt

SEQ ID NO: 10493 - DNA, 2149 bp, Oryza sativa
ccctacaggcaaacattgcaaacaggctataagactactgaaacaggggacaaaaccatttttaatggattctacacatttttcttgatttactgagacttgaatgggcttaaacggagctcggatgaattagttatgaattttagaagattcactgtgtttattactatacaagaaaaaccttaaatcatttattgcgcaatatattccagggctgacgtcatcaaggcggggcgcagcgccgacatgcgggccccaccggtcagcggctcgggagagggaggaaggggcgccggcaagcgggccccaccggtcagcggctcggggagggcggtccacggcggatcgggtccacggaccggggaggagcggcgcaccacgcggcgggggctcgcggccggtgcgcgcgggcacggcgcaaaccggcccggcgaccatggcgcgcgacggcgcggcgcacatgcggcagcggcgcacatgcggcagcggcgcaagacggcggccgacggcgaccgaccggcggcggagagcggcggctagaggtgaagcggcagctacgcggctaagcggcggcgcgacggctaaacggtgcgggagagagagaaagaggaggagaggcctcaccgataacggtcgacgacggcaggcgacggaggacgatggtgacggcgggacgagctccggaacctcctaacgaacaaaaggagaggggttagatggagagaggagagtgcgagagagcgagggcgccggccgaaggcggcggccatggcgtcactcaccagcgcacgacggggatggggctccggcggcgaatctctacggaggaggggtggacgaggtggacctcggccgcgcgaacccaacggcggagacggcgcggtgcggcggcgggtgtagcggcggctagaggcgaccggagtagcggaaacggcggcggcggatgggcgcacggcgcgggagcgatggggaggtcgggagagggaggcgaaatggggaaaaagcgagagggagcgacgggggagcttaaatagggagagagagggccggacgtggccgggagaggtgggaatcgccggccaacgtggaggagtgggggaggtgagagaggcgggattcgaaaatcgaatcccggccatctcgggcgcgggcgcgagcgggagagagaggggagtgggcgcggggaacgcggcgcacgcacgggcgtggtcgacgtggcccggaggaggcggaggcgtggacgcggcggcggtttcgggcgcggcggttgctggcgcggcgtcggctggaggagggagacgggcccgacaggtgggccccacctgtcggcgaccccgagagaggagggaggcgggacggcctggatgggcctcggcctgcggccggcccagcagggaggggggaaggaagggaaaaaaaaaagggccgacagcccattgaaaaaaaagaggaaaaagagaggaaaaagaaaaagaaaaaggaaaaaggattttccctggaattaaaatattgcttgctcaattttaattggttaaaattatttctagagctctgaaaattccactaaaaatcctgttaatgaattttgacatgtagaactcaagaaaaattccacatgcccaatccgattattatttgcattactttcttagggttttctcttgatttgcacctgcattttcttggggttgtttacaaattaaatttggcttgggaggagaacttcggggtgtgacaaacctaccccccttaaacggaatctcggccccgagattcggaggagctggtgaagaggtgcggatgggcggctttcaactcatcttccctttcccaggttgcttcctcttctgaatgatgactccactgaactcggcaaaacctggtgaccttgtttctggttctcctttcgctggtatcaagtatacgaaccggcttctccacatatgttaggtcctcctggatatcaatgtgttccgaatcagcctgttcttcaggtacccttaagcacttctttagttgggacacgtggaacacgtcatggatgccgatcatattggatggaagttctaactgataagcaacttctccccttcgttccaaaattttgtatggtcccacgaagcgtggtgccaacttgcctttcgtctga

SEQ ID NO: 10494 - DNA, 4902 bp, Oryza sativa
acattgtataagatataaaacttcgtttcttcatttttcgtttgtcctaagtcaaacttttttcatctaaccaagattttaaagaaaacatgctaacacctacaacaccaaattaatatcattaaatctatccttaaatatatttctatagtatatttatttcgtgttgaaaatgttgctatattttttataaagttagtcaaacttgaagaggtttgaattagtacaatgcacttggtgtagtatgacagttctaatatatttgatacatattatccaccaatgttttgttttggggaggggacgtattgcttcggttactatagagcatgtgaaacattgaaagtcttgatttctctttcacaaattttgtaagtcatttcgttatattttacatagatcatagcaaattgaatgaaaattttgcgcattcaatgatgtggatatttaaatttctacatagtaaatgttagtcaattttaaatatattttttgcatattttccaatttgcaggtttaaagttcaacattattttgtagcccttgccaaccatctaggtgctcagatatttgtccacagatcatcaagttcatttgtacctaagaagtccatccatgatcgccacatatgtgaaggtatcctactcagcgtacctacaatgcacataggtattccgatccatcgatttgtacagtcttaataatatttagatactctaattaactttatggttcttaaggtttgttctagaatacttttctaaataaatataaagtcgttattattaggttaaaattttcatatttgacttataataagtggcatgaagaatgaattaaataattcctgacaatgaatggaaagtaaaaaagggaattgatatgcatccaaaacaattttggattacaacatatttcagagatgcaaatccaaaataagaactatacagtatgtcctacacctatctcataataatacatctaatactccaatttttaaattctaagcaatattataattaatatggggtcaaataactatagttaagaatccatgaaggtattcacaggcgtaggacaatttaaaatgctcatttgccccaacaaactaatctaagtttagtatatagtatatgcttactattgatgtagaggtggtgagactttgaatctttatgtcaattttatatgataattaatagttttttacatcgttctatactattagtttagtcaaataatttatcatttaattaatattcattgtcttagtgactacatgatttcgcgagcaaatataatttagcaatataatttttataaaagttgaataataaacacaataaaaaatgttgatgtttatatataatatcaacattcaacaatagtacaaaaatgtaaagaatgttgggtctcccgttttttgtttaccagtatgtcacaattaataagttgaaattaaatataaagtaataattgtgaagttgtatcaatattaattttaatccaaaaataaggtcatcatcacgtcattattaacttgaaatttttttctaagtccaatatgtatgtcaaatattttatattcatgttatgtataaataaatagcccgtgcacggattggcgactagtctatgctaatcgggcgctctgaggaagctctcacgttaactacaagaatctggtcgctgattatttagatcgttcaatcatgaccatagatgttaaaattttatctattgggcctgttataaattctcatgatactgtatatattttatcctctatctagcaattctacatcatacgagagagagcacagatcggaatgattctacaattgtaatgatacagaacagatgcgatctcaaggagatgtggaacgcggcgcgtgagactttgcctgcaactagcttctccggtcatcgtgcctgagcttctccagtcatcgattgctcatgctgatcggcggcgattggaaattaagaacacttgcaggccgctggtgtagctcaatcattgtttggcgtaccttatgttgcttctaaattaattccttgcaggattgtgacatatatgtgcacaacctggcttattgactataattaagatggtgattttctgctgctgttgccgttcctgccgaaccaacaaaccatgcaattgccacaaccgcactttatcggtgtttcttataacagtacaattcttgcctgtttttcttttttttttatttgttatcttgctttagacaacgatatttaatttcctttttagaaccagtattttagcaggatagagtacaagctagatgtgctgcaagaggtaaaactaatatttcactctgtatcttaattagaccttcttggttaactcctttttttttttgcctatttaccgaagaagcacgaatgactaaacttcccgtttcattaattagaagcttacaaaatcataatagtactctctttgtcccactgaatatggcgttcacaagattcaaattttaagactgagttcttttattgaggttgaaaactaacctttcacttacgcaaaacatagttacttattagcacattattaattaagtattatcattttttaaaaaatagattaatatgattttcaaagaaactttactatataatttttttttgcaaaaaatacactgtttagtagtttgaaaagtgtgcacatggaaaaagagaaatgagtgggaaagtaaatgaacgaactcaacctaaatgttggaccaataattattttattaggaattaaatttttttatgaaaataatatgattagattaacctttggatttacaacttttgtttataatatataataaatttaaagtcaaatactagttttgaagagcgcgcattagtcagtggacggagggattacaaatcaacctcgctcaatcttcagcatgcacttaaatattttccacctgtccaggcagcatctttaaacggccagtaagtgaatcttttcttaattatattttatatatcgctaagttacacatatttcatttcaattggcatcatattgaataatcacgagaaaataacaaacacacgaatacatcttttatattatattccactagtagttaatttgaaaattaaggccattagttagttggatggtattatttactatagaacaggatcagaatttgttttaaaataaatatacctttggcgaaaacaaattagtgattaattattcacagtggaactattaaatcatggaaattctataattggggctccaaactgaatacatatgtggatactcactaatatcgaatttcagaatgattaaaacatgaaaaactacaattgagactcttaatcaagtacaactcgatagttgataattaacaaattttggaattattaaaccataaatggctataattgtgatcccaaaccaaaaatgcagttcaatacacttattaattatgagctttagaattattaaaccatgtaaaagataatcgaggcacaatcaaagtacaacttgatatctcttatttatatgttttggtattattaaatttaaaatgatatctaaactgggtttactgatactcactaattctaaatttctatattacatgatagcaaatgctgcggacccaacatcagcaatgtaacagcagaaacataaggatccattctatataagtatttctaattaataattttgatttttggaacataataacaaagtaaattgttccttcttcagaaataaaaaaagtccaagtgttcgttcaccgaaatattgccaacttattcaacatattatttaaaatataatatttacaatttcagtagtaataaccagtgcaacttaattacgtgccgtacaagcactttctcattctctctccatttcaaaatataagtatctctaggattccaattttatatcaccaatcagatgtttggaaaggaaatctaagatatatatttaaactttaaaaattgataactcaagtgacagaaaagaaatctttcgtcctaactgtagtattttctaagcaacctaaaaaaacataatattttgtaacggatggtggatgttactgaaatggcattcgaagcctgcggatgttctcgaagaaaaccataaggcaaacaaaaaatatattaaaccaattccatacaagataggtggtgtaaaaatctgaaattctggggcattggtcagcaccgagttacctttctgaggaaaataacaagctgtttcactgtcttggtatcgctagtcttggagccttcctgtgttgccgcgtatgagaatcctgcccctacgggagaatccacaaaaattatgttgctcacctgcaaaaccatgcaaaattcatccattaaaacctggatatgggcacatgcctttttttcatttgagacagagatacaaataatttgctttgttgccacgtccattaaataatgtaagcaaccttagtccaagtctctggttgatagataattttcggcaatcctccactgtaataccgttttgcggcgaattggaatggtcctataaatgtatgcacatgaataatctgttaaatacaacaaacgttattgtaacatgacctataagcatggtttaccatattgtttatccgaaggaactcggtggaattttttcaataatctgaaaaaaataacctgctagttaatttacctatctcgtgggttaggccagagagactagaacagccaggcccacctgatagccacaataaaagtgggtctacatcaggatccttctctgactggacaaagtagtagaagagacgcacgcccgtactctcgttcacctccacgtatctgcaagagtcatatgtgtgcacacatgatatatatgga

SEQ ID NO: 10495 - DNA, 5494 bp, Oryza sativa
gatcatgagagctttgtcccagattcggagaaagagattctgtggaccacaatgctcgagacattcacccttcccgcgggtacagaggacaaagtgaaaaggtggactctgaagaaaatagcagaacagattcagagcttcaagggagagctgtacaagaaatatatcctgaaggggcagacaccgaacttcgacacattcccaaagctaagggatcactgggacaagttcgttgcatataagacaggtgaacaagggcaggcgatgatggaaagaaacaaagaaaatgccgccaagaagaagtaccatcaccacttggggtcaggcggctatagcgtcgcgatgccgaagtgggaggagatggaggctagcttgcttgagaggggtatcgaaccggccaccgctaattggccggaacgatcgaagttctgctactatgctcatgcgctcaacccagctgatggctcactggtcttcggcgatcagatacgagaggctgcgcgtcgactaacagacacagtggaagcctcttctcagggcacattccgactggatagagagagggacgagctgtcactcgccctgcagactccagagcatccaggacgaactcgagggaaaggggtgattccttggaagattgggttcaaggaggacatctacacgtacaggagtcggatgaggagcaagagagataccgaggcaaagattgcagatcttgagttcagggtatcgagctacgagctcagcattcaagaggaggtggcaaggaaggttgatgaacgcatggctgcacatcggtccaatgatccccagccgaccattcctcctgcaatggtgagcccgtcaggaaaccgtagcagctgcgcctcaacggggcaggtaggatcacagagcatggacgccatgcaaacccaggacgaatccacctgccccgttgatgacatcactcagcggacaccatgtgagctgcatattcctttcaagaacttatcaataaaggtaagctcatagtttatatattttagatttgcccattccgctagttgctgcttatatatgttgattactaataaataacctctcaccacatgaaggtggcgtcgggcatggccatcccaacggacccttcaggtacttaccactgcaggccgattccagtaggatactccaaggtcgaagttgagttggtcgaaggtgcgtatgacgacctcgaactggattaccctggaggagaccgtgagatgcatctacgagacacaagccatgccattattctatggcgtaggcggtacatcatcctccttgggcgacaagcggcgtctcgtgcaccatctcctccggctccgccatctcctccttaggatcctgcaccgtctcctcctcatgctccagcaccgtctccacctcaggctcctgcaccgtctcctcctcatgctccagcaccgtctccacctcatgctcctacaccgtctcctcatgctccagcaccgtctccacctcaggctcctgcaccgactcctcctcgggctcctcctactcaagcttctgcagtgactcctcctcaggctcctgcgccgactcctcctcaagctccttgtccggctccttccaagtcaaggtcccaccaagctccaccgcttgtccgcacaagggcaacaaagaaggtgaaagttgacgccgccgaaaacaaggacccggggtacgattgcacgcaagaggagcttgacgcttacatggcatcagaagtcaagagacaattcaagcctcgaagtctagaaaagaagattcctatagacccgagtgtcatgaacttcttcaggggtatgtctgcacctgccaaggaggccattaagctatcggactatgagcgaacgctgaagaaagcatcttctggaaagtccaaaccagtccctcagcttggagagcaaccaaaccaggagatcgagccgttggtgaccggtaaagaaatgatgatagaagaatttattactgacaccggtctaactacggatcaattgctaggagttgcaccaatcgaaaaggcgaaagtgaaatacatgtacgaactcggtaaaccgcttgtcaagcctgagctgctgcagtccctacccacacaaatgtacaagttccatcagctgtacatggagatgagcgccaccggtagagagatgattggagcgaggatcagggacacggacttcttgaaaggagatgacattctctggatcaatttcaagggaatctacgaattataccagctggacgccctcgacgtctctattatgagttgctggattttgtaagtatatcgttcagttagatttcttactacgtatcctttaattaattaggtccttgtatataagtagactatagaaaataatatactcccttttattgttgtagaatggagattcaaagggcccgacggtggggggttttcgatactggattcatcgaccctcggaaagtaaacgtcgcaatgctcgaccaatatccgcaagccacagaggacaatctcgtccatctcctgaaggcgcagcattacaagacgttcatactgttgccgtacaacacagagttagtttaatttactgtcttcctataccaaatttcattcccgtacgaacttgctaagtgtttcatatgtaatgcatcccacgcacattgcagattccactgggtgcttttagtcttcgacctgtcggcctgcaccgtcaacgtatatgactcaatggataaaaaagagtctacgtttgacaaggtttttgaacttatagacaggtaccgtcataaattcctctgttaattaagaaaatcttgttatgttaattgctactacgaatcatagctttaaactctatgtagggcttggtatcggttccgtcatttggtccgcggcaaatggagagaaagacttaggcggaagttcaaatttcctgtgagtacacatgctctacatttatatttctccgattcaaatacatacaagtgtatattaattagatctctcgttgtttgtcatttatttgtagtgcgcaaagcaaaagaagggaactaacttgtgcggctattacgtgtgcgagtattgccactgccttgcagaccaaatcatcaccacaagagagctcgatgtacgtacaaataaattcaaaatttcattacgtatcgatttcttgtttaattactaatcaatttcatacattcatatagtttattcgcatgagggataacctgaccacgcacaaggaatttatcgcggcggttcaagaacaactcataggattcatcaacgaacaaatccttgatcccaagggtaaattctactacgacggaaacacaattcatagatccttagcttctgagcaagcgactactactacgtcgaaatcgtagctagctaggacatataatggattgtaattaatacatgactacatatgtttctatatgcatgtgtacacattttctataatgtaaacatattttggtcatatatatatatatatatatatatatatatgcatatgcatttgcataacatatatatgtataaatacatatatattatgcatgtacatatgtattgaaacatatataaatataatataatatatatatatatgcatatattatatatgcatatatgtactgaaacatatatatgcatggtttatatatatatataaaccatgcagcaatagggccatgcaaaaaaaaaaaggtcagctcgatctttagtcctggttggtaacaccaaccgggacggctgagccatctttagtcctgattattttacccggattggtagtcccggtttgaaaacctattttacccgggactaaagatagcgatctttagtcccggattgatagtcccggtttgaaaaccgggactaaagaggggttacgaatcgggactacaaagggtttctccaccagtgtaacctgaaacggaagcgagtagaattttgtctagtaggtcagacatatactgttggcccaaaaccgggagaaacccttactacaccccaaaagcaagcttaagaggtgagggactcccccacttttaagttggttcaactccgcctaaataagcaatgtgggactattcacaacatatactgccgtgatctgttattcatactgaaacaggtgcttttttttggaattaatgcctacaaatatttgctgaatgtactataggaaacatataatgttattactggattatggattacctcataaagttcattggatataagtcccatgccatggagaaatggaattttaccaccttcatcaaattggcgttcggtccttggattgccagcaacgtacccctgcgtcatgtacacaaggtaaagaaattggtggaaggcaaaagttaattgcaggccacattggtactacacattagcaagcaatttatgtagactattgacgtaattaagattccaaatataaaatttcatgattgatatttatctgataagatcgatcagaccatgagattcaaaattggtttatctcctgaatcattgcctgaaaaatatagacacatggtccgtagttagtagttggaaacacacacaatattaatccacgcagaaaatgaacaacaaatttgttttaataattcatgaataaaaaatatatatctcagtcctaatatttagatggagagaattccatatatatcacttgaaattggctcattctcttatataccattcgaaattagctctttccatctatgccactggtttaaatttctcgaccctcttgtgctgttaccaccactccattatctgtccatagtttaattcctctttttcgtttccttgtgcatcttctgcctaaaatccaatattgccctctaacaatgctggatccatcaaacaaaagttgccaaactaggaaaaaagcaggacctcgctgaaacttcgtcacggtcacaaccaacttgttctatagcaactttcaagggcaactgcatctttctacaatggaattaattgtgaatagacgatggagtgatggtagtggcaaaaaagaggataaattcgaaccaatggcatagatggaaagagctaattttgagtggcatataagagaacgagctaattttgagtggcatataaggatttctctcatttagatgattgccaaaacaatagtatttagttagtaacaaaagaaaaatcttactagtaattgttgtgatagtaattgatatatggtgatcaccattacccatatgagagatggtattatttactgaaatatattccgaaactgcaaggtgatcaaatttaatgttgtgtaacactgtgaggatgtctaaggaaattatccattcacaatgcaagaagcttactttcatcaatcgctagcgcaagtgtaggtacaatataaccactatatgagtcacctccaatatacagcggattcagcaagaactggggatgatcatgaagccactgtataaa

SEQ ID NO: 10496 - DNA, 1487 bp, Oryza sativa
  unsure (1)..(1487): unsure at all n locations
cacgccgtcgaaaccttcgtcaaagcgtaagactaacggtttcaataacttggtaagatctctagtagttagatggtgaaatattaccagctttgatggcatttctagcggccacacggaagtcctcgacgatctggactatctcccctgtttccagcctttgaggtgccgccggggccaggtcatcggtatttccaaaatagctgacttgaggtgttactggattatctgtgtttgaattcggggcatgaagggaagtttatgtgaaacaataagagcatatataccgtaaaatgttctctttccaatactcccttcctagagaaaaaaaagagttgtaataaagaattaaacatgttaatatacccgttgaaaacacgcgaccgttgtgccagatttggcagaagaagagtgcgcccttggcgtgcacggcatcaacgatcggccgccaggcctcgatttgctcctggttccaaagtccaggcgcgtctagggacgacggaagcgtgtagtggctttcttcagcaccaccagcattcccgctctcgtttaggcgtgacatgaaccaccattttgacaggttattccggtcatttacccctgattcagttgctttgacaccatctgtagctgaattatagtctgttaagttcgtgccgaaaagaaagccacggggacctggacgctggccgtggattggaccgttcgcagcgtcgtccttggatcgtcccaacgcagcgtaggagactgcgctggcctctgcaatgaggagggcgcccggcgtctccctctgcgcgtagtagaggagattgtgtggctggggcatgctcccatatgatcnntgaaccttgataccggtgcatgtacaatcctgtaccaccgccgtaagtttccgtaatgaattttagtaattttttcacggatttgctagaaaacttcccccaacagcctgtttggcaagagaagggaagatgaatgggagtttcaaggagggagttggtggtatgattggttatgggagttacatttttagttcccatcccttgtttgcgctgtgtttattcagcgcaaagtttgggttttgattgaaattgaagatgatgtgactgaaaaattgtgtgtgtatgacaggttgatgtgatgaaaaaagactgaaatttagatctaaactttgaatctaaacacagccttagtcgaatcccaccaagtttcacgaattaataggcctcccccaggtaagagatttgtaggaattggacctcttaattccccatctcaaacactctcaaatcccaagtcttccaaccaaactacaaccaaactacagacttaaacttccagatatcataaactcccattccccatcaccatctccctccaaccaaacaggctgcaagttcttttcccccaaaaacactcagatttgtgaccatcgtatcacctcgagatttgtgcacgaatgaaaaaaattgctagaaagaaaattt

SEQ ID NO: 10497 - DNA, 1148 bp, Oryza sativa
tcccggcgacgagaagcgaaggcgagagtggcgacgggtagcggcgacaccggggatcattttaaggggttggagagcggcggcgaaggcccacgacgaccggcgacgcgaaggaaacctcggggttcggaggaaagagaccgatccgattcgacctcgaatccacgaacttccaaaacgattttgccgatgattccaaaagagaaaaggtagaggagatcccgaagattgttttccctcaattgatttcaccggaaacggaaagacgcggccgaatttggaaggagacggcggcgccgctcggctagggtttcgggcggcggcggcgcgacgaagacgacgactccgacaggcgggccccacctggcagcgagcgagggcacgcgcgcggctgcggcggactgggccgacttgggccgaggagagagagaagggttttgggccgactttcggcccaaagccaaaagagacttttaaaaacctttttcaatttaaattattcatgaaatgcaattccatttattaaaaatacttccttagctcaaataaatcccagaataatctaggaattatagaattaagcaaagtatttaatgaaattttatctggccccattttatattggaatttattaattaaaattagatcttctcttctaggcttttaaaattatttctaaaaattccaattaaacaacaatttatatatttaggattttcagggtgtgacaggtttcacccccacccctcaaaaggcagctggacaaccggacaccccggccgacccaactccatcacgcccaccctcgccaccggtgcctaggaaagggttgagctatacctcagatcaagcagttacccactcccgcttgtggtaagcacggtaagtctcccagggtttcctatgaaccggtccttaattgccatgggtgcgaccagcaaaaccatgcacccacaacccaccattcggtgtattttaaataactaacaccattgcggtggcaccaatccagaactatgctcatagtcaaagtctatgtaataactaagcatggctgagcatttcctaaaccaacatctaatcattttgataccccagttatcaatggcatatggtaaatgatatatggctgagtaataggacccatc

SEQ ID NO: 10498 - DNA, 607 bp, Oryza sativa
tggggattatcctgatttccaaaagttggtgattaaggctattcgtcaggaagacaagtcaccagcatggagcaaaagaaacgccggattgctcaattcaaaacacaacagggaaataatcagaagccgcgtcttactttaggaccgcagtctatgccacagggaggttcttcgtctgttgttcgtccgcagcgtcagttcttcaaccaacaatgctggcaccaacatccgcaatcaagctccacgtcctgttgcagcttctacacagcaacaacctgccaaaagggagcaaggcagcaagcccgtggtgtgtttcaactgtggagacccaggacattacgcggacaagtgccccaaacctcgacgcgtgaaggttgtccctgcccagagcaactctaccgtaccagcatcaaaggctcgtgtcaatcatgtcgctgctgcagaagctcaagatgctccagatgtgattttgggtacatttcttgttaacttagttcctgcaacagtgcttttcgattctggtgctacacattcattcttatctatgagttttgcgggaaatcatgggatggaagtagaagatcttagacgtcctttgatggttagt

SEQ ID NO: 10499 - DNA, 5149 bp, Oryza sativa
tagcattacaatatgtaaaatcactatattaaattcttggttctgtatctcggcatattttgcattagaaaaagtgggaacatagaggttgcggaacatgcttgagaacagttatattaaagaaatatatataacatgtttatagagtacttaaagatcgacaaattctccccaaatatagaacaaacaataaccttaggctaaatcctgattaggacctatcatcattcaagcatacatatcacttttaagttcacttattacataataataaaattaaggaatccattaaaaacattttctttgagtgaattattgtcacgccctgaactagccccgaacggaaccagcccgtgatgctccaaattaacctgttaaccgataccagtcccaggaaatagagctggtatcacagaaagacagaatatcacagcaatagaggtctctttattatagagtaggagtacagtcatgttgggctacggacagaccccgagctcacaactgcattacaagagaggaaagcggaagccaagatttggacctaacatcacaggcgcgacttgggaaccaaatcgaaaccctaaaactcatcatagctgactttctcttggaagaactcctcatcagcggggtccatctcatcttcttcagccattggggggggaattatttatatagagcaagggtgagtacaggagtactcagcaagtcatgggaattatgtatttaatgaaggcttcaaaggaaaggctgttgtttttacaattgatttttggttaaactgctttttaaaacaactaagtgagtgcttctcaaacgacacggatgagacagtgcatctcgtccggtcggagtatgtgcaatgtatcagtctttgattgattcaagattggcacccggccacaactttcaaacggccacccgggcctagctgatcccgtcagctacagatgttccaaacatcgaactcaaattcccaacagcaatttcacaaagcagtagtcgaacaaaactacgctaaggaatcaccttacatccacccatgaccgtgggcacggctgttcgaacagtttaataacctctgcagagggggcacactttacccacacgacattactaacccggatcacccagcccgtggagaacagccacacctggtgaccttaaggctttcatgacaaggcatttcgagagccgacacaggtttaccatatgccgacgagaggggtcccagaccaacaacaggttaggtcccagaccataatgtgccaggaagcccaggggtcctccccgacaccaccctgtgaatccacttgtctcccggtatcaaggctcccctgattagctaattactcagccaggggtgtcccattccacccatgtggtcgtacttgctatatgtttagatgaaattccaaaggaatcggtccttaagtgcaagagcgggaaaccgtgctcccggcacgtcccccggtctgcgatttttggaaattcatttagttcgcaagcaccgacccaggcgtcgggtttttccaagtcttttgtaaaacccaagttttaccaatcgttggatattttaaatttgaggggaggactccgacgtgcgtgcccgaaggcccgtacatcgaagtacaacagtcgacaaaggaggtttaagtgttcaataattcaaggagggtaattgccgcaattaggattggggccggtaggctatctcgcaagccgcggccaaatttcttgtgttaatcctatccatgcattatttgcggaaaagaaatacttagatttaaattataggtgcaagatgatcaaaggtgacttgccttgctcgagatcttgagcttgatcctcgaaatccgcacactccgggtcttcgggctccgaagctacacgtgaacgagacgactcaacaaacggtgaaattaaagccctattattgtcctctaagcgtgccattgggtagatctcgagatttgaggatttttggaagttgaacggagtcaaacagatgtacggttgagaaaatattgaatttctaagattattggatttttggtctaaaggaaaaaggatttaattaaacccgttgaaaaagaaaagaagagggaggaggaacagacttccctcgggcggctagggtgcggcccgagagaaggggcgcggctcggccgagctaatgggccggcccgcccgagaaggaggcccaaaggcacgcgcggggagagagggaggggaaccggtgggccgggtccacctcgcgtggtcccgagtgggacccacttgtcggcggctcggctcaccatgagcgaggtgcatgcggcgcggtgctagggttatggtcggtgcggtgcacgcgtctggcttgcggtggacgcggcgcgcaagtggcccacgcgcagcctctcggctctctgtgggccgcgcgcacgcgagcggggacggagggagcggctgaccagggtcggcttgacccggtccggccgagctagcgccgacgtggcgccttcgtggctgccacgcgggccggcgggaggaagacgaaggcgccggccgcgaatggacggcgggcggcggcggtttctccgggatgccgtgtgacgacgagggcgacggggtgtacaccggaatgacaaggggaaatgagatggagcgagccaacggctcggattcgccggagggggctgcggattgcggcggcggcaactggcggcgagaaagggggaaatcggcaacggcatgatgggagatcgattcgggcgagctagagcatctacgcgactccgggaatccgtttctagcgtcggattggacggaacatcgccgaggaaggccggcgacgggcggctattactgagcgcggcggtgacggcggcgagcctactgcgagcagcggcagcggtcggggtgtcgcaggctagctacggggagactacacaagctactgctcgagtctaaggggaggaggaagagcgaggagtgagaacggggaggtgttctaccgagacgagacggggcgttgtgacgagaggccgacggcatgggagtgatctctccagcctcgggtcggggaagaggaagaagacgagcgcccgaagtccccttccgatcctagcgcgcaccggctcctccagcgcacgcgacggcgaagggcgacggtgaacagggcacggggcgaggcgacaatggcggaaggcgaaagcgagggagatgggtttgggggaggggctcgggtttatagggcggctatgtcagttcggaaaccgaccttgggcagtcaagccagcgagctggcgccctggctagcggccaaaacggtgacagggaggatgacgctggcggtggaagagaaaagggaaaaaggaagaaagaaagggggcttgccccttgcttctttgggaaaaggagggagagagggtgacgaggcaggaggaggaggagctcttcctccatcccttagaagctagcgcgcggagtggcggggccgggtcgatgacaacggcgatgacggcggggcggtttggaagggcgcggctacagggcagcagacgcgggctcaggtgtggcaggcgctgacggcggcggcgacttgccggtcggccaccacggcgcgcgcgcgtgggacgcaacgggtggcgtggcgatttgagtggcgtcggcgggaagcggcaacgagagcagagagggagggagaagagaaagagagagagcgagctctcactctcgctcagcgcccgagcggcgcatgtgcctcacacgtgcgggcaaggatggaggggagaggagagttgggctgaggaggaaatgggtcggggagaagagatcggcccacgaactcgagggaggcaaaatagacttttcgagaggatttgatttgggacggatttgagattagggtttggatttcgacgatggattggggaattgagatctggaatggcacggacactggacaacaaacaaggagacaattttcgcatttaggatttttaagagatggttttcccactaggcgccacgacggaacgggtgctacaattatgttattttaaggaaaattttgaccgcgcccattttatctctcttggctgagaaacacacatttttctattctcgccgctatacgacacacacagcacagtgctcgcacaaacacacacaagacacacacaaacaaaaaaacgcattccgtagctcattagcttaggtgagacactcatgtagggatatatacagtagagatgttggtcctttgagatagatgcttgtaatacttcaatttcgtgattattaagacacctagcttggtttgaaccaaaattgagttcggatgctcataaacccaatcacgtatggccctcatcacgacatgtttgtactcatcgttatccattagatgcgaggttgtgggttctattcttcttttcctaggcacaaaacttggttttttccagcatcaaaacagcgaccatctcatgatctatattcgagtctgaatcctaatcaggaacttggtgataggaatgggttgggcgcatagcactaaggaatgataaacatatgtggttcttatccataaagaacatgctcgctagcttgtgtttatggtatacctgcagtgttgaagctgatgtaggcaaaaacgtggctgtagtaagcacaagcagccactctctgggtgtctttcgtctcaatgtcaattacgtgcacccctctaccagctgcatgcagtaaaactgcatttgcttcctcaacgaagccaataacatttacatttgcgcttattactgggatcggtgcatcgttatcctggtgaaaatctttatcacaccataagtcactccaccacggggattgactgccactagcctcgttgttgtgctgcattattggagaaattgctctagtcttatcaccatagtcatcatcatcacgatcttcttctccatcatcagagttgtagacgtaatagtccactacccagggagaagctaaaaaaccacaagtcccaagaatgttggcgtgggggtggaaagtagtggtccattggaataatgcttaggatattccatgtcctgcccacaacaatggtatcatcggcaatatccatgcgagcccagcacaatagtgaaccctagtttcccatcct

SEQ ID NO: 10500 - DNA, 12574 bp, Oryza sativa
  unsure (1)..(12574): unsure at all n locations
tcctgcagcccgacagcaggaattttagcgtggcaaggagatgctgcaatgtcatgttgccctgttttactaataaaactagtaagtttaaccaaaaacttaaggttacgctggccagctaattaacgagcacaattgcttaagctagtagagaaggccttgttagttctaaacattaaggcctcagttatcaagtcggcacagctagagccagattagagggagcagcaaacaagcagagttcagagttacacacctcttttcatcgtctcctccctgcttttttactcttaatagattacaaaacttaacaatcacaactaatccaagtgaaatagatgggagtggacatttccccgacggcagcgggatccgtcggggaccctatcagtagagatgaaatcggttcggatagttttcaagcgtccgaatgtttttatggaaaaacaaaagcaatgtcggatgaataatttcacataggatcgaaaatagaaataaatttagaatttttcagaaacagatatgcatatagttaataaatatgaagttttatccctattagacccttaatttagatttttatttaattataaaataataattaacaatgcaattaacgtggattcctctttttaaaataacaagttttcacattaaaaaaacacatattttttaatatttatacatatatatatatacacatatccggatagtatatcttgcccaactcatttgtcaaatatctttagaaacatggtatgtgttgcagttgcagctatctgttatacttactagttccagaccatacatttcatggaatgtattattttttttaattttaaataaactaacgaatctaaattggttacaaatgacatatcgtatttaacataaatttaatatattattttgaataaaagaactatttctatctcatcgttgattttggaagcatagtccaagggcattcatattgcaatattcttgaccatattttttttatttgctatgtatatgtatatgataatatcttttttcgtattatgggtattcgtatttgtttttagttttttttaaaaaatatgaaaatgagtataataaagctgatgtccatctgtatttgagccattttcatctgtagctatcaatgtactaaatagatatatgctctgaaatcaaccaaggaacgggagcaggttggccagcctgcagattaccatatatggacatggagggatgggagccatggattataaccaagaggtatatggtatgagagctgctacagcccgggattccgtcaaaacgggatatcacgacttcatattccgacttcctcccacactacgtacatgcacgagtcgcgagctatatctcgatcgcgttggcgcttctctcgtagtatcacactgcggccgaagaggtgcgcatcgtgccactatacgagcagcacatcgaggacgtcgagtccgctacgccactgcgctcatgcgccgtgaacaaccaattaatccatgtctctctcgctggtgctggcgccggccggcagcgtcaatggaactagcagttccgtgggcgccgccgccggccagcgtagtctcgacaacgggaaatctatacgcatccatcatctctaaagctttgcatgtgctagtgttcctctctctctctctctctctctctctctctctctctctctctctctctctctctcatatatatatatatatatatatatatatatatatatatatatatatatatatatatatatatatatatatatatatatatccatggacactttatgatatggttgtgtctatatatgtgctaatacctgataccgacatataccaggtctggtatctatatatattgggactgataactaggtactatgtatcgggtatcacacctgataggctgatacctatagatatcgggtctaatcattgttagtaccaggtaccatatatgatacctatcaatcaagttagatacctatcgatatcgggcctaatcattgttaatatcaggtaccatacatgatacctaccaatcaagtctgatacgtattagtatcagacctgatcattgttggtactaggtactagacatgatacctatcgattaagcctgaaacttgtcagtatcagatctaatatgtatcagacatgatacctaccaatcttgatacttattggtatcgggtctgatacgtatcggtaagggggctgctatataacggtatctcgttttcgaacgagatgatcccgagtaggtatcaggtgtaatacctatcaggtatcagatgattctacacacgtttcaggtgatacctgcaagtatcatgtgatacttatcaggtatcatgcaattttctaccacgtatcgcgtgatactcgcaaggtatcatgtgaaacctgttaggtatcagatgatttcaaccacgtatcgcgtgatactcacgaggtatcatgcgatacctgtcatgtatcagacgatttctaccacgtatcacgtgatactcgcgaggtatcagacaatttctaccatgtatcacgtgatactcgcgaggtatcagacgatttctaccatgtatcacgtgatacttgcgaggtattagatgatacctaccaggtatcaggtgattcctactagatatagttgggcatcccgttgggggaggagcaccccgacacgcgcggtcgcccctagcagccgtcccttgtagatgaggacggcgatggcggcagcagaggacgggcgcggcgacggcggcggtagcgggggacgggcgtgtcggcggtgggggatgggcgcggcggcggcgacagcggctgcgacgggggacggacgccgcggcggtggcggcgggggacagcgacggcggcagtgggggacgggcgccgcggcggcggcggtggccgcggcggaggaggcgacgggggacgggcgcggcagcggcgggggacggcgacagcggcaagtgaatgtatggataagaatcgcgtgtggagaggagctatcctgttgggggacggtatcccgtcccctagcattcccgtatcggtaataagcctgattattgttggtacatgatacatgacctgatacgtattggtaccgagtaccagattgatctgatacctacttataccgggtctcatcaatccttattagtatcaggtactaccaaatctgatatttataggctagggacacggatcaagtctaacatatcaccattcactgtagtagtttatatgccatccacctgcaaccacgatcgaacttgtcaaaatcctaattaatacagtgcagctgcaagccatttccattttattgggacttgggatgcgtccagatctgagtagaaacaactagctgaggtttgatacgcagcaattctactgacacattctggataaaaatccgtagctcctggatcatcaatgaaaacatttactttcccgaaactaaacaaaatgaagcgaactctggatcaatcaaaaccacctcttgcataaaaaaaaagttccctaatccaaagacgtagcaacacaccgcatgaatcaacctccccgtggagcagccactagctgacagctgctgcgcatggcctctgcaagaagctggatcacgagcaatgagagaagaaagaggaggtaagagaaaggaggaccgagggagagctgccaggccaccacgcgaggaggagagagccaatcccatacgacggaatcccgttgtatagttttttttgatatggtatatgcagggccggatccaacgtgggtgttgggaggacttgagtcccccctacatccacaagacttataagacccatggataccccggagcaccccttcgatttttttaccataaataataaactaaaggtccctaaatagctagaggttgaagaaactatataattgagccctcaagattttgtcctggatccgccccgtatatgagcaagtataaccctatcagcctatcataaatcccattattgacgttggtttctctccttcagctgtccgactgcacgttgccacagtactgcccgtctcgacgggaactcaccaaccagcacgtaccgtcacaccgcaggcctgaccggttttttttgcttccacccagcctcgcctaggcccattgtcaaacccgtggataaaggaaaaaaataaaaatatactgttcattgtttttttaataaaaactggataacgaatgttttgcacaaatatttcacagacgtgtcgagagtatcatcttctctttctaatcatgcatatttaacagagaagcaatcagacgcgccgaaagtgtcatcgtctctttctaatcatgcacatttaacattgaagcaatcagatccgtagtcatgcatatctaaagtagggaaaatactaaagtttttcctcaccatattgcgccacgtcatcaagtaaatactgaccatctgatgaaagaaagatttattccgagccgttggatctggatgagtctgaataaaggaggctcagtaaaatactattgtcgctcccatctctcagtcaatcaaaggagaggcttcagaaagcttcccccatctccccgtcactcccgtccttgctgctaggcgctaactcccaccggccattcctcccaatctcttctcccaccggccaccattcctagcaaaccattgccgacgcaaggagaagtggactcttctagaagcttctgaacggaaggatctagagtttttgtcaaattccacacgtaagttacgtagatacgtagtacagttcttcaataggagaactaggcaactagcagaagagaattgagaaaactgacgaaaaaaaacgcaacgcttccttgatcttcaccacaccaactcaccatctccctattgggaccaagtcagtgcaggcagcacaagatagaagccctcgatgcgctaccatgctgctggccgccgaaaactcatctttagaaaagatcgacgaaagggggctaggttgaggagatcactcctcactcctcagtgaagccagcctcatccttcagacattctcctccttttcagtgcaaatccacggcagcaaaggtcgagctacaggctacctatagcagagacgaaggggacaagatgcggtcctactcgtggagtcgtggttggtctgtgtatcccagaacccagagtcagatgcaaaagggaaacaatgaataaatgagtagggacgataatgatgaggactggacggttaaattttttttgactgtaggaaaacgtctagggctagattggtttgagatctaaattaatcttaccaatttttataatttcaataatatttagtgtttatttggtttgaaattaaattttagcatgccttaaaaaaaggccatttcaatagttaacttaggttattttgatttcgattcaaacacaattttagcttgccaaaatttggcatgacaaaaattgataaaacctcaaacagcccgtagtgcatccatcatcagcatgtcctgtacatatgtgaccctgttaaatgcagagaaaaaggctataggcaggatgtgtgttttaatatgcatatgtaaatagtgtagcaagtattcttttaaataaataatttagttaagtacttatatgcatatgtactaattactccctttattctaaaatgtacttagatacagtgttacctttttacacaatcttttaacattatactttttttagggaaattttaacattatactttaactactactaatttctttcgtttattatcgataactacgaaatcaacgttacataaaaagatttaaatagaaacctgacggcactcccttatcatatagtgatataaaaatcaaataaaaatcgacatacatagcactaatcatatactcctaaacttttagtccattcattagtcaaatttttaagttttgattttcctcaaaataagaatgccatatatattttagaatagatagagaaacacgttagtatttatttatcatataataatgcactctcttttgtcataaatatatatcttttgttttttttaccgaacctttaaaattttgcccatcaacgagaactcaataacggggcactgttggcctcacccatatatacatatttttacatatctttcgaacgggtcttaaaagagccatgcaacgcgtggcttacatggctagtttaaccatgaagcgatcagacacgccgaaagtgtcttcgtctctttctaatcatacacatttaacagggaagcaatcagacgtaccgaaagtgtccttgtctctttctaatcatgcatatttaacagtgaagcaatcagacacgccgaaagtgttctagtctctttctaatcatgcacatttaatagtaaagcaatcagacacaccgaaaatatcctcgtttctttctaataatgaatgttttctctgtgcaacccagatggtgcacaccttttttctatcctcaaacccctgtaaataattgaaagaataattaaaaacacctaaaatcacattttacggtggattgaataactcctaataaatttttggtttgtgaaacgtgattttacaagcattaagtgtggtaaatcaaagaaaaactgcccccgaaaattcagccaaagttgcagcgaacgttacttgaaaactgaaaaaaaaatatatatgaagaggaaaaaaccccacgtcgactagattgcatcgaaaattacaacacagcgagcgcggagatgatccgccgccgccaccgccccacctcgccggcgccgccgctggacaacgacgacctcctctccgagatcctcctccgcctcccgccgctgccatcctccctcccccgcgcctccctcgtctgcacccgctggcgccgcctcgtctccgaccgcggcttcctccgccgcttccgcgcccgccaccgcaagcctcccctcctcggcgtcatccaggtctgcgcctaccccatcttcgcccccgcgctggacccgccggaccggatccccgccgcgcgcttctcctggcggctcgacaaccgccacgacctcaacgacttgctgggagtccgccacggccgcgcccttgtccacgtcaacacctgccgctattctcagcgcaggctcatcgtgtgggaccccgtcgccggcgaccgccgcgccgtggctattcccggcgggttccgtgacaggggggtggtcgtccgcgccggggaggtgcgctgcgtcgccggcgacggcgacccgggccacgtgcacggcggctgccattcgagtccctttgaggttgtcatactaggcactaataagaatcggacacacgcgttcgcttgtgtttactcatcggagaccggcatctggggcaatgtcatctcagccgcagttaattttggggattgcatatgcaattttactaccttggttgggaattccctttactgtttgctcctaggtgagcagaggaccagcttctttcagttcgatttggataaacagataacagctcagatcgatgttccacccgatatgcatcctgatgggaatggccaccacagatttggggatacaatctgcagatttgcgcctgcagagaacggcgggcttcttttccttgttgtcacacattatactctcaatgtatggaagagtgagaccaatgctgatggtgtcgctggatgggtgctggagaaaactattgaactggacaggctcctttctttggaaccagggcctcagaaaacggcaccgatgcttctgggcttctctgaggaacataatgtggcttttgtgtgcacgtatattggtgtctccatgatccatctggagtcaaaggaatttaagagtgtttcccaaagaatgagtctaatctatcatccattcactagtttttatactaaaggtaattgcttcccatgccttttccgttgtacatgtagcaaaatcatgttatttccagtagcttgctttttctgaatgccttttattcgctccgtgacaattaatgttcctttaactgcttgataaactgtcctaaatattgaatgttgtttctaatattagtctctatctgttttagcgggtttgactaatttatgctttgaacatccatagcttagaagttaggaccattattactcatatcagaaatactagaactaaattttgagctcctattcatttattcaacttgtctgatggtagtattaatgtgtgcatactacatggtatagtactttttagcttgagttacatatcacttttgaaattagcaacaaccatatggaaaacatacctgaaccaataaattgaaatatcaaattaccaacacagttggcccacttagaaggttccaagctaggtgcagtctttttgctcaatacttttatataaattattgactgtgttgttaaatgtatggctttgaattgttacctttcaactaattgatggttttaatcatatgctgagaagtccttttgcaagtgcgtgctccatttgtaaaagagaagacataagttgaatatgtttggcctaagttctataaaattcattactggctacatctgtagttatagtttatttgctttgccgtatttttagttttgtctgtttgagaagcatggaatgaacttgtgaaagattatatatgatgcactttttcctgaccaactaaattgtgcagggtatagctcttcattttacgtaaatgaacaagtagtcagggaggtcaacccattttttattgcaatgttgttacattagagtctgcaattgagaatggaaactcattgatggacttggaaagatccaaaatatcttaagaaattaataacagtttgcttaatttgtagtcctaatttttcttaggatgctgggtggtgaatctgtatttgtgtattttcctgatgtttcttcatggagttgtatttttgtcccagagttatttacttgctggctgtttgtatccacatctgactagtattaattaagaagttggttttgtttcctggatacatactatagaatgactatatcacttcctgtaagcgaatttttgccaacatgcgtgtccttcatttgagttagatgttttaagaattgagatttggcctgattttggtgtagcagggttccgtttgcatattctgctgactaattgtcttttgtgtgcttattgatggcagaactgtcgccccactgatggatgatcatgtaatttgaccatggagatcacaagagcgccattcctggtgattttcgtgagttttaagatggctaactatatttcccaagtattaccaagtcggatatgatattcgttgtcagtcctagcaggttttgtacggtcacatgttcctaatacttggatcgatataatttagcgacaataatgtaaatcatgttcaagtgctgcatagataccttcatctgcaattcggtattgtcgcctgtgtctggaattgtgatgtcacataatagcagtcattattcttgctcctgtgaatgtgctctctatcccgttcaggaaaactgaataatcacctcactttggcgtagatactgtgttatttgtgtttggcttgactgatggtaggtcaattggacataggcgcaacaaggtgcaaagttttcctgaaataaaagaatgaattgactttgttgtcaagtttatcaccaagtagtgcttctgtaatatgcatgccactggttgagtagccactagaaaaaaaaaacaaaaccaatgttgtttctgaaaaattgaccctgtgccacaaagttgattggtattgaaaaatcgccccatagttgaggcgattgccctctcttttgccacaacaccatgtacgttccctttcaaatttctcccttcttcctccatcttcctatgcacgttgccaagctccaccgatgaacgcattcaagncttcgccggcgccaccctgctcccaaactctgctgcatcctctcgccatcaccgtcgataccgtcgaggctggtggcagcgtgggcacgatgggcgatgttgatgggaacgggtggcttggtagagacttccacgtaggtgagaaaggtcatgaacacgacggcatggcctagttagacgtatagagaaagaagatgagaatggagggaaaagaggggtaactttggaagtccatgtgttgggtatgttgtgccaaaagagagcgcaagctagcgcctcaattaaaaggggggtaactttggaagttcatgtgttgtgtatgttgtgccaaaagagagcgcaagctagcacctcaattatggggcaaaaaatggagcgcataggagatttttcatgcctagccaccgtgttgcctaaagaggtaactcgggcgacaccccaaacctagcaccgctcctccccctacccatcaccctgcctttgtcgccgtctaaccagcatgttgggagcacgacaagcaacgaggaaggtggcagcggggcaatcccacccagagaccttacgagtagagaagatgctgatggcggcaacttgggtggtgcgagtgtagctggtgtttggaagcattcagatccacaactagttaggctagatctagtcggttcgtcttactgatgcttgtgctcatgagcacggcgaaggtaggcagatctggcacatccattacaagatccgcggatctagtggcgtcatggcatccgcagctgcaggtagaggtcttcttggaggttcgggggaccggcaacgatgacttcaggatggaggcctacgaaatcttcggtctggtgtagccagcatgtggaggcatgaccctgcggtgatttggttacagtaacgatagtggcttgggcggtgctgacttgcgctatcgatggtgttggaccaaatccatgtgcgagaaggcaactgtgcttggcctcgtggcaatctgtcatgtggtgatgacaacaacatgggcggtgctagccggcgaggtcgatagcaaaggacaaactacactatggggagagcgttgtgctcggcccttgcggtggtttgtcttgtggtgacaaaaatgacatgttgatttggggtgatgcatgaggtgggtggagggtggcctgtagagggacaatgggtcatgattgcaggggttggtaggctgtagcctgcatgtgtaaacctatcctagtggtttgttgcgtcagtaacaccgacacttttgagtgtcttgttacctgatgagggcattgttgaggcacctccccctgccgctggtgggacactctaggtaaaaaccatatccagttcattagatgggcagttgcggcactatggcatcacatcctccctggaggcatcatctaggaggtctcgttcctgcctttcccacctccaaatagtttagccaacgcttttgaatggcggtgggttatacgagggatgcacggatcatcgtctctctcgctctctcgcccttcttcacaggtggtgtccatgaggccattttgtttcttgctgtttggaggtggtgaacggtataggggtgggtacgttataggtttggtggcgttgttatgcatagtggcaggcgggcggttctaattaaatttaggtgtgcgtaatgccgtcggtgcgtggtggtcctattttttttttcttttgcccgattataacatcgtagggctatagtcttgtgattttttttctgctatatcaatacaaaacaccatactctcaggtgatgttcattcaaaaaaaaaagaactaaggtgcaaatttgcaacatcaatcagccttgtggcaattgtgagtacactcttcgactttgtagcataagagcaatttttattttctgatattaatcgaaaaaaaatgtgagcatgcacctgtactaagtaactttaaatctaggtgggccagtttcacaatagcctaatcatgagatgcccatttgatcgaattaataacagaaatggccattttagacaccccagaaaaaaaaaagataaagaaagataaataaacttgccaactataggttgttgcatatccaatgaaaatatattgtgacaatatgtactttcgtagaagtatagttttatatatatttatgctaccatactataaaaataatatcataaaaactattccctccgtctcaacatatagcaagtaggatgggctcgtcttagctatatattgggacagagggagtgctgtcaaatggacaactgcgtcacgtcgaaggacgtggttgctcaacagtgttggaaaagcaataagtgtattgattgataaaatttcttgggatcccccattacatggccctaggggtctatttatagccttagcacaggcttacacctcctagggtttaggtttacaggggattttacatggttgcccttataaaagggatatttacatgggtacacagtgtcatttgcatatatgggcctttaatgggccgataggctgggcctggtctatggtgaaggggccttaaaggtcgggggcagcctggtgggcctccttaatgccgaactcgtcatggcgaagtctttgtagttcgccg

SEQ ID NO: 10501 - DNA, 1445 bp, Oryza sativa
tttttttttggtgtgaatgactaatgggtcccatgcatatattttaattctattgccccgtaagtgccacgtcaacgccacgtggaccgaagactcggtcaatatcgccacataggcgccatgtcagcgaaaccaccccaaaaccgccgaggaagtcaaattgcaccggttttgcaagttcggggtgtcgagatttctggtattgtagttgagggatacgatttagattcggtggtcagttgaggaagtcaaagtgatcttattcccctcctaattccccaagctgccaaccaacccagcggcagccggcgggccgatggaaaagctggtgatgagacgcgagcggcggcggagcgagctgttgtaacgcaagcggtggcgcgagtgaggtcggcggcagtatcctccgtcgtcgcctcgttgggagcggtcgcgtctcacggtcaggccgccgctagctgggatttgaggtgcgtattttgactgaattacatatggctatttcatccacgaaccatatggaatgagatgtgaggtgttatatatgatgcatgtttaagaacaacggttcaaattaaatttgtgtgtactttgcttgctattgttcccctttgacatgtcggataatagtacttgttaatcacggatcaaaaggaatactagcggtagcaaattactgttactgcttataacatacagactgctataactagtgttccaaatgctaacagaagttcagataacaattacaccaaacatgagaaacttaattgatcgatactagtagaacaagtagtgctgaaaagatcttgtgagctaatttacttcattcctcataaatcttctgtgtcaagctttggtggtttcccatggctgtcttgaaagtgacaacttatatgtttcctttgagctgcttccaagccattttaagcatcaccagttgttcggctacttctctcatttctggtcgttcatctatattatcacttaaacacttcattgctagaatgccaattgcttcaagggtggccatgttttcctcagcagtgatctcattgtcaaacataatcctcccactgttttctttctcataacaattgacatactcgacaacaagactgcatttcttactatctaaaattcgtttcctggtgatgagttccaagagaacaactccaaaactatagatatcactcttccgtgtgaaaagtccggtttgaatgtaccttcggtctatgtaattgatgtcagctgccacaacccatgtgctatcttctcctatctgtgatgatccaaaacctgagattttaggcacaatgttgtcatcaaaaagtatatgggttgttttgacatctccatgtagtatgggtttggatctactgtgcatatatgccagtccttctgccgacccaacagcaatatctagacgtaaatctagtgggaaa

SEQ ID NO: 10502 - DNA, 33964 bp, Oryza sativa
tccgactcagataacgcagttaaaaaaactgtgtgattctaaagaaaaaggaattatatgtgaggtagtaaaaaaaatcaaatcctattatatctagaaaggtccgtcactataagaaagtggcgaaaaaaaccattcgtaaaaaaaatgcacgagaaacaaataaaaagggcagaaagaagcatggcagaaaaaaaaaatctaatttctattcgtctttttagtagtccgtttatatctcttctatatctctaatctaaataatctaactattttaaaacataactttctaccttatattaaaaaagaaaaaaatacgtgagaaaatagaacggtttaaaaacgcgtgaggaaaaaatatcagaaaaaagcgcaaaagaaaacgcgctagaaaaaaagttccgtagtccataaaaaaaacacgcgagaaaaaatatttacatcgtatgtaaaaaaaagcataaaaaaaggcatacgaggaaaaaactgttagaaaaaacactaaattgatggacacttggtcggataggatccatcaatttttttccatctcctacacgacttgtgtttcgtcatcttttctcatgtattggacacgctgcacatctttgtaggcaattatcagactatttttgtgaagtgtagctattattcttgataacatattatatgaaaataatattagtaaataaacatattttaattgttatttagagaagagtgtacaatgactctattttgtgtagacttgaccatacgaggtagggtcggatttgattggttgcaagaatgggattaaaagaatattttagattatatgcatgttgccttatgaataattcaattattttaggtaaagcaaacatcgtaaggttgccaccatcgaggttgggccattacatttaagatgttctaattttctgattggcatcgacatggttatgcataaaaaacgtatattatcattatgtttttttcacccgttgcaaacacacgagcgtgtttgctagttttagaaaaatttagggacttgaacagggtcaatcggagttacggttgaatttctaggaattttcaaaggataaattgattttctggaatattggaaattgattaataacggaaaggaatattccattggaatattccgctaacttggatggcaatggggggcccacctgtcagcgacttgatggagggagagaggcacgggccctgcttgtcagcggcttgagggaggaaagggaggtggggccggcttggcagtggctcggcacggtttcttcttcctcctctcgctcctgctcgatcccaggcagcgtcgcagcgatgtgccgcggcggcgaggttcggctcggtgaccggcggccggggaggcggcggcaacctccggcggagctccggcgaggcaccgccgacgacggcggccctagaaggcgcggcacagcggctataggtggcggtacagagagcaaaatgaaagagagaaagaggagagagagagatggcaacggtgatggcaaggaaggggctcgggttcccctttaggccttgttcggttgggttgttcccggccgggatcggggcccaatccccatggatcaccccggcgaggaaaaaatcccggcccatgcgaaattgtgcgttcggttaagccctaccgtgaattttagcccagcccaccacggggtttccctcttctctaggcccgggaaaaaatcatctactcctggagcgtggaaaatttcctcgagtggaggcggcggcgcaacgaagacgtgacggagggggcagcgcgcggcgcgacccggaggcgacggcgacggcgacggcgacgacacggctctctcctccggccgccaccttgtctccagtgagcacgctgcctttccccttcttccctcctcttgcaaagctagggttagggttttcttctcttctccctttcctgtcgtcgccgccatctctcttctcgccgtgtagctttctggtgagtgagcgcttagcgattcgtcgtcctcctcctcgtatcctgctcgatctggtgagttcttgatttgggcgtggagctttttttcttggttgggtggggatgagttcttgatttgccgccgccaccgcaccgcccaactctggttcttgatttgagttcttgattcacggtggctttgaggcagcagatggtgagagcgagagctgtacggtggctatggaaacatgcttgccttgattagttttgcttagtgtgactgatgctgtgatgcttgcctgagcatgtcttgtaaaattgactatacaagtttttacagtgaagtactcagttcttggtgcttccggagtcccaacttgtggttgttggttatatttctgtttggaaattacaagggttgggtgtcctgattttgaggattgtagagctatggaggtactctgtaattagtttaacatttctgaattgtaaactaattctatcgtcattgtttcacaaacaaactagcaacaaattgctgcagtatatacagtaatgtatacttaaactgatttattttaaactaacaacagtagcttttagtctcattagactaacagatttgttttcctcaacatgatacttgtataaaacatgtttatcatagctattcaagcactaatatgtctagtgttaaatgagctgattgggtgattaattctgtacccatgttataatgtatttgatgatgagatccttctatttgattgaaaaacagcagctcctactttgatgctagctagcactagttctgggttttatgtaactctagttctagttctgaatttgagttgtcagtgatgtgtataagttgtgcttgttttgtagattgcacgtgcacccattagagttggagaagaccaacctcctccttcaattattgttgcactgtgcactctttaagaaaaaaagatccttattgttcttttcatttttcccatcaatttttaaatatgcttcataacttggacttcttaagattaattcccatagtttagcgattcttttgtgattatctttctagatcttttgttgctgtgctaagtgcaaaattgtaaataatttgtgctctatctatagtactactatggatatgagagcaagagaccacgctagaaagaggagggaagaggaggacgatgatatgatgttgtttattttccctgcactacatttgttgagttctagtggagcaagggaaaagaagcgacgccatacatcaaagataacaggcgaggagcgtgttcgggagttgcttgaagggcatgtaaaaaattgccgggtagcattcaggatggagccggaaatatttatatctttggccaattaccttagaactgaaaagttggtcgatgatactaggattaaagttgaagagaagttggcattcttcttatacatgcttagtcacaatgcttcatttgaggatttgcaagagaaatttgggcacagtggggatagctttcatcgtcacgtaaagcatttcttcaactcagttgtcccttcgctctcgaagcggtttctgaagcctccaaatcctaatgaagttcattggaaaatagaaaaagatcctagattttatccctatttcaaggttcttacctaaacacttatatccttattaatatgctgttttacatttttagaaaatcatatgtggtttttttttttgctgcagaattgccttggtgcaattgacggcacccatatacccatatctatatcatctgacaaagcagctccatttagaaataggaaaaatactcttagccaaaatgtgatgatagcttgtgattttgatctgaagattactttcatgtctactgggtgggaggggtcggctacagatgccagggttcttacctctgcagtaaacaaaggcttccaagtaccccctggaaagttctatttggttgatggtggatatgccaacaccaattctttccttgcaccatatcgtaaagtcaggtatcatctaaaggagtatggggcaggtcggcgtagacctcaaaactacaaagagttatttaaccatcgccatgcggtattgaggaatcatgttgaaaggactttgggggttgtaaaaaagcgcttccctattctcaaagttgcaactttccacaaaatcaagaaccaagtgaagataccagtggctgctgcagtgttccataatattattctatcactgaatggggatgagcaatggttaaataaccaaccacataatatccatccaagcaattatgttgacctgccagatggtgatgaaggcaatgatcaaagcactaatcaagggaaaggaaaattttcacaaatcatgttttcgaaaaatttgtccttaaggtttgaccatttggcttatcctacagtcgagatggctctgataccaacttgtcacgcccggaaattcactagtaatttccgaacttatttgtgcataaaatcctcgtccaggaatcagccgaggtacacaaactgacaatttaatatacagattcatcaaattaactaaaacgataaatacttacttaagaggcactaagtcctcactaagaagaaaactgcagcggaaaataaaatctagcgaagctccggctccactcccacaggcagctcaactggggtataagccaaacgtcttctccttcgcaacttgtcttcaactgaggttgattgattattgcaaggtgagcatatgacatactcagcaagccacacagcaaatatgcaagtgcacaagaataccaaaggatggcgtaatattggctcatttgcaaaagcagcatttagcaaaacatttaagagaagtaaaaatagtggagtaattaatcagaaattttaatcaacactgaacagcacacccatgctgcacaggcccaaccatcctgaacaaccatacccggctgtacagatctaatctccaaaccaggagctaagcaaattattatcaggtataacatccataattattgtgagaggtgtgagactaatcacgaaaaacattgctcaacccgcccataaccgcgggcacggctattcgaatagttttactctggccagaggtgtaccactgtacccacaagacacagcctcaacatcatgtctaccatgcgtcgcgatactggaaagtacccgaatagaggctgtgacaataccctctgcataacacaactcaccacagtgcaccattcctggatcataatcacccccttataaaacaaggcatggactccccagcgacccccgtgggcttatctccgccacttctcagtctggtgccccgcaatgaaccatgctatacaaaaggtaaagccgttgcccacgctggcttgtggttggcacggttaatgttccacaatagtagctcgcgaaccggtccttaattgccatgagcacgactctcaaaaccatgtgctcacaacccaccattatcaagttttagttggcaagtaattaattaatcaatcacgattgaccatcgtgaactatcattaagccatcattaaataatagtgagtcataagttatcccaatagtgtgctaatgtttctaagcatggctaagcaattatatctaacatctagttgaaccaatatatataaagctcaactagtccaattataatcacccaaggtataaaggaataaagtaatcaagaacaaaagggccataacaaagaataagttaattccacccaatgacatttgaaaataaatgcacagttgaaataaatagagaatttaaatataggatcaacatgctcaaagggttgtttgggatctgtgtgacttgccttgcaataatcggtctttaattaatcttcttgaatacttccggcgcactcgcgaaccttcgcaacgacggaaacgacaagctaacacgcaaaacgaggaaaaagactaataaaaaccaaataaacaatacataaaaagtaaacaaacatgtagattataattttagatgaattatgaggcttgaacggcctcattctgatttcatatgaatttattatgaattttacaagatttaattccaattaagcctattaaagaaaagactattccaaattaattaaacaatttacaaatgatttatagctgagacagaagattaaaacaacctccggaaaagattagatcatatttggtagatgacatatattaaaaaggaataatatgtcattgaaaagaacggatttatattgattttggacggctgagattaatcttgaccgagagttgaccaagatcggatggcttagattgatctggcaagcgggcctcacgagataccgactcaacgagtcaattctacgtgacacgggatcacctaaatgatcaaccgaaaccggcgaacggaaccggcggctctgaactaaaggacgactcaacacggacgaacgaacgaagcacggggaacacctcgttcgaacgaacgagcgaacgactcaacaacggctgtggctaaaccggtcggctagacacgattcacggtaaagccctggtacgacaaacgataggccggtaggaacctagggttgcacctacggctacacaactcgactaaaagcagcggctaggtttaagcggcacacagctgcgacacggcggcactaagacaacttgactcggctaggcggcggctaggcggaaacacgcagctagggttagggtgacggcacagccggtagcgaccatgcacggctagagcagcagggctgcgagcaaaaacgcaaccggcacggctgcggctgtggcaaagcggcaaacagcggcagcggtagcgactaagcagcggtggctaagaggctcggtagagcgacggcaaaccgcagccgcacggcgtgcagcagctacgacacagcgacgacgacacacacggagacgatgatgacgctagggccaaacaagattagattagatcggattaaggccctagggaaaacctcacaggtgaacggcaaaggagcggcggttgccggcgaaccacggcacaaacgcaaacggagggcaccgggagcgagaggggatcaaagtgacccttaccaccacttatgcgacgacgaacggcaacggaagatagccggcgacgagcttcaaagggcggcgaggtactgtccacggaggcgatgactttccggcgatgtgcggcgacaacggaggggtggccgggcttcacttcgcagctgcgaatccaatggagtcgatggcgacagagggcgatgacgggaggagcagcagggcttcgccgaagatcaaaacgcgacggcgaacttcgggtttacggcgacgatggagctccggtggattttggcttcggggagatggctgccgggcttcctctccttcttgcgaacccaacggcggcagcggcgaccaaaagcggcggctaaggcggctgctagctgcggctggagacacagcgaccacggcggcgctctggttcacgacgacgggcaacctccggtgggatttggcgcaaaacaaccggtggccgaggtagctctcacccttgcgaagccgagggaggcgacggcactgaccggcgatggccggggcgacggcgcacggcggctggagcggcgccggcgacgacggcggggtggagcacgtggcggcggcgctacgaggcacgggagaccacgggagagggggcaaacgaaagaggaggactagggggtcctttatatagccatgggagctcgggtccgggcccaaaacgacgggaaaaactcgggaaagtttagatcttcgccggaaaaaggaaaggttgaaccgcgaaattggaaaggatttccatagaaacttttggggatttcttagggaaaaggaagaggagattgagaggattccattcccgcaaccaatttggaaataggagcaacggggaggtcggattttggaaggtaatcggcggcactgtgcacggcacgggagacagtcggctggaggaggaagatggagtactgtagcgccagggacgaaaaacagacttctatgcggctgagaggaagggagagaataggagggaatgggctgaattcggcccaagctgaggaggaggatttttattacttttccaaataaattaaccaatgagatgatctttcaattgttaaaaatattccaatgctcaaataattccaagaaaaatcttgaacatacttggacactcaaagtatttaatataataatatccagatcatttaatgattaatttattttttaaataattgctaaactgttctttgtattattaacattaggaattgagctccgaaaattccgagaaaatttcagagagtataattaaccatggagaatttaataaaaattaaatccatccatgctttatatttaggaaattttatttcccacatttaacttcacttgtaaattaatgaacatttaatataaattctattaatgatttattaaataatttataaatcctgaaacgaaaaacaggatgtgacaactttccaccaggattttagggcagcaagccgaatagagtatggctgtggaaggtctacaaaaaccttgtagggctcgcttatgttatcgttagcatgagggaatatatcaccactgtctgatgtgaaaaaatctatggcctcttccatgagggactcaacagtgttaccctctttttcaattcgcaagactaaattccttgctcgttctacgtaggactgaagggaaatactatccccttttttatctccctttcctgtccttggaacgtgcatatcagagctgactaggttgttagggcctgtttggtataactccaactcctaaatataactccaggagttgagtttagagtggagttgtggagctcctaaacccagctccacaactctagtacattttgtgagagagctccacccaactccactcccagttttagtggagctgaaactgtttggctgagctccagctccaggaggggtggagctggagctggagctgtgccaaacagggccttaatgctggcgctcctgagagcccatggtttctcaatgcatttcataactccggggacgaacagcacaatagctgcctgcaacaacttcttgtcgccgcctggccatgacttgcagaagacgtagatggacacggtgatctggcatcagaaaagtattgttttcagcacctaggctcttgcatgtttctatatggacttctagcataagtgcataacaatatatttaaccattttttaaaaaagaaatctataactatttaagctacatttactactagctagaaaatcaatcatcagtaacgggtcaaaaaagttatgtgtaatgggtgagtgaaccgataaaaataattggtcagtgctgagacaagtcaaacatataacggttaattaaattctatttgccactcttacaagtgacacaactaaggatttgggcccacgtgtcatagactgcgagtggcaaatctttaattaccacatcttaaaagttgcaaaaagttaaatgctgatgtgatacaggttatctataacggttcattacatatacataaaataaggaaaaaaatcctagctgctcatcgatgccaccgtggtgtacaaacaaactagaacaaagtgtcctgtccataacgcttcggcacttagaggggttttcggtgcaaacgagcctatttaattgataggataaaactaagaaccggtatataaccactcattggtgtcggttcatgaaaaaagttgacaccaataatcccaccaagtgataggtgcagggataaaccggcacatatcgatgtcaaatgtgtcgatcggtttgcaacaaaagttagcacttatgagtccataggtattggtttataattaaaaccggcacatatgatgacttcactattttctatcatataaagtcagatgaagaaaattttatatcaaatttgtagagcttgaaggtatctataacgtagttataaccttttcatttaaggttgcctggatgtctaaaaatgtgttataaattttcatatttaaccaagaaaattttgaaaatttttaaatgatctcagatgactcaaaatctatgaaagttgcagatcttgatgagttctacaactttatagttgaccacattttcatttaaattaatctatgttcttaaatatataattcattaaaagggagtagtggtagtggtgagtgatgaatctgtcaccacccccaccaccaactccctagtccctaccgttgtttagagtgaagaaatgacacatgttgtcaaatgacccatatgtcaatcacccctactttttgtgagaaggacaaatgatattgtgaggacataggatcaatatattaggtacaaatatatgtagaatttaataaatgatgtataccgaaaataataagaataactggttaatgatcattttcatcaattaaaatcctgttacaacacacgggcaatatgctagtgtattataagttttgtatgagagttgtctcaaatactagctaggtgagatggtaaaaaggctttggatgaagagagaggtcttgggttcaaatcatgctaacaacatgctcacaatactgccaccattaagagtgtcatggtcgccggttttataactaacaccaatgactaccctcaatacttccactatatttatgcccgttctaaaattgacacatattaatcgggagttcagaaccggcaccaatgagggtgtctctactagattactactccctccgtcctaaaatataagggctttcggatggatgggacacatcctaaatcaccgtcgctgcatccactcccggccacctcttcgtctgcggtgccgccccccgctgcatgctcccggccagaggagaggaagagagagagagagtctgcggtgccgcccgccgctgcccgcttccggccaaaaggagagagagagagagagagagaggggaggagaggaggaggtgaaaataatatatggagaagagaggaagatagagaggagagaggaggtgaaaaagtttgaagttgtgagagggaaaagagagaggaggggagaaaaatatgtgaagaagagggagtattttcgcatgtggcccatttaagagacctgcatgtgaaaataggctcattttgcatgcggcgccttaggcacgcctgcgaaaatagttttacatgtgggcctcttaaggagccatatgggaaaatggaggttgtttttttgcaggcgcaaccagttacggtccgcatgtaacctatagggctcctcatacaaaaaaattatttctgtagtagtgatggtagtatatatagagtcctttaagaaacaagtgcaaatgcacttagagcaagtacaatagcaggctataaatacatgtggaggagataaaagagaatagagaaaaaaaagtggcaacaaatttatagccagctgcaacacgaactctaatacgttctatgtgtatgggaggttggaccagataataatggtttaatatatgtttatatgcaaatatagtataaatagactattagattgactatagatgatgtgtcattttttggagttacagtagttgactatattattaaactttcttaaaaatccatgtctgacctggcacgtcatggtgacgacgttcctcctccagagctcgttgtcttcgatgttgtatgcagtgatggagtcttgtccaccaagatggattaggagaacgggagcccacaccacttccaggatgctgctattgccctgttctgtagaatcttcgttcttgtggcggttgaagagggtggccagggcataaatcgccatggcgtcgctgccaaggtaagcaagccatactataaatctgaaccggggataagtaatatgcttacgcctgttagcagtaaggaaaaggagcagttgaatgattgtgctggcaatgacgaggatgcgcagctgcgactcctgccaccattcaatggcacttgagagacccattgatctctctccctccctacctacttagctatactatctaatatctatcaataatatcgcgctctgtagctctctagctatagctacctattaatacagggccaagaagtgtgtacaggccgtcagaggtcgactgattgtgttgaccttgattcccggctaatccaatatagggtgtgtttagttcacgctaaaattagaagtttggttaaaattagaacgatgtgatggaaaagttggaagtttatgtgtgtaggaaaattttgatgtgatggaaaagttggaagtttgttgaaaaagtttggaactaatcaaggctacctattaatacagggccaagaagtgtgtacaggccgtcagaggtcgactgattgtgttgaccttgattcccggctaatccaatatagggtgtgtttagttcacgctaaaattagaagtttggttgaaattagaacgatgtgatgaaaaagttggaagtttatgtgtataggaaagttttgatgtgatgaaaaagttaaaagtttgttgaaaaagtttggaactaaacaaggccataagtaagccatagtccggagtccgagcgatagctgcagctacgttatcacatgcatcaatacttaagttgcactaatgtcaattatattgctcgattccgctcgactggggcgccctagctagctaacagaatcgttcgtatattttgcttgactgtgctcttgtggacttgtttaagtcttaacatattactatttgtttatactactagaatgggttcgcgtgctacgcgcgcggcaaaaaaaaatattagagagaacaataaatattacgtgaaatattagagaaatatagcgcatacataggtgcactttgatatgtcaatgatgatttatcggttacatggtacattatttcatagagcaccaatatacataaggcacaaagagggggaaaaataattgtaataagaacccattcagacagtacagacccactataagtccatgtgcaagcttcttatcctattccaatccacaaaagaagcacaatagcatgaatggctgcctggtcatgcaaacatgaaagggttatacctatgttggaaaatataactcacataataatttctttacaaagcagtcttgattgaacagtcataacatcaaaccaaatagaatgaacataaaagaagaatatatggaacaggaatgattattggtacgcatcaccatggttttgccatgctcctgtgacatactaaacctaaaaaaagtgtttgtgctctagaataacataagaccaaggacgttgtgatttattaatgttttataaagaaataatattagttatttagtaggcaaccaagatttatatcaaacctttgaaattacaccatggtatgggtattgtttagcaatgatacacatatatcactataagtatactatgcgagcacacatcaaaccctatagcagggtaaggatgagaagttcaatgtaactcctaggagtagtataaaagaattagaacttagaagagaatggtgcaaacaagaataagaatctcatgatgctaagtttcttcttagtatctcactttttccttttcaaagaagtaagagcaactcaggtgtattgaacaaggtaacaaatcaagtataatcaccctttgtagcgcactcatgatcaacttttggtttgggcacagaatcagcacgaaaaattgctaaatatttttgatgtggcagtctagcatcctttagaatttcaacttcaaattcaatgtttcagaagaggcaaacataaatagtgaaacgcctgcccaaggataaaatttgataggaggtaataatcacggacaaaaatttgcatcagcctttagtcaaaagcaagctggggtagctaaagatcaaacccaaggcaaaacgcatgaaccaaaagggaacaaataatgtactaataaagtaggataacacaacatatgagctgagaatggctaacatcaacaaataggattcttcagtcatttatcggtttggactcaaaaaagcagcattacctgggaataatagttaaatttatcaacccatctaatcgaacgtgcatgtggttacttcattgcgtgctatgaatgctgttcctggtatatattgcgttgacacttgttggagttctaattacaggatcttaggctttagtttacaaacaatcacctcttatttatgcggaaaaataattgatctaatgacctgtgtttgaagccattgctgttcttctttcttcttcttctagagatgcctcacaaaccccttccagtgcctagatcgatcgggcgattaatttagggtttgagattagagagagagagttcggtcaacagcctccttccttctctttctttatataggcgacactagtggggctcgggggttatctcaattagtttagaattcgttttctgtaccgatcacacaaaaaacgaatttatctcttagtttgtttcttgttaggataaggaaaccggtggtttagatcctctcctaacccttatcgacacaagtcgacaaaatcaaccaacaacacttagatacacaggtacacaggtcttaaaaaaagagcacataggaaccaactgacctggtgcgtctaggccgcctcaactaaatgtgttccatactcctgaagcatctcatagagtaacaggaaaactttcgaccggtctttacgacttgagcagttttcatctgattggctcgtttctccgatgccaagggatctggcctctttctgagcccacctctctctttttgtcattgcagtatttggtttgtcttgaacaggcagagcggcggacctcttcctggagcattgctgagcggcatcattcttagatgagggaaagatgtctagtgatattctcaagatgtacaaagcctgcttcctcactaaagaatccttgtcaacctggtgtgaagaggctaagcatgtcagcacaatcaacaggatgagtataaagagtaaaaggctaacataaactgagtcggggcagaaaggcccaccagtcccctgcgaatttcatcccaaaattcattggaattcctaagatcatagtcttggggctcgtgaggtcctgagaaaacatatttcagtgttgacaagtagagagagagagagagtatgttataagcatccaggcactcagcaggcctcagtgcaaagagagaatggcacgaggcccatatagactccaagaagccagacctgcacgagacaaaccatcgaaattaacatgcacagcatctatagaagatagaaagctgatgaggagcaggccaaccttgagagcttaagctgatgaggtgcacctgtgactccaggtccataaagaggattgatgatacatgacatgaggtgagtaccctgtatgtgatccaatgtacttaaggctgagaattcaagagctctggctgtccaagacacgaccagcggcaggaatgtcctgcactacagaacttctgcacagtacagtgcgtgtttagcatgctttcttgcaacaattcatccaccatgcattacttttcagttaacggattacacaaaaacaaaactgggagcaaggtcatcagacctgttaattatcacataagatctcttccaatcctgactgaatctgaagtaaaatatgaaagaaacaactctaattaagtaccaacaggaagcctaaacaaaaaccatagatccataaagtcatagagaggatttgatgctacatgacatgaaaatatgagatgagtactttctatgcgattcagtgtactcaaggctgggaacgccagtccaagaattttttttttaaaaaaaatgtgttggctagaaggagctagccaaccgatggaattaagataggaaaagtcacatattttcaatccttcatttgatccagacgaaaggtgaagggtttaggagtgttgacaactgaacgcatgtgtcaactgcaccgtaaacacatctcctagtccaagaatttccaaggcaagagagagctgtgcatgtttaacatgctgccttgcaagttgcaatcatttatccgccatgcattattttgctcttcactaattctatgtcatgacaggaaaacaaaagtgggagaaagattatcatacctgcgaatcaccaaataagatatgtaatctctttcagtcctgacgagcacggaacacctggaactatacctggaacaagttgagtttctgaaaccagcgaagagctaatgcggcacagctgcttctctccgccctcccgccgccaccgcatcgtgcagaggataaggtaaagggtgcacggagaagtcgagggagcacgagcaccatccccggcgccagagcccggagcgagggcaaccaaatccaccggtggggaggcctagaccattagctccgcccgtcctcgaaccagatcgggcaccgagcggagtggagagcgtgaaggagcgggaagcggtgggcgcgtggagatgaaaggggagaagggggaagcgacggccagcaccactcttgtccgggtggctggatcttccggcgcggcgaagatggctagaagagcgtggagctgcggcggcggcggcggcgcatgcgaggagaggagaagggtgaggcggtgcgtgggagggaggaggtgaggcggcacgtgcgagcgagcgcgattgcgcgagacggcgagagaggagaaacgggcgacgtgggaggctcagctatagctggccaaatgagcggcccggcccagcacggcacgggcccaccaaaggcacggcccaatagggcacggcccgttaggcacggcttcatagcgggccgtgccgtgccagcccacgtgccctcccccggcccaggcacggcccaaggggatgccgtgccgtgccgtgccgtgccggcacgagtccattagtggcacgtgggccggcgccggcccgaaggcacgcgagagcccgagagaggaagcacctggtgcgaaaagtcgcgtcgtcgcctaccacccacctggcgcaggacgcgtggaggcgaaagattggagccgtggctcgcctgacgcggcgcggcgacaacgcatgcatgcgtaggagcaggagatttaatggtttttgacgtccccgaggtcattttgggggaagtatcgtgtgccacttcccagtgggagaatgcaatcagcaaggtggatcaccagatgcgaaatgtgcggcttggattgaagcgggtcatgagctaggatcactttaaaatatatgcagatgccccccaaagtgtcagtgcgcattttgcacgcaacaccccataattcactctcttctactccatagtccccacgaaattcccctttcatctcatcgaatcaaacacaatagagatgaaggcgaaatgtacgcgatgccgaacgactccctcgtcggccccgccacggagtgggacaagcggcgggcgagatccaacgagtggctccgccgcgcggtctacagctccgcccgtgacctcgacgacgcgcgggccagccccatggccgcgcacgcgccgctccgcttctctgttgcgccgacggcagccgccaagcccaaggtcgtcggtacattttttaaactttcaagtttcaatgttccatagatctagaacaactacctttccttttgtaaaaaaatttttcagggattttttcgttatgtctaccgttggtgctgatatgatttttattacttggccgaggaggattcaacatttttatccattcttcacacgaggtagaagcagatctcggtttactgctccagattcttgtgaaccaacggttaagcgagtgtaggttacagaatgagttatgtttgtacatgcacttttttttgttcttatatatgatttagtttctttcgtccttgtcctgaaactttctgtaatgttccactctcaggaaagcttccactgaaaggagagaagtattctttgaggctatgtctgacaaagtagcagatagttcttctgagagaacgactagtcctttagaatcagacagcgacgcattttataaaaatcttgatcccctcttttctgtattacatttttgtaagttgttaagttcaaaaaaaatcaagaagaagagttaaaagattaaattgaattctgcagggtaaaccagattaaaccagaagatgtggttgcccagcgaggatgaggctgctgaaatgtgctactggtggttattatgtcataacattagatgtgctactggtggatagatattaacgtttacataacattcttcttctttttgatcaaattgatagggaaaaatggtgcaaaacgacgtacagtgtgattcttgataacacatgtcagagttaaatgaggggaacaaccatgggaaggaatggatcaagctaaaacaagaactatggttcagatcgaagccttaccctaacatcttgggctcctcgctgctccacggtgacctttccttcttgccacggatcgatccctgagctctctccccaccgaatcgatccacttacctttccttctatctctgtcccagacctcgccgccaacaagctagcggcccctcaccccgccgcataccggctagaaacacaacggcgacgaggtgcactagcgcccaacctgagactgcgctgccgctcagtgcgacgagccgaatccacagtgtactagaaaccctagccctcaatggggaaagctgaaatgttttggagagagaggagagtcaaatgttcagccttggcttctgctataatagagggactgaaagcattttggcacataacatagggacatttttgcataaacaaccaacaatgtgggaagtgtttcgatctgagcagtacacttttcatccgacggtccacattgaagattgcatttctcccaccgaatagtagtattgcaatggatacttccccggtcatttgaccaaaaaaaatgcgaaaagaaaaaggatgcacgttggttgggtacatgcatgtttttgactgcgtccgcctgctgccgttgggctattgcgggctgtcaggctgtggttggtggctgggggtggcgctgcgcgcttgtgccgtgccgggccatgtgacgtgccgtgccgtgccgctacagtaaccatgccgtgccgtgctgacccacgggctttggcgtcggcccaggcacagcacgcccggccgggctgtgctggcacggcccattagctcgcgggcctgtgccgtgccgtgtcagtttgtgtggcatcgtgcttgggccggcccgacaaagcacggcccatttggccagctataggctcagcggccacgaaatcgacgcctcggcaaggacgaccaacagggaggcacggacggatggatgaggcccagacgcagaatcggacggcccgcaagacgccgaaccaacagcaacatgtctcaaggtgattggtcaacagtagccaaatcgctgtgaggccggctaatctagcacctttaagatatttagtatgtgtgccaagctgcgctataggggtgggtgagccagtgtgggcttgtgtcaactcttacagtgtatatatttatatatactcgattactagctagaaggaagtaacgtatataattaagattaaagtaaacggcacaaaaccctaattttggcacatggcatgcatgtataatatatcacgggtcttatggtattggtcgtgcttcacaaaaaccccatggttgaccaattgtaccaaacctgaactgtagggttcatattaggcttatgtggcatgtccacacatgcgtctacgtgtatcatgactaggatatgcatgcgtggctatcccgaaatttgatcttatttatgacctagcccagtaaaacatactaaaccgattacattgaagcatggtcgttcacgatcttgtcataaatactgacgcgcggtcgttgatatgatgaatgtgttgtagccactagatcctcgagcttacgcttgtgatccttgtaattgattctgctaccacacgccccattaattgctgccactgtccttggatttccagctactgctcgactgcttggaggcccgaacagcatcatcggacttagcatactcgttggccttctcgaacatttgcttgaccgtcctgggaggcttgcgtccaaacttgccgacgagtaggtcgttgcgaaccccttttgtaaacgcagcaatgatgttgtcgtcggtgatgtcggagatcttgttacgctgctcagaaaaacgccaaatataatccctaagagattcatcgggcctctagatcacgttgtggagttcgaagtgtgtgctgggccgctcgaaggtgccttgaaaattggcgatgaagtggtcaaagagctcgccccaagaaccgattgtgcctctgttgacggtcgttatagaccaatttcaaccatcaatataactataataatggagaattgactatgcttataatgcatatttgttttagaataatatagttccacttgtacttggagaataatttgttgcaggaattgagcaaataaaataatgaagaaatgaggaaaactcactcctatgcaagcatatggataaggagggcccacatgtcaggtgtaaccgtcaggaaaccgccttaactgtcaaaaccgccataaggacctacctgttagccaccatgccaaagctggaggcctgttgggccggcccaggttcggccgaaccctagtggtgatggctcagccgagccctctacgtggacgtccaggatgcactctcaatgacggttatggggtaggaaggtcatttcgccttttctacaaccgtcataccgtccctataaatggaggagctcatttcacttcacaacacactcaagcaagctcaagattcctctcatactttattttagtagttttagtgctaagtggagtagtatagaatagttctcatagtcctcggagcttccggaagagtttcggtatggctctattagcttttctattctcttctgtaatactttcggaattaatgaaaaactcttctttatttatacttggtaatttacttagtacttggtactttacttagtatgagtactgctcttactttatatttgtgtcggtataattgtgtgggtagcctaccagagaagtgtaatggtgtgggtatagtgtccgattcatcgactactctatatcatctgcagaggtgtagagtagtatttattaatgtaaccatggtgcttagattagtaaatatcattatctgggcatatatgttgtgggatagtagaggtgggtcgctgatggtgacagctcagtatggtattcctctacgttagtatatattcataagacaaattcctgaggagggtactcctccgtatttatccctggttggacagcaatgacaggttgttgtaagaaactcggcaacccggggtggtctctcgaaataccaggagtgcactgttagggggtattggccacatgattgtatactagcaaatgtagattagagtttgagtgtatattagaagtataggaaatgagttctttctatctcttctcccacttaattagaattatttatttgaggaaatctataagcttcgcttcgtgtcactctacccttgtattaaattaacccctgcctagactttgatgaaggcaagtaatatatatatgtgtatatattagcatggttctctctttcacaatcttcccttgggattaaataaatatgataccttgtaatagttccgggtgaaatgctacaatggtatatccgtgcgcttgcggattacttctgtaaccataaatataccagggttatttctacgccattgttgggaatgaatatttctagtaatatcgttaagaaatactaatagcctcgtggtaacccagcgagccagttccgggccgagtcaacaaacgcaacaggtaaataatacgccattgccttgctatctcctcctgctgcttggattgcgagagtgtagatagtgagccacgactcggggtcggttttgccgtcgtacttctcgataccagtcggcttgaagccagtcggccaatccactcgacacatgtcacttgtaaaggcagcaactccttcatcgttcgcgtcatagcgatccggtgtgtggtgacgtcgtcagtcgtctctttctgctcggcgacggttaagggtgtcacgtaggtcgacaggctgccgtggacggggggagcgaggccgtttgtggtcggcatgatgctctcgatgtctgttggcggaagagtgaacggaatgctctcgatgagccctgcccccgtgctgtgatcttgagttggtgacgttgagacttggttgacaataatcccgagatcagagtggtgggacccaaatgcccgacgttgtacgaactgaaccagagggctgccgagtgcttcccgagtcaactaggaccgacgcggcgatcatcgtctttgtttgattcagaatttgagcgacattctctggtgctccggtagccatgagggtatccaagagcgcgattgctgcaaccgtgttctgctgtggagtacggaacacattagtgccatcaatgttctgttatccaatcagctcacatgctcaacgcccagatgttgttaacaaccaaatttggtaatgccacgccatggattcaaagctagagtcaaagccgatttgaagaaattccgttcgagaaagcagaatacgcatcggctataggaggtatcggctaccacatatcgattaagtgacagatccgacagagttaagccgatgcaaccagtctcaggaaagatggacccacgtccgtcatcgggattggtcgaagcacttcatagctattgccacgcgaggattggagtcctaaaaatgggcaattatatctattaattaggacatttttcagtttccttagagatatgtttggtaagggtccacctaaaggacttattcgtattttaagttgtgttagagataagagtcgtatccagcaaggacatattatgtacttcgggtataaatatgacccaaaaatcatgtaatcaaatgatgatagttcaataatacttcggcgcatcgccacccttttctattttcgttgtttcgacgagtttttgctttcgagttgggctgcatcgggttcgatctccgacgaagaggtaaaacttgttatggcggtttgcgttctcgggattagtgcttacatcttcatgacactctaatcatgtctatgtaaaccgccgagttatcatatataccgcataatctagattgatctcgtcatctaaacttcatcggctagcctctatcatcgaaaatggctgccaggtttaggtctcgatatcaagctagactatgcggtgtatctaccatattgaatgagttttcatcgatttgcttagatcttatgtttcttttcatgcttaatgctgcatcagttaggttcgatctgttaagtactgtcttgaaacattttatctagctctttctttgattgctaatagagatagcatcggagtttcagccgatcttacctgatttagtcgtcttgttttcttatttggttctggatcgtctaaatatgccccttatatcaagatctcacccgttttaaatatattaagcttcctatcaatctgctagttcaccctgctcattagattggtttcagttttgtatatttcatttgtgctgatatcttggtataaagtggtatcggagtaatagccgatacaggttaggtttgcccgatcggctatgctgtgaacatatataatccctactttggggcacatttagatatggagtgatttatactgtctcggtgcagcgaccgatcaatcccaatcactcaatctaagtgtgttccattagctagattatgtatcgttaacatctacagccgatcgagtagacccaacaatcttcaagttttatctgcctctgccgatctgacgcatcggcatggcctcggatgatacgtcatcggcaatcgtgccgatcggctatcgttgatgaatttaactctttgtcttttctctatcttgttggttgcaggatcaaaccagctggcacgctcagaacccgaaggcaatctctttggacctacactagagttaagcagatttctcaggccagtgcgtgtttttcacgtcaacagatgccaaagcatgttgccttcgttcctcagcctctcttgctagtcgcttccattcttgctgctcacgcagcaatctggcttgcccttgctcttgccgttcccactccaacctgagtcgctcggcttcttaacatgctcgttcctcattagcttcacgcacgagccgctgttcttccgtctcattgtctgccataaaaacgttgaaaaagagaggagtatagtcgtcttcatagttgtcgtcgaattcttcatcaaggtcatcgtaatcgtcgaaattgtcgaagtcatattcatcatcgaagtcaccatagtcgatagtctcagtcggagcgtaggaatcgatgcttggagtgttgaggtattcttcgatttcttctgtagaacacgattcgagtcgttgaaggattatgccgacttccttggagctagatccgactgtggtcgaagccgagtcagatctaggcctacggggagaaggcgctcttgaaccaaaaacagtagctagatcatctggtagccgcatcatgattgatggataaactgtgctgtcttgatctaatcttgaagatgaaaacgtcgaggtcccatctgagtggtttgaagccaagtcagatgagaaaaccctggagtagatctcggcctagtccgggagaccgaatggggcgagccgctatctcctcccgactggttcgaatccgaatcgagaagagagatcttgctgaagctgtcggtggtgaagtcgaggctaccgaactggtacgcctgcccgggagggaaggcgaagtcgtcgatgcccgaaacgaatcgcatcgcactagtcggccaaacacttgacgcaacacctacttgacacaccaactgttgaaataagatttcagcaatactaaaagggggtggcaatcaagctagaaaagtggatgggtcaggagacaaaggtttatacaggttcaggacttctcgatgagaagtaatactctactcctatccggggaaatatttcgccgagtgtattattgatctgacgatctgggggataagtctatgcccctaggagcacccgaacccctccttatatagggggaggtgccgagattacaatgtactacccatatgccttacagcctaggctaacagatatattacaattgtaactaaccaggactacgggatatttccttgatatacaagttagcataatacccgagtcctttcctaacataatctatctacatagtctatcccccgcaaccagtaggatatccatgctatgcaggtatatggtacccataatctccacaggcgggataggcgagaagttggaggtctagcggcggcggcggatcagcaaggcaaggaggtccgccggctgcggcagctcggcaaggcgaggagagtcggtagcgacttggcgaggaggaggaggccgggtccagcggcggctcagcaaggcgaggagggtcggcagcggcttggcaaggaggagcggtggtggcggctcggcaaggaggagggccgacagcggggttggtgcggttcggcgaggaggaggtcatgcggcgcagtggcttggcaaggcgaggaggtccagcagcggcagctcggcgaggtgaggagggccggcggcagatccagatccagagctcctcctgtcacgcccggaaattcactagtaatttccgaacttatttgtgcataaaatcctcgtccaggaatcagccgaggtacacaaactgacaatttaatatacagattcatcaaattaactaaaaacgataaatacttacttatgaggcacttagtcctcaacaagaagaaaactgcagcggaaaataaaatctagcgaagctccggctccactcccacaggcagctcaactggggtataagccaaacgtcttctccttcgggatcctttttcttcaactgaggttgattgattattgcaaggtgagcatatgacatactcagcaagccacacaacaaatatgcaagtgcacaaggataccaaaggatggcataatataggctcatttgcaaaagcagcatttagcaaaacatttaagagaagtaaaacagtggagtaattaatcagaaattttaatcaacactgaacagcacacccatgctgtacaggcccaaccattctgaacaaccatacccggctgaacagatctaactccaaaccaggagctaagcaaattattacccagtataacatccatagttatggtgagaggtgtgggactaatcacgaaaaacattgctcaacccgcccataaccgcgggcacggctattcgaatagttttactctggccagaggtgtaccactgtacccacaagacacagcctcaacatcatgtctaccatgcttcgcgatactggaaagtacccgaatagaggctgtgacaataccctctgcataacacaactcaccacagtgcatgtcacgcccggaaattcactagtaatttccgaactaatttgtgcataaaatcctcgtccaggaatcagccgaggtacacaaactgacaatttaatatacaaatccatcttaataataacgttacatacttacaaagaaaagaaaacaacagcggaattaacggtctagcgatggcttcagctccactcccacaggcagctcaactgggatataagccaaacgtcttctccttctggatcctttatcttcaactgaggtttgatgattattgcaagaatgagcatatgacatactcaacaagccacacagcaaatatgcaagtgcacaaggattccaaagaatggcataatataggctcatttgcaaaagcagcatttagcaaaacatttaagataagtaaaacagtagagtaattaatcatcaatttttaatcaacactgaacagcacacccatgctgcacaggcccaaccatcctgaacaaccatacccggctgtacagatctaactccaaaccaggagctaagcaaattattaccaggtataacatccataattattgtgagaggtgtgagactaatcacgaaaaacattgctcaacccgcccataaccacgggcacggctattcgaatagttttactctggccagaggtgtaccactgtacccacaagacacgattccacacatgttgccatgccccgaaataccaccacggcattgcaaagggggaaatcgtgacaataccctttgcacaacacaactcaaaacagtgcaccgttcctggatcataatcacccccttataaacaaggcatggactccccagcgacccccgcggacttctcgccacttctcagtctggcgcactataatgaatcatgctatacaaaagataaagccgttgcccacgctggcttgtggttggcacgataaatgtttcacaacagtagctcgcgaaccggtccttaattgtcatgagcacaaccatcaaaaccatatgctcacaacccaccttaaccaggttttaattatcaattaattaacatcacacgattaatcatcgtgagctaccatttaatgtaaccataattaataataatataacatagtttataattaacccctttagttagctaatgtttctaagcatagctaagcaaacttacatatagcatttagctgaaccaatccaatatataaggttcaagctaatcaatttattacccaaggtatcaaggaatagagcattcaatgcaaattggccataacaaaggaataggttcacaccacccggtgacattcgaaaataaatgcacagttgaaataaatagagaatttaaatataggatcaacatgctcaaaggattgtgtttaggatctgtgtgacttgccttgcaataatcgatcttcaattaatcttcttgatcaattccgacgcactcacgaaccttcgcaacgacggaaacgacaggctaacacgcaaacgaagaaaaagactaataaaaaccaaataaacagtacataaaaagtaaacaaacatgtagatcataattttagatgaattatgagacttgaacggcctcattctgacttcaaatgaatttattatgaattttacaagattaaatctaattaaagcccatttaaaaagaattaaattaatttaattcaatttatggacaattttaatatgtagatctttattttagaaaaatttagcaacttgaaccacctgaaacggatctacggttatttagttatgattttccgaagatttaatctattaaaagaaattggaaaaaaggaatcatgacgtcatgctgacgtcatcatcgccagcatgacacgggcgacgacctcgccggcgatagagaggtcggccggcctatccaagggcacctacgcgaagaggacgacgagacgaacccgatggtactcaccaaaacgtcccacgacaaccgacgacggccggcgacgacgcaagaggcggcggcggctcggttgaacggcggcgacagctctccggtggccggcggcgaagggggacaggcggccgggcttctccaccccttggcgcacctacgggcggcgatggcaagcggcggcaacggcgaaggcgacgcggcaagcggcggcgacgggctagggcgacggcgcggcgcggctggtggttggccggcgacggcggcggctaaaacgacgcggcgacgactctacggcgcactagagagctcgggaaagggggcaaacgaaagaggaggactagagggtcctatttatagccttggattgaagagatcggactcctcccgcaagaaatcgatccgggcaatccataactcggttttggagataaactcaaaaacgagttcgattcgggcaagatacacaacgatttgctccgatttttgaggggaaagatagaggaagacgagaggataaaaacccctcaaaaatccggaagaatcggggccggattgaggcggatttgaagcggcaaagcggcgcggtagggcggctcgggctcggctccatggccggctggaggttgaaggagctcccgacaggtggggcccacctgtcggtctccacaggagggggagggctggcggcttggctgggccggctgagtcggctgggccggctcggccgcgggcgggagagagaagagttgggccggaaacggcccaacaactttagggagggattttggaactttttcaattaaaataattcgtgaaatgatgtttcatttatttaaaaatacttcccttgctgaaacaattcccagaaaattctagaaaatagaggaacaagcaaagtatttaataaaattttatctaacccaattttatattgagatttagcaaattaaaattagatcttctcttttaagcttttaaaattatttctaataattccttttaaacaacaatttataatttaaggatttttaaacaagaaaagctcttaacaattataattagatcatttaatgattaaataattactgaactgttctttgtatcatttaggaattgagctccgaaaaatccgagaaaattctagagagtataattaaccatggagaatttaataaaaattaaatccatccatgctttatatttaggaaattttatttcccacattttacttcacttgtaaattaaagaacatttaatataaattctattaataatttattaaataatttataaatcctgaaacgaaaatcagggtgtgacagtgcaccattcctggatcataatcacccccttataaaacaaggcatggactccccagcgacccccgtgggcttatctccgccacttctcagtctggtgctccgcaatgaatcatgctatacaaaaaggtaaagccgttgcccacgctggcttgtggttggcacggttaatgtttcacaatagtagctcgcgaaccggtccttaattgtcatgagcacgactctcaaaaccatgtgctcacaacccaccattatcaagttttagttggcaagtaattaattaaccaatcacgattgaccatcgtgaactatcattaaaccatcattaaataataatgaatcataagttatcccaatagtgtgctaatgtttctaagcatggctaagcaatcatatctaatatctagctgaaccaatatataaagctcaactagtcaaattataataacccaaggtatcaaggaataaagtaatcaatgcaaacaggccataacgaaggaataggttcacaccacccagtgacattcgaaaataaatgcacagttgaaataaatagagaatttaaatatatgatcaacatgctcaaaggattgtgtttaggatctgtgtgacttgccttgcaataattgttcttcaattaatcttcttgaacacttccggcgcactcgcgaaccttcgcaacgacggaaacgacaagctaacacgcaatataaggaaaagactaataaaaaccaaataaacaatacataaaaagtaaacaaacatgtagatcatatttttagatgaattatgagacttgaacggcctcattctgacttcaaatgaatttattatgaattttacaagattaaatctatttaaagcccatttaaaaagaattaaataaatttaattcaatttatggacaattttaatatgtagatctttattttatacaacttttgcaacttgaaccacattaaactgagttaagatgaattagttatgaatttttaaagattagatcggattaaaacacttatattgattttaattgaattatgacgcaataatgaattatttttgaaaaggaaaaggaggattattgcgtcagcggctagggtttcggtggaccgggtgcacggcggcggttcacgggaacggacggccgagatcaaccctatccaaaacggacggccgagatcgatcggtccacgaccggctcacgggagacggggacgatgacgtcagcgatgacgtcaccaccggcggcggcggctcggcggctcggacggcgcacgctcgccggcgaacggcggctctacggcacaaacggagggcaccaagacgtagagggcgacgcggcgaactcaccggtgaccaaagaagcagcggagaagcaacggacagcgccggcgacgaggaagaagcgacggcggagatcgggttgacggcggcgacggagctccggcggtcttcggcggtggcgaagcggtggacggggatggcgacgactttgcgaacccgatggtggcgacggcgaccgacgacggcggctgcaacgacggcggcgactagggctacgcggaggcggcgctagacacgacggcgggctaaggcaaaggtggcggcgggtagaggagacaccgggggtccttatataggggctagcgagcggcgacggaggcccacggcgatcggcggcgagaaggaaagatcgggttcgggagagagagagaggaatctgattcgatctcgaatccaccggtttccaaagaaaattagccgatgtttccaaaagagaaaaggaagaggagatcgagaagattgtttcccctctatcaattcggccggagaaggaaaggatcgaccgaattttggaaagcggcggcggagcggctcggctagggtttcgggcggcggcggcggcgctaggaggaagacagacctgacagacgggccccacctgtcagcggctgagagagagaggagagcggcggctcggcggattgggccggactgggccgagggaaagagagagagagggttttgggccgactttcggcccaaagccaaaagagacttttaaaaacctttttcaatttaaattattcatgaaatgcaattccatttattaaaaatacttccttagctcaaataaatcccagaaaaatctaggaattatagaattaagcaaagtatttaacaaaattttatctagcccaattttatgttgagatttagcaaattaaaattagatcttctcttctaggcttttaaaatcatttctaataattccttttaaacaacaatttataatttaaggattttaaacaagaaaagcacttaacaaatataatttgatcattattgatcaaataattactgaactgttctttgtatcatttaggaattgagctctgaaaaatccgagaaaatttcagagagttgacttaatcatggagaatttaataaaaattaaatccatccatgctttatatttaggaaattttatttcccacatttaacttcacttgtaaattaaacatcatttaatataaattctaataataatttattaaataatttataaaccctgaaacaaaaatcaggatgtgacacctccattgttcttctttctctagatcttgatccatagtttctttttttttcactttatttatgaggactatgtgaatgttgttcttctcatttgtatggtgatatttgatatgtgaatcttattcttctcatttgatttgtatggtgcttaatctgtgcaaatggtagctggatggggatattttcagatatattttgttgcccaaaatattttcaaattatttttgtaggtggtctgctttagatgtccagcggaccggttaacggagtcacctggaaaaataattttcgtaaacggacaaggggtccgcttgcaaaaaatctttgatttttgcaggcctctagggacagacggagactatgaccgcctgaaaaaaaaaattctagtaatgaatggactttttgcatggggtgaactgatcttgaataagaaaggtcaattgaagatgatgataaaaagaagacaaacacttgtacgatagcatgtcatatgatgttaatgaagctagacaaagatatatatgtctagattcattaatatcaatatgaatgtggaaaatgctagaatgacttacattgtgaaacggaggaagtacttatattcgttgatggaaattggtaaaaccgatacattttcattcgcaaaacgtagaattcttttcttaaaaataaaaattacctgaaggtacagcggaatttgccctgaatgggccacaacaccgtgggctagcccattgcccagccctgcccagcgcagtcaacatctcctcctgatggaataagaccactttgactccctcaactgaccaccgaatctaaatcgtatccctcaaccgcaataccagaaatctcaacccccgaactttcaaaactggtgcaatttgactccctcggcggttttgggggcggtttcactgacgtggcgcctacgtggcgatattgacggagtcttcggtccacgtggcgttgacatgacatttacatggcagtagaattaaaaaatatgcatgggacccattagccattcacacaaaaaaatgtggacccactgacatgtggggcccacatgtcagcccttccttcttcctcctccctctctcccttctctctctttctctccccttcttcccattcggccgacgggcaggagggcgactggcggcattggggcgcatcggaaccggaccgggggcgcggcggtggctcggccgtggtggcttgcggtagtgggaggacgaggggaacggcggcggcgactcgcagcagtgggaggacgaggggaacggcggcggcgactcgcggcaatgggaggacgagtggaacggcggcggcggcccgcgctgctgcttgtcatcctcgtcctggcggttaccggcgtggtctctgacggcccgtgctgccgctcgtcatcctcgtcctcgcggttaccggcgtggtcgctgtcggtgatgaagcgactggcgcgaggggg

SEQ ID NO: 10503 - DNA, 2055 bp, Oryza sativa
aaaaattaaatccatccatgctttatatttaggaaattttatttcccacatttaacttcacttgtaaattaatgaacatttaatataaattctattaatgaattattaaataatttataaatcctgaaacgaaaatcaggatgtgacaaactaccccccttacaaagaatctcgtcccgagattcggaacggctagaaagaaaagggcataggtaaactgcagtctatcttattccataactccgataattattctaaggctttaaagaaaactactgctgctttgaaactggtggctgagctgtaacacttgaaaacgcaactcttgaagacgcaactggcactgcatttgatctcaccaccgatgtttaactgttaagactgtccttgaccagcggaagaagattcaccaatttggagtggcttgatacgctgcctctggctactaccttgtgcctcctggaatacagtcattttccttttacggttatccatcctgttcttcttgtcttcaagtcgagttgctttgtcaaccaactgctgaaaatcagcatagtcatgagagatcaacgtaactgacagttcatcctttaagccttccaagaacttctcctgcctttcctcgtcagtacgcacatcttctggagcataacgtgccagacgattgaactcatgaagatactctgccacggtttgatccttttgcttcaatgccctgaactcacgcttcttcaaagaaacaactcctgtaggtatgtgtgtcttcttgaatgcttccgtgaagtccgcccaagtgattggttgtccttctgctctgttcatccggaattgatcccaccattctgaagcagatcattgcaactgatgtgaagcgaaaacaactttctcctgatccgtgcactggagcagttccaacttcttctcaacagcgtgcaaccaatcacctgcttccactgggttggtagtgctagaaaaggtaggtggcttcacacgaagaaaatcagttaacttgttctgcggcggtggagcattgttgttcccttggttgagctggttctgcatttgctgtatcatcatattcattaactgagtctgttgagccagaacttgagcaagagttgggttcccttcattgttattgtttccacttccactggcgcgagtgttcaccatctgttgcagattagagaagataggaggagagaggttacactaaagataagaccttaaccaggttaacactgatctgatgtgtgtagaccaatatattgttcaagttgattaagcaagcaacctaatatagttacacactcatcattgaatcacaccaatgacgggaatgcaaccatacctacacacaagcaagcaacaaacgttctatcctactaactattcttcaaagacactttggcggcataggttctaaggtaggatccaaacttcattccatcttgaccacttggcacttcggttcttcctcgatccacttgactgacctccataagtagacctcattaacatcttctagtttcaacaactagttttagaactactcaagttgaaagcaggaggggagaggatgataaaatgatttatagagaattctagagaaggaagaaaggaaaattttcacaaatcatgttttcgaaaaatttgtccttaaggtttgaccatttggcttatcctacagtcgagatggctctgataccaacttgtcacgcccggaaattcactagtaatttccgaacttatttgtgcataaaatcctcgtccaggaatcagccgaggtacacaaactgacaatttaatatacagattcatcaaattaactaaaacgataaatacttacttaagaggcactaagtcctcaccaagaagaaaactgcagcggaaaataaaatctagcgaagctccggctccactcccacaggcagctcaactggggtataagccaaacgtcttctccttcgcaacttgtcttcaactgaggttgattgattattgcaaggtgagcatatgacatactcagcaagccacacagcaaatatgcaagtg

SEQ ID NO: 10504 - DNA, 7059 bp, Oryza sativa
  unsure (1)..(7059): unsure at all n locations
tgctcggcaaaacttgaaggaactcatgggcttgcaatacccatggtgcagagaaatcatcgcacaattctatgccacagtttactttgagcccaacaaagaaaagactattcattggatgacagatggcatcatatactcagtgacatatgccaagtttgctgccattttggggtttccggctcgctctcgcaccaatcgtgtcaagattcatgatgagaagcccatggacacaaattctcttcacttcttgtaccaagatgtggactatgagttaggcaccatcaaaggtcttcttcccttctatgcctatctcaacaagctcttgcgcaaaactctcaatcccaaggaaggtgatgctagcaacgtccttgcctatacaagtaatttgctttacaagataaaggctcacccacagctctttgactcctttgacttcatctttgaagaaatccggcttatctccatgatgcctaagcgaggacttggctatgggccttacattatgaagatgattgagattgtgtccaagaagaagtttcacaaggaggtggcacataccggttaccaactccgtcccatcaaggctgctgctgtgccggctggatgaaccactcgtgcttcttctcgtgccggtccctccgctaccgtcaccaagccggactccaactcgtccttgcggttcttcaagtccatcttcaacttatgcaagaccatctcagttcggcaagccaaggaacgtagagcaaggaagaaggacactcgacggatcaagaacctccttcgcaacgcccatttgccgtgttctcccgatggttctgaggttgaggacagtggggaggatgtgattgaggacccttttgcagctgaggcaagctcctctcgtgcggatcatggcaaggctcctatggaggaagaagaagaggaggaggaaggtgactatgctgaggagtcaagtgaggagggcgaggattctgatgaggatgagtgatcctcttttttcccttttggtgccttgatgccaaagggggagaaccacctatgaacaaaaatctctaatctatctcctttcgtgatgactagtcgaaccttgggcttttgtgtcttgttaagtgcaattatctattatccatgctcaaatgtgtgaaatatcttgtcattggcatatgcatgaggttatattgtcatttctaatctaatgcatagattgagggggagctctcctatttcatttctagcatatctttagggggagctccactaaaatcctaatcttttattacttctaagtgtgttgtcatcaatcaccaaaaagggggagattgaaagtgcatctaggacccctcatttattttggtgttaatgacaacacaattagagggtaactaatgctttttgttgagatgtatgcaaggatgaaaaaggagtggatgtcaacacaataagtattgcggcatcttttgtggtaattgtcttctaatccatgtatatcttgtgttcttgagtattaggatgccgtactattaagagggatgccacatgcatataattgatagaacactagtgctcaaaatcatttatttgaagtgttcatgttttatgtctgtcggactatccgatgttgatcagactatccgatgctcagactatccgaaatttcacagaactttgctcactgtcttgggtctgagtgttggctaaaaaatatcggactatccgatataaggtcggactatccgatacgtcggactatctgaaatttctcagaacttcactctttgttttgaattgctttttattccttttgagtgagttttaaatcagactatccgatgtgatcggagtatccgatgatccagagactccgaaattcaatggaacttgagtctctgtgagaggatgaaattcttggttcaaaaataacggaatatccgatatgacatcggactatccgatcgatcggattgtccgaaattctccagaatttcgttctctgtctctggcctgcttgggggtcaaaaacatcggactatccgatgtcacctcggactttccgaggtgggatgaaaagattctctcccaacggccacattttgggggcttctataaataccccccacctaacccttttctagggttacccaactcattcattcacattcactttgggttgagcttggtgctaaggtggtttagatctttgagctctctctccctctctcaaatcccctcttgttctttgtgtggtggatcttggtggttgtggatttggggtttgagggcctagtgtgtgtttcactcgatcttgagcactagggttgaccaagagttgtgtggtgtttgttactcttggaggttgaggactcctagacggctaggtgtcactcccgagccaccgatctacgtgtggttggccgggagaagtttgtgaaggccggatctcgcctccacaaggaaagagataccccttagtggaaggaggagtgcttagtgcaacctcttgaggaaagggttagcaaagacccggctcttagtgagctcctcaacggagagtagaatcctctcaaggatttgaactccgggaacaactcggtgaacttcattgttggtgatatctcttctctcattatttagatttgttttttgtgccgctatagatctagtcgctgtttgcgccatactcttgtttgtgcactagatctacttgtagtgttcttttagtggatcagacagtctgatccaacatcagactatctgatattttcggatagtccgactgtggatcagactttccgaccctaactcagttttagcttccacataaagttttaaattagcctattcacccccctctaggcctaattgaccctttcaaagaggatataaagatgacttgaaaaaaaaattgaagtgctcagagggatttgaagaggtaacttagacttctagatgaatattctacgaaaatatattttttcgtgcagccacttaagagacccgtgtagaaaaatagctctattttttagtatggcttcttaagagggccgtccgccacgagtgaaggtcccactcaccagcatgcgctgaggagataatgggccgctagtggccctgtcctcaagtagctacacacccacaaaacgagggcgtgagggtgttgaggcagtcgacgggtggctctcgaggctgaccaagacatccgcgggtgcagttagccatgaccaaatgatgggttgagcccaccagctccacaatctaggtgagccaccaaccctctagagtctcaccggtagctgactgaggtgggtgccagaggagctcttatgttgcaagcaacgtgctccccgggtcgtttgcatcgattggaagggcaccatgtttgcatcgctcgcgatcctgccccgacattcgttagctatagacacagctaactcacaccggggtattatgtattagctgtgatatagtaccagttctaggatatactagctggtacacacagaataaatatggaatcaaagtaaactgctttattacatcactaggtagtagtccttacataagttgccatcatggacaggcccatagatgaacaacacaacattatagaaagccataaaagcgacagcgcagaagcgaacagcgtggagaactaagcgactaagcaactatgcactaggcaaagaacctaggcactaacttattccacagtcgaggcttagggctaggcacgaaacatctagaagtcttcatactcggcttgctcctggagatattcctcggcggtcgggtcgacgtcttcatcttcatactctatagattattataaggagcaagggtgagtacttaacgtactcaacaataagccaggggaaagaatgacatgtttggtgatgtgcactagggttccaaatcttccgaaaggttctgataaacaacgatttgggcggagtcacgacacaaatcgatccggcttcttgaacacacacgctcttgagccccgcaatcgcagcaccacgtctcctctggttatcacccgtgtcaaaatgcggatgacctcgccgagaaggctaatccctgtttgccaatcgaagaacacaagcaagaacgagatagaaaacaaccaaaattgtagatgaatgattaagctcacgaattggggtctaacaaaccgatctagcggcgaaactgttctcgatagattaatctaagcaaacccgaccctaaacaatggcggctactgaataaatgtgattagaaacgtcctagggttgccctagggcgcacactcccttgggctaagcccacgacacaattacaaggcccaaaactcaaatcagattcggattggatgagttacgtggcttgttttgcagattcccggcagctcggtaggaattttgatgtgggaccaaaaccatctgaaagtagacttcataagctttccaacaagtacttatgggccctgaaattacttctagatcagcggctaggtctgtttgaagttgatgctgtcaggaggcccgaatccgaatccaaaacatgtagaatttcatctcttgtcttatatggaccaaaagtgacgtggtgagatcaaagaagacttggagaaggtcttgatttggtccccaatcaacttcttcaatcatccatccaattccttacgctcggtctcttttctttcgcccaagcaagtaactctgcaaacgaaaacacacaaaactcattgtgtagcaacgtatgttcaaatatataacaagtaaatctaatatagaacatatgcacctttggttgattaatacataaggtagttatggttatatccgagctagttgtgtcctcatcatttggtttaaacaaggaggcaaaggttttatttgcgaaagctgcctctttggcaaagtgatttatttcacaaaaactcctagtgagtgagtcaagttttagttgtcgggaggaggctcatgcctcgacccattccacaagttgctttgcaacaacttgtcacgattatcgaacaacaattaatttgtttcctctattagttccttttcacaacaacacagttcacacatatatctcagcacaacaacgccatcatggccctaacaacacctcggcgtcggatgacaccccaggtcacacagacccgttcctaaccataaaggttagccatctgccacacaggcggactttagaaacgttacccttcccaataaccacttcttcacaaacatttgtcaaacaaatctacgctatgagaaacaccttacacccgcccttgaccgtgggcacggctcttcgaacagttcaataatctctgcagaggttgcacgctttatccacacgacatgaaacttacaccgtttacccgtcggtaacggaagttcgtgataaggcctttccaaggctaacccatgaaaatcgcatgagtatcaggcaaggacagccgtcatccactcaggaaataccgaggatgtctcctacagatatcgcacgccacaatagaggcaaaaagacacccatgatgggccaaaatgtgtaaaacttcgtctcctcatcctcggcattccacaaccattggcacaccaactcccatgtgataacaatttacatagccagagacatcccataaatacccgtgcgatcacactgtaatgtgtttggatggatttcccaaaggaatcggtccttaacaacaatacgtggccaaaccacaaaggcatgactccgcatcaccaccactttcacaacacattttatttcacaacacctcagttgtaccggatttttaagcaagtaatttggaataacccaagtttcccacacggcaaacaacgtaagcatggctaagcgaaactatctcggtaatcatataatgttaccgctgcaaacatttgtggagctatcaaaggtatggaaacatcaacctatgtaatataagtgcgactactaggtcggtccgtcggatgtataaacaatccgagggctaaacatattattcgtgtatactaaataatgcacttttcaaacaacatatctttgcaaatataggggcaatgtgatcaaagaggcttgccttgcacagggttggggtcttctccctcgaaagcgatgtccagagcttcctcgtactcgggctctaaacgcgaaaacaaaactaattaacaaaaggcaattaaaacaggctcaaatcagagaaacaatagagccactgtgtagatatcaatctactactaattaaaaaaaaaataagagatgcttccttcgtccatcacaaataaaaaaatagcgaagaaaagaagaagtccgattccccttaaaaggaaaaacaaaaaaatcggagaaaaaatagccaaaaaaacaaaaaaaaatccgattcgaaaaaaaaaaagaaaaagtagccaaaaaaatgatccgatcccttaaaacgggaaaaaaaatcctattccggcccacgcacggtttttctgtttttttttaatttttcgtttctttcagttttttctttccttttattttgtttttgttggtttttttatttcttaatatataaactttgtaaacatctctttctctactcccgtccctacttaaaaaattcacatctaaaaaggtccgttcgattccctaagaaagtggcaaaaaaagggttagtctactacttttaaaaaaataagaggcgcttccatcgtccgtaaaaaaaccgacggaaaaaacctagtgaaaaaagtccgatcaaaaaaactgggcaaaaaaaaccgtaagaggtgcttccatcgtccgtaaaaaactcagcggaaaaaaccgggcaaaaaaagtccgatcaaaacaaactaggcgaaaaaaacaaatctgtccgataaaaaaaaggggccaaaaaagggaaaagtaaatcgaaactaatccgnnnnnnnnnnnnnnnnnnnnaaagggcgattttttttaaaaaaaattgtccgattccatagaaaaaggaattatatgtgacgcagtaaaaaaaatagaccagacgaaaaaaaccgagcaaaaaaaccgggcgaaaaaactgggcgaaaa

SEQ ID NO: 10505 - DNA, 3184 bp, Oryza sativa
ataatgttcttatggatcagttcgggaaggttcagctctttaccacatcgatcctcttcatgttcagttccttttatgtatgtcttcactgccacctttctataattctcaagaattcctaggtagacattaccaaatgcacctctaccaataattgttgaattgttatttgttattacttttatttcacgtgctgtgaacattctttttccactaatatacagaggggttcctttctttctagatttgtacatgttccggttgaaaatgcctgccatcttagggaacgccatcaaactggagctgacattgtttgtaccttgctggctttgttctttatcttcattctgtgtttcaggaaagaggtgccaaccaaaattttctagtggagcaggttgtctcaaacagaatttcctaagcatccgaaggtgcccagccaggtcgcacatatccggacgtctatgaatgtcctctgttaggcattcctgtagtaattttccaatctccactaaaaccttcatgttgctctcattgcaaattttgggatcaagcaattcagtcaccccctttccttcagcaagagcttgagccagacttgccgcctttttcttggtgataagctcctgaagaactattccaaaactataaacatcacttttggaggtgagacgtccctcccgacaatacaggggatccacgtaacctatactccctatacacttaacagtatgagttttgtctgtcgagagaagtctcgatattccaaaatctgttatttttgcattaaaattgtcatccagcagaatattggaaggctttacatcaccatgtagaacagggctgcacatagaatgtaaataccctagagcatctgcacactctatagcaatatccaatcttatgtccaatgaatcaaggctattcttgtcatgaagatggtaatcaaggtccctattaggcacatactccatgaccatcattggagcatttttctcgatgcagtagccaattagcctgactacatttttatggttgatttgactgtgaacacgtacttcttgggcaaacatttcttcagaatccattttaatatacttcttcactgcaacgaaatggttatcatcaagaactcccttgtaaacttttccgaatccaccatttccaagattggtgttgtagtcactggtaattctttttatatcttcttctgtgaaaggctttatattagaaatgttctcctctatccattgtgccctttcaatatactctttgtgcttgctttctgaaagatccataattatacaatatgatcgttcttgcttcaaataaattgatgatggcctggtcacatgataagtataagttaaatatcaatttaaatgcattgttagatttttttttaccacacatgtgcatagtataaaaaatatatggctatattccaaaggtaattgtccctaaaaagcagagttgcaacagaccttaacttgaactgctgacagcttataaaacaaaaagcataacctaaattaaattttcaacaatctcatgaaaatcgatgtcgtttcttatatgcatgtgacaagaaaaatggtttatgtttgatacgagcctgacttcatttgacctaatatattttgcagaatacaatcgccttcagctctattttgcgccgcaagttttaggataaatttgtatgcctttgaacttttggattcagggtgaagatttgttgtgtccattatgttatgccgtctttccctgtttgggacaccttttaattatacgaggatttaggccctgtttgattcagtttagaattattataatctaaattattaggagtaagctgaaacaaacaagtagattattatgctagattattataatctataagccagattactaaaatacaataatctcctctagaagagcttttttcagattattgagtggctaaagacccactagccttagatgcatctaataatctagagaaacaaacaactcgtagcttattttatgtcagcttattataatccagcttagagtaatctgatttaataatctagattacaataatctcaagctgaaacaaacaggaccttagttgtgtgcgagtctaacttccagtaaaattcatccaattaccaaaacagatacagattgggatagaagatccaaacagcaccagtcgacgtttatgcaagctctatgaccatcttggtggtataatggtatactataaaattataagtggtatttttttttcgccgagaaggctgaaggaggccatccgagtacattaaaaaggaataaagtttacaagaaaaaactcgacagaagctgtcgaggacggaggtgcatcaaaatgcacaaccaaagccacatgctaaccacacagacacaacccattgagagaagaacctagcaccgaaacgacccccgctatgcgtgaccgatcgccgccgggccaacgacaaaacaacaaagacgagactctgaaaaacgatgcccccatggaggtcacgacatcaaagacgccgccatcgcccatctaaggaacatgtggttttcacctagtgaaactcaccaagggagaggggtatcattgccaacgcccccaaggaggttacgacgcccaaaggcgtcaccgctgccagcccgatgaaccatcaggcgaggctttcgcccagaacccatgcaaccttgcttgaagttcgtcgcccatcaactcaggaaccatctcgcaagcagattagcacgaggcctccaccgcaccacgtcggcacccctccaccggccgaccaccacacttgctgcagagagctgccgccacccctaggaactggcccaggcctcctccgtcccaccatctgccggcctccttgctagttttggccgaaagagaacccggaactagacagcgtcgtgatggcgatctgagcttccctcgctaaccggctgccgcctcaatccaacatagaaactccccacatagaaggggaggagctccaggaagggcaagggtgcagatcgacaacgaggaagacgacccaccgctgccagctcccttagcactgccattgctccctttgcgccctgcctcaaggcctacgaccgccatctccacctcgaacgccaccaccgctgcaccagatggtcagaccgcggcctccgggcg

SEQ ID NO: 10506 - DNA, 9792 bp, Oryza sativa
aattaccctgcacaagcataaattctgcactcatcagttagtggaaagcagggcgaaaacatgataaggcaacatgctcaaatgggtaatgacagtttgggagcacgttttcttcagcaatttgacatgcctagctaaagaaagatataatattcatcttaattctgtttcagtaagccctagtgaactgagcaataatgtacttcgatgcccataacaaccgtagatataaactttccctgacatcgcttcagtacaacaaattacaatagcaaagatatgtgaataaacaataaaatacaaaggttatgttttcacacacaaaaattgacctgacataagttggtcgagggcgtggatgtacgcccagaccacccaagttcaagccctcgtcgaggcgaatttgggtgcatgtttcttcctaatcaaaacaacaggcaacctaattcctcctaggttggtcgattttcagtcataatatccatcaactcaaatgttcgtccgtaaccattgttaagcttgtaaatactactgaacccattttctaatagtacttaagcatattttgcgggggattgcaattcataaccagagcagccatcctggtccatgcatttagcttgactgtgcattctcacttgaacataaatgtactcaaaaactaatcaagggttttatttgacaagtgggggaagaacaatccaaatagggattgggtcggtcaatccacctcccaaaacccaaccccctgaatccatcgtttggtaggaagctcaattgcaacctacgaacatattcagcgagcacaaaatttgccatccccattctgcctctctgccctctccctcagaccctcactgccccatcagcaacagctatggcggaaacaaatcggggaagggagagaagaaggaggagggagacgacggcgactaacttgacaaagagccgccacgccaccgccgccgccgccgccgtcgtcgcaggggaggaggacggggagtcggggagagcagcgacgagggttttgttttttctttttttttttttcctcgatggcaagtactttgtttagaaggcccaatttcagccctctggcccagattgacaggaatggaccgtgacaggaaaaaagtctaccgcacaccccttcgttatggatcgagttccgcaaagcaggtatagaaattcccctactattaaaaccaatacaaatcgattctctggatagcttggattacgatttcgttctacgtggtgcccaataaatttatgatacaaaactgggcactcaaagaaaatcacaaatggttttgtagttggggtttatggttgaggtacgtgaaagaactttgttcctactacaatgtaaaggtcaccactaatttcgcaatgggcgcccggagaaggtcacaagttgcaacgagtactcaggccagcataaaaatgttacattcaaacactatttctttgttacagttacaatccactaactacattaatcctatttatctttgaagttcatcctcatttaggttggttcagttggaaactactttcctccgcacgaaaaacaaaacaacatattaacgtatgatcaattgagtattagctattttttttaaaaaaaaaggaataatatgatttttaaagtagctttgatatataaattctttttgaaaaaaacgtaccatttagcaatttagaaaaacgtgcgtacgaacaacgatgtaggtagaattgggaactcacacaaaagaacacaatatacttaatgctaatttatcttctctcataaagccacatcataattatagttaaactttggatgggcaaattgcatcttttctcttcaaaaaccacaccatacaacataattatttaaaattttaactcatatatactatgttattacacaattatccgttactgccgggatacccatatagttattataaacaaaggagctttcacatttagctacagtcgaccattgcatcaaagtgaatattaagatatcagtcgtaataccaatggttttttaataaaggagtttagaatactgctgcaatgcatgagataaatgaggtcactcccaataaaagtttcattctcattaaatagaatgccatgtcaatatttttagtgatgtagcaagaaattgataaagaaagactctttccaatataacaatataacttgtctctacatgtatttcctaatacccctctcaaaataattacaattctaggttgtttagcatgtattaaggtttgataagaaaatctatagtgcccctcgttaaatggtatatagttaaagttaaaggtgggagggtggttaaggatagaataggaaaaattttgaaaaaaaaaagattgatgagataaataatactctattgtgagataaatttaaatcctagaaatataatcattatgagatagaggtagtacaaaacaaccaagtaagctattttaactatcaattaaatatcttaggagtatgtgacactcaaaacataaaatgaatcctcccaccaagatggcccaacaagcagaggtgtccacacgtggagctttattaccaacatactactatatactagtatggctaactatatgacatgcgcaactagggattttccatagagcacctgcttagaatgcggccattgcctctctttacaattcttcaaattgaaaagtgatatatagatgttctacagcttctacacagtaaaaaattctgcggtgctgccaaacgacaaaattctgcagcaacttataagtaatactaactagaagctgatcttattatacaaacaagcagaagctgtcttccaacaggttctccaacaaactagtagcagcttctgcacagctatgcagaagaatggtcccaaaggacacatcatatacaagctccaatagtatcactggtaacctcacgcagcacctgccagcaaaaggaggaagcaaaacatgctaaggcctcaacaaacagagaaaaataatcaatcaataaatggagaaactaagtgtaaggaatgttagatcaacaaagtacaaaatagatttaggcagaaaatttctgcaaaactacatttagcctaaacagagttatgggggaagttaaaacttcatctcccataaaagacgacatgtcgacatacatgatcagtcaatttcctgatatacgattgcaatctagcttgtatatagcattcttcatttgccaaaaaaaagaggtaacaaaacaaccaagctctttccgctaatggaacataatatttgaaataaaacaaatacggttctgttgttgcaacaagaactatcaaagctagtttaatattttcgccaggtaaaactagtttaatatagtctttgtaataaatttaacaggcatatgcaggattaaacagagaacaaaacacaaactgaagtaaaagcatattaatgtcagcacctgtggtataaaaggcggtgtagggataaaaagttgcagatacatcagcttcaaacacctttttgaactgcagtgacttgagctggacagcaaagacaccaactgccgtccatataaaaaacaaatcatcttcctccacaagacctaatatcctgactggaggccttctaaccaaatgactatccgtcaacggtacagagggcacttccagcggaaggactgcacccaactcaatggtcttgcgcagcacccatcctgtaacgccccctgaattaatctccaatgcccataactgaaggttgaaccctgtcatggtagccagacctagcccaccatcctctgccttcatgatatggacattccttctgtatacactatgtgtttctggtggacactcaatatgatataatctagaagtggccagctcgaatgcaagaatatgctttgacttaagtggccaatatatgacattcccaacaagaatgctaggcctggaatcaacctccgatggtgctggtgaagatgccatcatgtcccaggtgtccttctctgacgagtacctagagatataagcatagcctatattggtgaatacccatactatgaagaaggggcatgagctgcagtcaccatggtcattgtggccagctgcgcaaagcaccgcagcatggctctcgggcacacgtccataattgatacgaggattcacatcaggtgtaactggtacagcataccggttgccagtcatggggttccacacttgtagactattccagcttgagctaatgaggaggacacggctgtggcggcagccaaggacatgccagtaggggtcaggtagggagaatgctcctaccgtgacacattcaggagggttcccaatgggtagaaagcgagggatgctggtggaattggtgaagatgccgagaacagggggtgtttgatggaacgcacgaaagcgcttgataaatttgttatctctgatgaggtagcgccagtgcttgcagacaagggatgcacgaaggaggcacgtggggtgttttgggaggtgaagtaagatctcaataagggcatcgtctggaagcatgtttgccatggtgaggaaggatgggcaatgcaacttcaacttaaaaaagaagcaaaaggcgcattatttttttttaattattgtcaccaggaaacaacctatactcaatgccaaagatggaacaacattagcaacaatggtgacaagatgcacaaaaaacccgatagctgttcaagatcactccattaccttagatcctagtattttgattagcagcggtagttttggcaaaggtgtgatggtttccccggctatactttgcaatagccaatatctgaagtttgctatagtctatagaaacaaagacaacggtatatatcattcactgtggatactgacttctgctccagcttttattgataagaaaaaagtgacctgcacaattgtacacgaataatttcagctcttgtcattgagcattgacatttccttgcaacgaactacttcctccgtttcacaatataagactttctagcattgcccacattcatatagatactaattaatctagacattattatatgtatagattcattaacatctatataaatgtgggcaatgctagaaagtcttacattgtgaaacggatggagtaacaaataacaacataagcctatatcaagctactaaaaaaaataatgatgtcacaatccgtccatcttttcatgcctaccgtcattcaattcaggaaccatggctacaagtttgcgtacaaagcatagttgccggtgacagacacaagtttgaagtaggttattatacaatggtgtgtataaggaaaatggaaattagtgagggcaaaatcagtacaatgtggttagaatagccatccatatatattccttaacccaaaacattgttgatttaaaacctccaccctaaatcaatactcaaatcgaggtcatcagaatatactagctagcaccatcataccatttaacttacagctgaaacaaagcaatccccaaagtaagggtaaggacggatctagctcggaggatgaggaagcgctacgagaggagaggacgaggaataccttggattcgattcgacacgagacgcaggtcggtggaagaggccaggtgcagctagcccctcctcgcccgccgccctccgcgagagtagagtagggctcactcacaggggagggcggggactcggggaggagaggagccccgccccgtccacgccgcccgcgcgcacggtcggtccggcctgctcgccggcaaggaggcgaagcggcggaggggaggagtccggcggcggcggcggcggcgggcaggggcagtagctgcagcagtaggagacggagagaggagagagagaaatagcccaacaaggcaaaaaaaatcggttggttacacgtgtgcgtgtcagaacactcagcagaacacacgagggagtaccgtacgatacagaaaggcttgaacacagtcgaatctaggattcggatcctctgcattagagaagctaacagcaagtttaatagtatagcctattattagctccaattaatctataaccaatctaatagctaatttatacaataattgtttactatactattaatattggtcccacctgatatacatacattgtgtcttggagtctgtgctgtagctggctatagatctgtagcccgctgctcttctctctcatcgtttatcttattaaaatatgtttatagctggctattgtatctactctaatgcagagggtggcattagctcctatcctatccatccatccaatggttgcggctagttctccattagataaagcaaaaaaattaaatgggccttagagcaagtttaatagcatagccaactactagctccaattcatatatagccaatctaatagctcattcatacaatagttacatattacactattaatacctggtcccacctatcatacacacataacgtcttggagtctatgttacagcttgctacaaatctgtagcccgctgctcttcctctcctcatttatttccttaaaatatatttgcagctgtcttatagcctgctattgtacctgctcttagaggaagagcagcagacccatgttaattttagacgctaaaacagagcgtgactcctccttttccctccaatttcttcaaacttgcctcatatgagtcttttcatttctctctcacatgccatacctctttcaatttctctcaacactgaagtggatttagcaaactatattctgttcattattggtatgcacttattgctacattattgtgcagaatgattccagtgcaggaaatctatttggtggaaagcagtgacatcggagaggtggattttatgctgctctgcatattttggtttatggattataatattattttcttcctccctaaaatacattttgtacttaatcagggtatactgttatttccctatgtgaaatgccctttgtacttactccctcaatcaaccttgttatttttttttgagaaacacagtacaaatatagacgctcacaacatgcacacacccacttctatgaacgcacacacgcaaaccctaccagtagttattatgaagctttactttggtttgtgacacaagtcagtgcttcaaacatgcaagaaccatgaacattcagacttgtagccatctcttccctgtcaaaatatatgaacagcataaataagaaagaggttcactaatcacagccgttggatagagatggatggacaggattggagctaatgccacactcttcattaacttctctaatgcagaggatccgaatcctcaaatctagattccagggttcacgtttcggaccaaaaccggtgaatgggtgtggattaacctgtgacgtggattcagatatactctttgttctaaaaaaaacaaatcctgaaaataaatctggacatagccctacgatttaattttttataggacagatggagtagtcgtgttggcgcaccacgcactagaactcagcggccctacggcatatttgcgaatgaaaaataacctatgaataaaatttttatgtacgtgttcttagcgatataaaaacaaaagttgaaaaataaacatcgatgaaaaaactccaaaatcaacctcaaatttaatgttaaaaatttaaattttaactgataaacataagcataagcgaaaagatgaagccgcttcagtgtgaccttctccctctacgttgataatgccagatgatgatggctgtcttctttgactgttaccatacaaatcaccactgatatcaacttccctagtcaaaacagaagtaaaatgaacacttacaacaagtaaaagtccatttataagacaaacccacccggcagcaaggataaacttttctcaagcctgtgcatgcaaccatgataaacttttctcctaatactctcaacatatcaacaactaggatgatatcaccatatcagcctttcaggttttttttggttcgaaacagggataaactaaccatggtcagtttcttgttgcttggaacagtcagagcagcagcattgcatcatgtggctgaccattatgacagctgtgcaatattggtgtccaacagtacaagctaagtagatccttcaagtaaaaaagaacatgatacattgccatgaacattatcaagtacatcaagcttataatccccaggggagcacctgaagtttacagcagcatgtgcaagtggcacatatcaggtgccagcatatagagacctcacactgctacacgccatataaaagattgtggaaaacacattcagtaatctctgctcccccaattgaaatgcctcagatgatctatcagataggagtatcatataaaccagcagttgaagtaccatacatgcatttgaggagcacacaactgattaacaaaagcattcatatacatgctcagagtcagtcttataacatgtctaccaatcccgacaggactattattggcaagaggctgaaatgttactagaaaatggtcgtcatggcagcatattacacagcaagatgtaaatactctctttgtttcaatattgaagtccaatcatcttgctggcctttctcaaataatgcaaccatctagcagcaagccagcaacaagagagaatgaattagtccctactataaaaatattaagatatgaattaaaaggatggatccatctaccactatgtgtatgcactaggaagtcaagctctgtaaaaagtgtttgttaccaggtttaactatatccttttttggtgtttgttctggggggaggggggggggttagaattgaattgaactaagtatttaaagaataactcttctaataaaaggtaagggtatttcgctatacataagatacatgataggtgcaagataaatgctagtaataaagatggtttctcaagcatttaaacaatagctcttctaaaataaagttgagtactttgctgtacataacatgcatgataggtgaaaatgattaatatggttccgtaaattttcattgtcaaactgaaactcaaaacgtaacaatagtacaagtccctacacttaaaaagaaatatagcagatctacacgtatttttatctgatatgaattacagttcggcattcaagtggtagtgtttcaacttttcaacagccaaccaaggtaactactactcagttcattacttgctagaatcacgaacagatgtacctgtcaaatagaagcttgaatggggataaacccaatgcaacctctccatagggagcaccagcttgaactccatagtatcaagctggagcatgatgacgccatttggcgtctgtagaaatgccacactaccatcctcagtaaaaccaagtagcccagaccacgctatcaatcgatcaaaaagcgcctccaattgccgcaatggtggatgaggaggaggaatgaacatgcacagtttaattctcttcctcatcacccaactggcagtgctatccgagtcactcttgcgcacccacagcttgaggtacaaaaatttcactgcgccgaagccaagcttgctaccaccctcagccagcataatctgcagactccaattcggagccggaaaatacataagatctgggccagaaaccacattcacagccaagctcttggcatccatgttgaactcaaggatgcagttctccacgagcagccagtagagaacattcccaacaagaacaggaggcttcatgtcaatggcagaaatcttttcccccgagatgg

SEQ ID NO: 10507 - DNA, 2035 bp, Oryza sativa
gatggaaactaacagcacaaacactaccaagtataaatttgctgcatagtggacaagagacatcacaagcacctggaagaccaagcctagagacaactcgaggtttctccggaggcaagcaaccctgaaagaataaagtaaaatgtacagttgtacacaaataaattacactgcttgataaatttatggaaaacatataaaatgtatgaagaacaatggcttctgcttgttaactatgaagtacaatcaactgcaatctgagactagtgcaaatgatagtttggagtatttaactctttatgatgctatgacatgaaaacaggttagaccgttagatataaccattcaacacttccttcaaaaagagtcctacaaaatagtttgatgctttgtcatgtaaaatcaacagttgttgactcccagagacatctaaagtaaatgatgttacacagcctaaaaaaagaaagaaagaagtagatgatgtgacattgaagttgtgctatagtaatattgcttagtatggctcgtgtcagcatggaagttcataaaggttagtgctgcattattacttttgcctgacttcacttttgcaggttaacatattcatggtctttttacatgtaaaatgcttccttaacaaatgatcagaaaatgcaagataggcgtagggacagcagctttgcacaaataccatccaagattgacgaataaaaagattccaccaaccttcggtacataaaaataacagattgcatgtcaacaatacattaagggcattatagaatcaaatgtgttacagtgattactgggtaaagaatagtattctcaccactgcagcatcgagtatactgcaacgttcttcaggactgtctccaaagcccaaccctcctatccaaaaacctgcataaaactttgcacaaaagttcagtggatggaacatataatggtttatctgagtaatttaaatttgaagtatcatacagagtcacatttactgaatcgacaatggtgcaaagctgagcaaatgttatactccatccttgtcgtaagaaacaagtaaaaaggaagtataactactgaaagttaatggtgttgagtggtaaatgaaaataacctgacacattcctctttgacacttcagtggcacatagcttccgtagttctatactagatccacccacaactacacctaaagtatttgcaccagaatcctgcatggatcagtcccacaaaactaaaacattttcagtaatgtaaagcaactgcatgagcttgatgatgatattttattaacacatgtaaaaaagaacatgtgtatgataaagacatcagattaagtaatattacagagaatttacattttatttcttattcctgtagttttgtgacaagatacttgcactagaggccttcaagcatgtagcagcatctcaattaattacattagtacttaggttctctaaacttaaaattagtctgagaagtttcacttttgacataactcaaaaggaagtcataaaatctaaacagacatatggctaaaattcaggaagaaacactaaacacttcagctgaatatagattaactcatacctcatccaaagcaatacatgcatcaagccagcgtaatgtgcgctcaacagagactttatttcgtttctcagtaacccaagctggaacctcatctgccaaacttgcccacaaattaggcttcatgcaggaaatcaattccatataatctgatggtttaaccttaaaaaaattgaaggaagttgattagttgtacataaaaagactctaaacatgcatccacaaaatttggagaaagaaattactagagctaccaaccagtcttcggccagctggtgtctcaaaggaagcaccaaatttattgcttgcttcacttgttggtaaactctcaatagaatcaccagctgcggctatgaggatatgatcaggaagacccaacatatgatgcaaaccaccaatatttgatattgtttttgatggagggccttccatactgaaaaaacaa

SEQ ID NO: 10508 - DNA, 6612 bp, Oryza sativa
cataatcgttatgcaattttcaaaagcgtgatgccaacaaaagagagataacataattaataaagaaaattcagcaggtctacatacatagatataaactggtgctccgacggatgcagatcttgtcgatgaacaacagcaaccacccattctataattgttgaaagttacttcagtctatcctctagcagctgatatcactaaaatttcatctctcaaagacctacacaaaaacagtcttatattggtgcaggaaaaacaaaagtacatcatgcttagaagataaagtatacataaaacgagatgacaaaaaagcaccaatcagtacacatgtataaaactgtgcagagagcttagcaagtgttgttcccatgtggaattatagttaacgattggttataatgatgatgatgaactgatgatttttgatatctcgctctatcaaaaatatagtacttcaattttgacaactccacttaccgcataacatcaaaacctgaaaatcagaccaggaaacaggaattcatctcactagagtgtgtactacagaaattgaccagagggtacattcaggaaccacaacatcacatgctgagttccaccacccaagcaagatgacacaaaagatcatcctctatagattatagaaatgtattatgttttgtcctgtctaatttgttttaccacaaaagggtaaataacagagccagcagcccagcacatgaggataaaaaaatgtacatactatacagggtaccagcacatgagcccagcatatggcatactcatattgtgaataacaaagtgggataaattgacagatttaaaattatacagggtaccagggaggggttcagggccaaagctttaaagccttgaacaaggaaaccactttctattggacaagatattgtctggaatttgaggaagcctgagaaactcatatggagtaccatcttaaagtagtgaaatttgtcacatatagcatttagtgtcttaaagtagtgaaatttgctctgattacactgctatcgctgcaatcaattatgtgaaggaactaaaatggcttagcactagaatgaataccatgatgaatctagtccctctgtttcaaggtttcgcatagcaaaaaaaaaactagtactcagcatcagcttccctggcaactataatcatctgactgatagaaataaaaatgtggcaaggcaatgaaaatttcctgtttcctagcaaaagaaatccttttccttgttagcagtatctagaaaataaatcctgcaggcagcaagaacatccaattcgataatgataaccttggcattttacttgcatccatcttcatagactgtcatacaagttacaaaaccaaaatacgtcctatctctagataccaaaaaatcagaacacactgagaataccacagcacacatcagtgaagaacaaaaatgcagatcgaaagcaaaaacagtgcaattcgtcgttacagcgggaagctgcactgaatcaaccgagttgatccgatctttcaacacaattcgaccgcagaaagcaatctatgtataccagtggcaaagaacgcaaacaaacttgatctgatcgcgcgagccgtggtccgttcaactaggaagcaatcacaattcacaattaagagttaaaaacaaaaattacaaacttactcaccaagaatattcatagcgcttggattgaagggagcaaaaactagaattagtagtagtagtagtagcagcagcagcagtagtaggagattcacacggaaacaaaaggaagaggagaagcgggccaccataccagcgaagaagagctcggcagctgagcgagcgagctaggttggcgaacaaaccccctccgcctccctcctccgaactgcgctgcttcacctaaagagaagagaaagacaagatcgcgtgagaagacgacacaagtcagggagaaaaattcccccacgcgagacgaactccaaagacagacgccacccgcccgccccgtggatcgaacagaaggcggccgaggggaaagggtgatatcagtagtactccgtactactcggtagtagtggtccgtacccgaggacggcggcggcggcggcggaggaggaggagaagctgagccggcggcggcggcgagcggtggcgtgggggagtggaggagacagagaggaggaggatagttttgtgcactttcccctccccaaaatccgggggttgtgggccccgatatgaggaatgcaaatcggaagattcatttaagcccattcttttcttatatatatttctcttttttccttgattttcgttagcacgattttcaaaactatactcccttcatttcaaattgatctacatattttataggtatatcaagaccaagaaaaactaataactctttcatactgtatgtactatagcaacaaactcgatgcatgcatcatccccactattttctagccaatagcaaatcaaaatattgcatgtaggttataaatacttgtgtgcatggatgcatgcatcaatgtccatttactccaatgcacaaataatgaatagccttagggcccctttgaatcaaatgatttatgtaggaatttcatatgattcaaatcttataggaaattttcttatttggccctttgattcaaaggattgaagcttttaaaattgtatgaaattcctatggaatagcacattgcatgtggattttggagaaaatttagcaagagctccaatctcttggaaaatttccttttgagtctatctctctcatccgattcctgcgtttttcctgcgctctaatcaaacgaccattcgtacgtgaagaggaaaaaatactttaaaaacacgtaagcgaagtcgaactcctcacggaggataacaaaccaaaccagttgaataaaagttatatataaattaattatatactataatttaaattccaaaaacttatggcaattgttagatagtctgttctaaaactacaatttctacatacctttatttgtctttcaaattttatttattaacttaacagtaatgtataaaatatgtaacttatacctataaacaggtatatcatccacttccaatatcctaaaatataataatatgtagcattcaaaatctatcccaaaatcacttccaatatcctaaaatataataatatgtggcattcaaaatctatcccaaaatatgaaatttttttcacgtatgttctcttctcagcaattacaacctttccctactttgagttcttatattttgaatggatttggaaggagggtagtataagtttttatccatatttcagcttaaaaaaaacatggcgacgacttcgaatagggaactggaattgcatttaatttatctattgcatgaaattaatgaaacttgttactactttttatatacttatcctactttactgcatttacactttttattttactttgcagtaaaattgattgaatttaaggattcacaagctcatgtgtcagtgaattaaaatgatcacatgtgtccgaaacacaccgggataaatcctcattagttttatctaaatggttcttcatccttccataaaaactagacttattctatattttggttttccaaataaattagtcatatttgtttttcgtgtatctaagacttaatcggaacccttaagtcattttaatactcattggttgcatgtatgtatatttttattttctttgtgtacatgtaagatgaattattctctttgggtgtatttggtttggagacaaagtgggataggttagacctatcctagttttgtgggatgggatgattccagttgtctgtttgttttttggtatgggatgattatagttttctgtttggtagaaaggattgaggtgtgatgggatggacggatttgtactcaccgttagtgccgtctgggggcggaggagctcggcagcacccggatctgagaggagcggacggcgctcgtggagatggcgccgctcgcggacgagcggcggcggtagtcgcagatgaggcaggggtggtggtagtcacggaggcaaggcggcggcgctcgtggatacgcggcagagctcgccgaagtggtggcactcgcggacgagcggtggtggcagtcgcagatgaggcagaggaggtagcggtcgcggaggctctcagatctgagaggagcggcggtagtgctcacggaggtggcggcgctcgcggaggcttccggatctgagaggagcgatggcggtgctcgcggaggtggtgctcgtggaggcggcggcactctcggacgcgtggcggagcttgcggaggtggcggatggcgaggtgacgccgttcgctggtcccaggtgggacgagttcatccgccatatttttgcggatcggttgatcccgaatataagaggaatattcctcttcagggaccaacccatcccactcacccctaaaccaaacacctctaaaagttggttcaccacatcctatccttgcaattaaacgctacctttgatggttataaaagtgatgtgtctgactcttgaggatggagcaagtattatactatcgtagcacgggcactacccatcatgcacgcacacaatcacatgattcacatggcatatctatgcatcacacgcccaatagacacaggtacaaaataacaatgttataaatcaaacggaaattctctaatattgtcaagaaaaaaaacatccaaattcaaaatcctgttacaaagttgtgccaaaaatatcatatcagaggtaaattgtcgccaattttccaatgcatgactcactagcgtgcggacaatttttatttatttttttagacctttttatgttttaattttattaatagaccattccaaaaaatatttctaaatctaaactttttggaggcgtgacctttggaggcgtgaccaaataactctgtcacaccgcgtgtagcaggcatgacagttttgttctgccacgctaggccaaataacgctgtcacaccaacatgagtgatgcgacagtattgttttgctacgccagtttgactgacgtgtccaaaaggttcagatcttgaaaataaattttggttgggtttatttttaaaattaaaaaagttcaaaaaataaaaaaaatacgtgcaaacatataccacatttttcctcaatcgacaagggagagatctgaaacttgacaagcaagatttttttttaaaaaaaaattctttaactgtcacgctgcgcctgctgcgaatggcgtggtaatgttatttaccatacttagagggctaaaaggttcagattttggaaataagttttaaaagagtttattttaaaaattaaaaaacaatgaagttcaaaaaataataaaaattcgacaagttgagtcaagacttcctaccaaaacagctataataacatgaacagttagcacacaaactgactaatgaacccgaaaatttctgaaaattcatccaaaggcaagttaataattcagccatctagcactatctatttgttcctttcttctttctttccagggatttgcaaaaagttgttcagtcacttggattttcgaagagagggattgtggatttgaatgaatctaacttgcagctttctcaatttagtttgatgcaagcctcaagaggtctaacagtgtacatctagggagaagttaatccttgttagatcacagcagctgcaagataagcacgcctgtcctgaacaaactgctgccgaaagcgatcaaactgtccggttttgatcgtgtctcgtatcaaccggaaaaagcaaaggtaatgatgtgtattgtgtctgcaaattttgcaaaagcaaacaaatgtcacactcataattttataaacctactaaaatgcgtcattgaacttctgacatgacttacatctccagtagaatctgagccagcatctcatggacattgagcaaatgattaaggtaagcacgagtgtggttctggcatgtgaaacagctacagctatcaactatccttgacgtgtctttcctgaaaaaaaggaacatatgtccaaaaaaaaatatattctagatgttaaaaatgcttcaacatctgtgaagaaatgataactctaagtgcctaattgtcaagcccaaaatctcaactcaaccacagatgggccattgaatcaaacttaaaatagttgccgatcccatggatgggccaggggttcgggcttcccaagcaggcctatgttgcctaattgggctgatggattcacatcaacagtggtggttaatatttagtgtacatagaagtcagtgcttccacttttcatgtgcaattcaattttagttgattttgctagattcccaattcaaattcagaattgattgtatgacaaaatttaaacaaaatatccgaggagcatttcttccgcaaacaacaacaatacagttcaaacttatgactaataaaaaagtttgtatgcccaatatataactaaaatgatttcttgaaagtatttaactgcatccttactaattagtgtgcataataaaatgtattttatgcaatttctatagagcatgggacctaccgatatgtcgttgcacgcgggctgcagga

SEQ ID NO: 10509 - DNA, 2185 bp, Oryza sativa
tattatgtcagacagtaaatacattaacatcaccattgtggtgagtttattaacagaagcaatcattcagaaaagaaatgaacaatagaagaacaattgattttggctgggatacttcagacaacagtcactggatgaaaggaagtagatttaagcatcctaaattccaaatgcgtcgatttgaattatcagctactactgggatgaaaataattagatttaggcatccaaactcatcaattttaagtatttacattgttttatgggtttcggttggtagtttacaaatgcttgtatctcaggatgagaaaatactcactcaaaagatcgtaactttgataccatagcaacataagttacacactctggaatacatgagctaaagtagattgttctaccactggcttatgcagaagacgatgaactatctgcatcatagaaacttgcgatcggatacacggcatatataggacgggagtcgggggagtccaagaactcgtccattttgcaaagctccttgaaccgcaatgactcaagattgaccatgaagatcctggtggacgacgcgacgaacagctcattgtaatcctgcgaaaaccccagcaccttggtcggattgacacactcccccgcgctcagatgaagaagattgtcgaggtagatcggttcgagcggcagccacccggggaggccgtcgaaatcgatcatccactgccatatctgcatgcaggatcttgacatgacaatgagcccaagctctgtcccctcttggagagtaatcgggtagaggccatcatgatcttcatggatatgcgtcggcacatacaccacggagaggctgtggttcaccaaattgaactcgaggatgttgttgtcgtagccgaagagcatccagtagaggaaatccccaatctggatgcatctgcacccaagcgagatgcaattccccactggggtttcggcagcatggtctccccaatctccggtctccgacgagtagacgaaggcgaaggcggtggacctgtcggtgccgacgaggaccaccttgaaggggttggacttgcagttgtcgccgtggacgtggtcaccggcggcggtggtggcggcgcagatcaccgtggcctggaagaagaccccctttagggcatcgagctgcggcgggggggagaggtggatgaggtcgccggagacggggtcccagatgaggatctggcggcagccgaggccgctcttccagttgaggaggaggaggcggccatggcggcagccgtggtagtaccagttgccgccgagctcggtgtcgtcgtggaggcggatggagaagcgctcgggcgggacgcggtcgggggcgtcgagggtggcgcggaagaggggctcccggccgcgcgggttgacgaagaagccgagcagcggcggctcgccgtggtgggcgcggtagcggcggaggaaccccggctcggcggcgatgcggcgccaccgcctgcagactgcgccggcgcggatgagctgggtcggcagcggcgggacgcggaggaggatctcgcggagcacgtcgtcgctcagcggcatctcgtccatctccggcggcatctcgtccgtctccggcggcggcggcggcggcggcggcgtggtgtggcttatcatctcggcggcgcggctaatcttgaccgttggatttggcgagtgtacggaaacaaagtaatctgtggagaggctgtactaggaattggttttatttatagcgatcggacggctcagagaccgccacggagtcgggttggaaacggtaattatgtctgacacgaactcggattaaaaactggattagaattagtaattggcctattgggctttcagcccaccgcccccatctgggccggctcacgaaggaaggagaggaacgagaccgacgcggatgacacatgcggccatacggacaagaggtacgtgaggtaaaatagcgtcatggtttgaaagtgtatctcttgttcttctcttcccatttttttctaattattattatcttcatttacacttttataaatatatgctttgtgatttgttgcattcgtacacatccgaaaatgcttcgtttaagacgtccggacgagctcaaaatatcggacgcttattctaatccaatggcctgttcactttaatgtcattttcaaccatattatttttt

SEQ ID NO: 10510 - DNA, 3055 bp, Oryza sativa
ttggcccacaacgccccacagccgcccgcgcgccgccgccaagacctggccgtcgcgcgggccctatccagacaaggggcgaccagattcagccacaaaggtgccggatccaccgcctccccgagccgccccgccgtcttcacctccggccgtggttgtgggcgtcgtcggcttaactctgtcctcctcgcgccaaggaagaagtcgcctaagtggagggcctcgccgccgccttcccggctcaccactgacgagctccggcagcggcgaggtggagagaggggcggggctgtggtggtgtgggcggcatctttgagtttcactctgctagtagtaattgggggaaaaaaggagggtccaggatggataaaaaaattgagtttcactctgctagtagtatacaagcttctgatcggcatctttgatgcaagaactagccaaacagatctaatccaagaactcgttgaacagatctcaccttgttgtttattgacaacaaattcttgtaacataatactagtgaacaacagtagagaaaacctagacagacgaactagctagtatatatgaatacagttaatttctctcttgagaaacgctcaccagtggccggctggtgtggaggcggcgtcgatggcgtaggaggagacggacactggcaccggcggagggaggggggaggcgactggcgtagtcaaccgagcattactattccacacaagggaggtgaatttatccagatatttgatggaccttgtactacttttctagctagtgacatgcaatgcaaggcaccacgcatagaaaatccaaattaacagtcaccggagcagtaattgacaagtgacactgcctcaagcactcaaatgttctcggaagataacaaaagcaaaaatatatataaaaaaaactttaacacgatactaacccaggagaaaaaagtggaccaagtcatcactgtctaataatccctatgggcactgcataaaccgctgactctcaacaagaatgagaaaaatagccaaaacaatcttagttaattcctacaagtccactccgtagaatgtctatattttgatccacatgaaccagcatatcgccgctcagcaggcagcagcaaaagttacattagcatcacacttgtgttgagtttataacgaaaattctcagtgttgtatcctttcagtttataacaagaactcatgtagcaaagcagtcatttgaaaagaagtgaacaataatatacttcctctgtcccacaatacttatctttctagcatttaaatattgtcccaaaatagttgtcactttggagtactacttgttacatcaaccactttcaattcaaatttcttcccattctacaaccaaccaccctcctacatccaactatacattatttattaaaggatattatagtatttttctcctaacattagtacatgctaaacaacctagaacgacaaatattatgggacggaggaagtaagaacagttaattcctaatgatattatagtatttttctcctaacattagtacatgctaaacaacctaaaatgacaaatattataggacggaggaagtaagaacagttaattcctgatgatattatagtatttttctcctaatattagtacatgctaaacaacctaaacgacaaatattatgggacggaggaagtaagaacagttaattcctaatgggacacttcagacaacaataaatggatgaaaggaagcagatttaagcatccaaatgcatcgattttgagttaggaactgttattggatgaaggaattagaattaagcatccaaacgcatcaattttgagttaccgacttggcatggtgttaaatagtagagatagagaaatgcacattgtattgaaactcgggggccagtatatataggagatacatggggtagagataagaaaagattacagatatgaaagaagtccacacaaatcaaccatatcctaacatatactctaacttcccctgcagtccaagcgtaaacagcgcggaggcttagactaaagaaaaactagcaaaagtgctcaacatggatgatagcccttttatgccgtaatcgatgtagccaaatcaaaggacgcgagggagccgtggtctcgatgaagccatgcatagaatacccatggtcgatgtagccgaagttattagatttagccatccaaacatagtcagcttatgagttactaacttgcctttacaatgtttcatgggttccttgctactttacaaacttctgtatctcaggatgagaaaatatattcattataaagctcccccccccctttctctatcgctggcacgtactagacgatcgtgatcaaataagtctttggatcgggatgatataataaactaagtttagagatctcgatgaacaatttactatttacaagctcaaacctacttacggactgttgatgcgatttactcatttttgaattatagaattgcacagattgacacttcagattaatgcatcgggatctaaacaaccactgtcactgtccagaaaagaacacgttcacttcatatcaacacacacgttaccctttatgaaacggcactcccactgaagaaaaaggcctctgaagaaaacagcaaaaaggctccatcttaaacaagtcgcttcataagagtatacgaacaagggctaattaaagaaaaagtgtgctatccccagtattgagtatttgccatgatggagatataccatcgtaaacgtcgactttagagcttgtggataggagcaataagcaagcaagtaggatcaacagaacaaaaattaacgatactaaccagccgtaattaaaaagcagatgctattgtattaattaatggaatcagccactctaacaatccctactggcattacatgaacgacactctcaacaggaatcaatgagcaaagcagccaaaacatattgttaagtcctacaagtctactctttagaatgtctaaactttgatacacatgaaccagcgtcatatgccatagcaggagtattttggaagcagtttc

SEQ ID NO: 10511 - DNA, 4521 bp, Oryza sativa
cgtctgtttcatgggaagggtaatatactctaaaagttgatctaattaattaattaaactccgaattgcctcttgatcaagacagtaacatactattaattcttacctgctttctgcctttgaatgcagaagctctgaacacataatttgtgctgttaattttatatttgaaacgaattcacatgaattgctggtttctgtctattagagcatgtgttgggcgacgcatttgcggggacgtgaagtgtgatgttacatatgtagtggtgtatgatatatatgtgtctgccttgtgataaaaaaaagaaatgcccatgaatatatgaagctgcatgtacatatatatacatcctactagaaagaaaaaaaaataccatagtcttttctttgatatatatgaaagcatttacttgtgtttcttgttaatattgttccctcgctacatttacttgtgtttcttgttcaagctaggagaaaaccaagccatcagtgcacgcataagtaatatatcgatcaggcagagtcaggaacatatatgcatatcttcttcgcttaattgcatcgagacaaacattgtcatacttcttgggctgttgtagtagcaagaacagtgctgtcgatcaccaggatagctgcagcttcgcatggctgctttaagcaaaaacaaaaggtgcttttacctggcgtgtttggagatttggcgctagcaaaaaatgctcatgttcttcttacatgcatatatcttggtcaatttgtgtctgccatagtcttaaaaaaagtttatatttttcagtgcacgcaatcaattaattaagcaggcattttctaatgcaaaataaaggtttgtgcttttttttcttcaacaggagggctcggctaattaggaaattaaaaccgtcgatccctgtttttataagatgccacataggttaaaccgatcacatgacaataaaatatatgaagagataaaggttacaatgggttttataccggtatacacacttacctatgtcttggacaaaattaaaactcacaatttagcaacactatagctagtatatgaaacccaatgctctagagcgtacattgtttaattcatcaactcaaacctctctagacaacgcggcactctttaaaactgtggaattaaactccccataaaaaatgaccttatgttcaactcaccccgaaattattaataggcttatttcgaaatgagagtattacactttgaattcccaaagccattaaaattttcatgctatgcaaaagctttataataagccaaaagaaatttcagaaaaaaaacatttatttcgcaagctgtgtcattgtcatcatgcactagcttgcaccatatgagagacctaccaacaatcttggccgtaagtaaccgggctctgatcacgagaagacagcgtctccagtggcgtcactccatctccagtgagtcatcagcagccaggggcaaatcgggaaacacacgtgcagccaggggcattttcggaaacccccgagcattttaaggcagcaaagagagcattgcatgcatagtgtgagcagcagcttcatcacaccgagctcgcaaaaaacacaatcaatcgatccccaattcgatccccatgggcgccgcgatcagctgctgtggctgtcctcctcgccgccgtgcaggcgcggccgacgacgcggcggcgggactcaccgacgacatcctcgccgagatcttcctccggctgccgccgcacccggcctgcctccgccgcgtctccctcgtcagccgccggtccgccgcgtggtcaccagccgccgcttcctccgccggttcagcgacctccacggcggcgcgccgggggctcccctcgtcggcttcttcagcaaccacaaccatggcccctgggcggacacccgcttcatccctgtcggcgtcgacggcaccggggacagccgtcggagccgctgccgcagccgccgcgccaccgcggcgcgtaatcccggcggggtgctcgccctgggcgacgacgccgagtggcacgtcatcggctgccgcggcgggcgcgtcctcctcctcagccccacgcggctccgcctcctggtgctggagcccatgctcggccgccgccagtacatcccggcgccgccggcgccggagtacaggccggcatacttcagcaacgccgccgtggtctccgccgcggggggccacgacgagctccgcctccggccgcacctgttccgcgtggtgttcgtctcgagcaacgccgccaccaagcgctccaccgccttcgtctacaactcggcgacgttccggtggaccaaggcggcggcgacagagatgtcgtcggtgatcgacggccggccgagcgtcctgatcggccagaccctctactggcacctcatctcgcacggcctcgtcgcgttcaacctggagacgcacgagctgcacgagatcctggtgccggccgacgcgttcgacgacgtgcacgatgccaacctgagcatcgtcgtccccaggagcggcggcggcggagtcggcctcgccgcggtgtccgggtacatcctccagctctggacgctgcgcgactacacccacggcgcgtccacctgggacctgcgcaacatcgtggtgctggacgcgctgctccccctgcgcaacgctcggctgccgccgccgccgcagctgccggcgtcggcgaagccgatgcctctggtgtggttgatggcgctggacgaggatgagaacgtggggtacgtgtggaccgcggctggggtgttcgctgttcagcttgacaccatgaattaccacaaggtgcttggacctgtttgtagggggatgcaattcgtttttccctacaaaagcttctttctccctcaaggtacataacatatatactcctgatcatagctttacttaattttgggcactaaattttgaaaagttcaatgaacctaaattatgctcttggttgaaaataattgttgttttgaacttggctgatatataccaaactttaaaaaatttgactataaatcaattaattatgagttacgacacgctgataattcactagtcagaattaatgatcaacccgtactacgtataaacaggacatacattgtaacaattgtttgtttttataaaaaatcttctccttttgtaattgttagttacatatgtgcaaatcttggtcatataaggacttattagttggaatttgacatgaaaatttctgtttgataaactcaatgaacctaaaccatgtgttcttatttgtaccttattaaatacggatggcgctgcaaagtatttttgcaaatgcttatcgtttgttattggaaacagtaacattcaatattaattctcacgcatgtgcttacactgtttttgtttttaagcagactatatattgacgaaaagtttaattaactgtgtgttttgtgcttttccacatttacttatagtctattatcactttcttaactctaactgcaagtttttgttttggtttgttatcatggttttccattattataggtgtaaatatatatatattaatgaaacatatttcagagcatatctaaatttttcaggtggaagtgcagccatgattatgtaattctactccttcctgggaaaagtaagttgatttatccaactgcatgaacataagatcgagataactaattagtgtttaataatattttgacagaaaatgacaatatatatgcatttgtatatcttgcttgaaaaataataagtttataatattctaacttagtttctttttcaactgcatttagaaagaacagtaggatagtagctcaatatgcattttgaaatagtatatggttgtccatattccacacttcatctttctttttgtgactgaagggagtagcacgttttcaccatgctctttggacagatataattaattcaaacagataagtacaatataaatgaaggctgtatgttgtgtttttacatattacaaatttctgtaatccatagtgcctatgttggatttataaaaggtgaaccacctgaatcctaaagcaatgttttgctagtagtaggttttcatggtttaaaattaggctcttgatgcagtcccaaaatacaattgtgtttatgaaaacaaatgtaagacttggatcggaaaatctatatctatgcaaaattgcatcggaaaatctgctatatctagctagtttgttactataggcacaaaagatatgatataaaagttatactactgcgtacatatgatcgatattgatggtacaccatacaacccatttatatccacgccattgtgtttgattatttttttcctgtttatgttttgttcttcatgtctgttgtatttgatctatatatgtatatatgtatatatatatatgtatatatatatatgtgtgtgtatatatacatatatacatatatgtatatgtatatatgtatatatatatatatgtgtatatatgtgtatatatatatatatatatatataatatatatat

SEQ ID NO: 10512 - DNA, 5720 bp, Oryza sativa
  unsure (1)..(5720): unsure at all n locations
ggggggagggggtttcactgtgttttattttcccaaaaaaaaaatattttctttctttttgagaggaaaaaaaatattttccgaaaaaaaattaccgttcgcgcgcgcggggtcagtctgtcgtgtggattaggaaagcgcgggagaaacgtccgttgcgcgcgggctttttgtttgtttggcccatttggcttgtgggccttctcttcacacggcttgttaggctgtttggtttggaagcaaaatttaacctactttggtatacctctgtgtttaaatatagagtaattttttttatcaaaatatcctataaaattatagatttaaggtattttctcataaaactataaatttaacaccaaatttatcaaaaaactatagatttgtgactaagtatcacaaaactacatactatatatttaatattgaagttatcacaaaattacagattttagagtttataaatccttagcagtactgcttatgttgaaactttaatattgtacttttatggttaaattgtgactaatgttttgtgataaatttggtactaaaaatatatttttgtgatactacatcttaaacatttagctttgggataaatttatttgctaaatttgtagctttgggatacactgatttaaatctatagttttgcgatagtttgatatagttatatgtggttgtgtaaaatttaatctcaaatatatttttattactaattttctattgcaatatagtgatactctatctaacacaattataatattgtaaaattacatgtaaactatactttttttttttgcaaaatttgctctagtacctaagtttgtgacattttgacatttggtataagagtctctaaggctatgttatttggagtagttggaacccttctccctgctaacaaaacggcatggcagcaacgcatgattaatttaagtattagcttaaaaactttaaaaatagactaatattatttttttaaagcagctttcctatataaaatattaaataattgcagcgtttaatagtttaagaagcatgcgtgaaaaaaagggagtaaaagttgggaaaagaaaacaagcgagcagaagtacggagaatgcagtacagaacacaccataattttgtgactttgttataacacactctagatagagttatatgataattttctaaaaaaaacactgtcaattatttaaagagaaaatcaaacaaattccattggcaagcccctaattccaaggaataccatcggtaagtgcgagttacatgaaatgtcatcgtacacctgactttgtcccataaataccatcgctgttagagcacttaacggaggatgctaacaaaaccttaagggtaatggtatttttgagacaaatttgtttgtgggatgacatttcatggaactcgtacttatcgatgatattttttaaaaaaattgcgtacttcttgtcaatggcatttcttatatttttattttgatatactcggttacaatggagagattaaactttacaaaagaccattttaaccttgagagactttgcaagattgaaatgtgtagctaaatttagctatatttttcaagaatgaacctgtcctaagctgtggaaatgagaattgctaaaatattgtttttttcccaaaaagttgaacaaatattttttaaaaaatatatttaaattgaatctaattgtatttttcaaaattcaaaactcgtcctaaaccatggaaatgataattgccaaaatattttaaaaaattacataattatagccctgggaggctatgattagagaaaaagaaaagcacaacaccacacgtggcaactcctgtatacaaactcgagaatataattaacaccagccggccggtcaccgctgcctatatatgcatgaccggtatccgccaacccttcaaaaggagaacaaacacattgccctgctcttctccaaacacatttccaagcactattgcaaaataaattgattgacggggagaaagctgtcaaacattgcaaccccatttcatctcaccatccgatctctgccaacatgtgtagcccgatgcatgcccatccatcatcccgccaccacctgactggctgactccaagactaaatacagtggccttctgctccacaaccgccaccacgtcgacacctctttaccagcacctcacctctgcacaccgtcatctcgcaaacgacccaccatagccttgttgatgtaccagtcaccagggctagatcggacccctaagcatctacacttgtcatggatctcctcggagaagtaggggaccgaatagagtggactcgaccgtcgtcgccattcgcaccgtccacgtgtcatttgggcctttgtgtgtgccttgacctcgttggccatttgtcggagcatgctactgtccgggagcagatgtccctagccactccctcgctacatcccgacgtcccgccatccatgcctcgttgcagcccagtactgtccgtctactagccaccaaccgctcgagccagctaccatcgctgttgcttgccagttcggtgtgctggttcggactcctctacccccgtcgatcactggcatccttaccggatctggccgaatggcccagttctaggcagagatcttagagggagggataaagagccctgctcccaatgtccctggagttgtccaacttccaacgtccacttcggcggcgatgacncgagggagaggatgcaggaaggttgtgtggtggtgagttagtcgtgttcgcgcgtgtagcctctggagtgggagcgacatctagcattacctatgtttgttttggctgtggaaagatggctgagcatatagatctcaccgttttcgtaaactgaaccaaccgctcttagattttaatttttaaaactttaattttagagtactttgaatgtagttttttaagcgttaaggatatgcatataaaagttttaccagtaaatgattatttttattattaataaattcttttggtttataattagctctcttaaacaaccgacgatggagctacgattatagaactcgatcagatacacaaattcgggaatcgttcattagtatatcacactggcggtacggtagtgttgactacatgcaacctcgtgcaacacacaccacgtattatattagtatattacctagactatagtttgaaacgaagtgtgatgaagctaggttgacttctcgctgttgatgttctgcccccggccacctgatgattaatttgatattagtagttaattaagaataatatcacctcacatgcagagctaggtgattattgatgtataggccacatggggtcaccgttcccagagatgcgcgcatgcaattagaagcaacatcaccggagtcagcagtgagatcgagcaaactagctagcaaattactcccttcatccctaaatatttgacgcagttgacttttctaaacatgtttaaccgtttgtcttattcaaaaaatttaagtaattattttttttatcatttgattaattgttaaatatatttttatatatacatatagttntacatatttcacaaaagtgtttttaaataagaataacggttaaacagcgttaaattttcgggacaaagggagtagctgaaatcgcgtgcgcgcatgtgaaccaggatatgtgcaggattcatttttattttcagactcttttgaagcgcagggattctaaaactatagaaataagaaaacaaatgggaaaacaaaggtttgaatcatataattacttaaaatgtgtttcgatggcacagaaaaagatataaatattgaaattatatgttatttcgagttgagtagtaagagaaaagagaggtgtggctttggaattatcatagaaaaacanataacacgaagtacgtacgagctcatgtntaaaatccttaatttggattggagcatangaatgaatccaacgggattttaatttgcaagcccaaatcttaccaaccaaaacaacctcttcataaagaaaaaaaagcctaaaaattaattaaaatccttcaattttcctttgaaaatgctttaatacaaataagtctttattgggttcagggatagacagccacatgtaagtgataaaatcacctgcctttgccttccaagtagacgacgaaagaacctacgcatgcgcgccacccagccactcactcagctcgcgcgctggagtacaattactaaacaaaaactcaaaaagcgagggcggcgtgagctacaagtatacaaggtgggggcatcttcttcctcccgctcgcttgtcttctcctccacgcgcgcgcacgccgtcgggctcgtgaccgatcgatcgatcgagagagaggtcgctcgatcaacatgggggaggcggcggcggtggtggcggtgaacggggagaggtacgaggcggtgggggtggacccgtcgatgacgctgctcgagttcctccgcacgcggacgccattcagaggccccaagctcggctgcggcgaaggtcggtcagctctcttgctagctgctgctctcatttttgtctcctgtttctatttttttttcgtgttatatatgctacgtttctagctattcttcttgttcttgttcgatcggaattaattaatcttgagctggaatttaataataatggttgcaacgtcgtcccatccacctactacgggatgtagttgtagcgatccagtttttggttgatttatcttccttcctagctagcttaattttcaacttcctagtgttttttcagacgcggcaggaacgtactagtactgtttcatttcattccggtcgatctaacattgtttagcctacctgattaattattatatatatcactctagttaattacagcatgagaaaactagcaacaatcgtgtacgtgcagcaaaattgttgtgacagttttttaaaaacacgagataacttgctattgctactaccacaaccaatcttgggagctatacgcagtggatgtgaaatcattggacaaaaaaacttctcccaccttcccgtgatactactataatagattttgtgtagatataatacatccgtctgtcaagattcactgtactataatgtgtcatatccacccaaaattacttatattacggaataaatgtgtaatttattagacaataaaaaattgtctgagtttactaacagaaaaatactaaacttttagtagtataaagaggaaaggcgatcgagtttgttcaagtcctcgagagcattaccttgtaagaaatggaaaggtagtacacgtactcacagtagcttactgatgattacgctacctagccgtcaacgcatacgtttgtacggattattgttattactgtgttgattattttttgaacctaacagttttaattaattagattaaaaagatgggctcgcataaattatagcttgctaattaatttgagattttggaattaattaaattaacaaagcactaaattattagagttcaaatctcttcacatttattagttcaaaatttggaattagtaaatttaaaactataagtcataatttagattatcagtttggagcagtttcagcgcacctctcaatcctagggaatcattccaacctttccggctgcagtttgtacttttttgtttgctttttgtttattttattaaggagtattaggtagcagagcctcacatg

SEQ ID NO: 10513 - DNA, 3134 bp, Oryza sativa
aacaaatgactcaacaaggcttacatgtactcaatatcagaaggtcttgtttaacgaatagacagtacttagttaattgaaacatatggattcaagaaactttatgatccaaaagaaataattccttcaattcatggactaagaatggctcaaagttccatttctccaattgattgctttttttggttgatttctttacagtttattctattcttcccctcgtatctatgcagaactctcttattaaaatatattaatcagagggattttggtgctgaacaaactggattgagcaattgagctggctattgagaatttgagatattgactaatattaaaatactctgtaaacaagcttaatagtcaatattgatgtatagctaggttgtgcattagaacagtaactggaaggtaaaagtgacttagaaaccaccacgaaaagctctattccatttctattgaatatgttttattttttttacatattgtcctaactttgactaaacaattttattctgctctgtttaaagtaatatgcagggggtttgtttggtgcccttcaagctttcagaggatggcattgagctgcatattgcaacgaatcacgttggtatgctccactcttccagtccttaaaatgcaaactaaaacatttgattgcaggcaggttttgctaaaaccctaaaccctaaaacctaaaaccttttttttatgtcaatacagaaagaaacaaggttagcaccaaagaagcatcgtactcgaaaaactgcaattgaataagctaataacgaaattttaatagaagggaagcagatcaaatcaattttcaatttagaaatattgctcattggaactcacaaatcagcaacacatcagcctttcaaagttctcattatccaagatctagcaggtaagagatccacaaatcaaaatcaaaatatagcttaccttcatcaggtatagtttcacatgagggtgcggcagcattgccttctactgttcctgctcccttcggaggatctgctgagttgctgtcatcctcatcaaatcccataatttcggagatggtaccaactcttctctcggctcttggcaaatcacccactagatgaggagtgatgttagattggggagaagggatataaaattataaatagcaggagatgattggctccttataaaattacttgttagttcattttatgggttataaagtcattacatccccaatggccatactactttggacagagtcatagaagccagcaggaactaaaaaaacagtcatgactagatataattaaacatctaaaacttttacggacggataaacacaaaaatactgctacatccatccaagctactcataccctgtttcctgacacatatggaactctcaataacgttgacttctgttttgaaagaaagggacgtgatccctctccaatttctattactagaaatgaagattagacacacagcatccacaacctcaaaagcaaagcaacctaactatcagccttttagttctgccaatggtgccagaaactctaaataactgtgaccatgtaggatgtggattgtggaaaacgatagaaagaatactgatatcaaagaagaaaaaaccaaaagaaagggccatgttttgcacattaaaagggttcaagccagttcaatccttctgacccattaacattgtaactctatttatttgcatgatcggcaaaactttttaactctttcctttatctcatttcttgcagcagtgttattaaatccataaagaaatactagatgatttgccgatggataaagataaacgttatcttagaaattaaagccattactaaatgaaagattatcatgcaaacaacagcaagaataattagattgttcttgtttccctgtagtgtaaagacagggagttacctgcggtgcagaaagcactgtatgcatgaaggatgccgtcgaagttgtcttttccaagattcttgaactgcattgactcaaggtggatcatgaagacaccattgatcgtccttacaaaaataagctgatagtcttcatcatatgccactattaaattttgccatccccccatatggccgagccctaggatcacgcccaattcaatcttcttcagcatcgtccattcggcgacaccgacaccatcagagctgatcttcctctcccacaattccatgatctggtatgacagaatggcaaggcaaataccaccatcctctgccggcataatctggaagctgcgatgcgaattataatgcagaaattcagatggcatctcgattgtagctagactctgcctacccagatcaaactccagtatgccctcctcctcgccactgaacaaccagtagagcgaatatccaatgagggtgctgggcaagcatgtatcatacacaggaggacactctaatgtgatgagatcgccccatacgtcggcctgcgacgagtagagcgaagcgtagacgggtttgtagtcggtgtggatgcctatcaagacgacctggaagggctggagtggcagtcgccatggacgtggccttagccggaggcggcggggcagatcacggcgccgttgaagacgatcttctccttgtcgtcgccgagctccggcggggcggccgcgcagctgcggtggccggtggcagggtcccacacggtgatctcgttccgcgtccggttgtagacgaggacgcggccatggcggcagccgaggacgtcccagttgcatcgcccggcgcccttgtcgcgcggcatgaggaagtgctcgggcgggatgcggtcgggggcgtcgtggatggagcggaagactgggtagccgcagtggtcggcgaagaagccgaggaggaggggctcgccgtggtgggcgcggtagcggcggaggaaggccgggtcggagacgacgcggcgccactgcttgcagacgagggaggcgcgcgggagggaggacggcgaggtcgggaggcggacgaggatctcgcgcaggatgtcgtccccgtccagcgccgacgtcggcgacggcgcggcgcggcggcggcggcgtcggcggcgagccatcggatgatgtgggagcctagtgggagtggataggtctggggggggggggggga

SEQ ID NO: 10514 - DNA, 525 bp, Oryza sativa
atacacacaacaaatagaattgacacaaaaaatttcctctttatttgattgcagattaaattagtctatataagaagggggcccgaaggcctcggaagaagaaaagaagaagctatttaaagattggcgggggcctgggggctcactccgatgcacccgggtcgccagcctcgtcgccaccgtcgcccactccgccgtcatcgtcctcctcgtcggagttgagggcgaacgcgagccgaggggccgaaccctcgaagctgtggacgatatggtcggcgacgtcccggacctgcgcgcgcgcgccgtcctcggtcccgggagggaactcgtccagcgccgtccatggggagaagtcgggatccctggcttggtaactcgccagtacgagctccaccgctcctcgggcgaggtccctcgaggatgacttaatcgtcctctcgagctcctcggggagccgttggagagtcccggctatctccgataggcgctgggcgaggccccctggttggcggcgtacttcgcagt

SEQ ID NO: 10515 - DNA, 2128 bp, Oryza sativa
aaccgctcgctcctaccgaatttggtgctagcctcgtggagcatggcaccaggacaaaaaggtccttaattttggactcgtttgcgacaacaacgagtggctcatgcttgatcaatgctcatagttatgtgcactgccgtatagaggctaaaccactggagacggactgccatggccccctccttgcgggttgccgaccactactatcgccttccttggcagtcaccagtcaccaccaacacaagcttctcgtcaagacttaggagaatcgcataaactaggaaaggagagaaaaagggtagagattgaagatgacatgtgggacccaccatactttcaaggtgtttcttctaattagagacttggtgtgtcacatagtcgtcaggtcagatgaagaccgtgtcaatgtgccacgttaaaaccaaaactgctatcaatattaccgaggaattcattttgcgctgatttttaagagttggagatgctctctaactggttttgcggtcgagagatgcgaatggaactcgacctgtccttgagggacctgaagtgaactttctgcgctgcctgtcgatggttgtggttgtgggctgttagtccatatgaaaattgatccgacagacagaaaaccccaaaaaatgagtgaggcggagatgacaagccgccgccggcgtcccacctcgccggcgccggcgcagccgctggaagacgacgaccttctctccgagatcctcctccgcctcccgccgctgccgtcctccctcccccgcgcctccgtcgtctgcagccgctggcgcctcatcgtctccgaccccggcttcctccgccgcttccaatcccgccaccggaagcatcccctcctcggcttcttcaaggccgggttcaggagagtagaccccaccttcatccccacgctggacccgccggaccgcatccccgccgcgcgcttctcctggcggctccccggcggcgacgatgaccgctactccatgttcggatgccgccatggcctcgtccttctcttcaactgggttcttcaccggctcatggtatgggaccccgtcaccggcgaccggcgcgccgtggacattcctggctcgttcctcgacggccatggcaggagtctcgtggtcgtcttccggggggcggtgcgttgcgtcgtcgacggaggctgccactttgaggtagccatactaggcaatcacccactgcaaacacggctcttcacctgcgtttactcatccaagaccggcgattggggcaatgtcatctcaaccgagttttattcagcgggttacatctgtcatcattctagtgcactggttgggaattctgtttactggttgttccagggtgatggaatctccatccttcagttcgatttcgatacgcagggactagcccggatcgatgtgccaccggatgtgcatgcccatgtggttacctactaccagattcggatcatgccagcagaggatggtgggcttctcctccttgttctgccagaatttagcctcaatgtgtggaagtatcaaggccaattgtgatgggtgttgctggatggatgctggaaaaaacaattgaactggacaggcttctttccgtcgaaccagggcgtcatggagctgcaccaactattctgggctttgtggaggaacataatgaagtattgctgtgcacagatattggtgccttcatggtcaatctgcactcaatgcaattcaagaagctttcccaaaccatggaaccaggattttatcatccattcactagtttttatactaaggtaataccttgccaacgcttttacgctggtagttggtcctttgtgaatggctattatttgttatgtgacaattattgttcctttaaatgcttgatgaactgtcctacatagtatggcatgcatttctgatattagtcttcaattatgcagtttgcatcaggggtatattcatgtgttagctcgtttggttaatttattctatgaacgttcaccataccatgattactcagatttacatattactttgaaaattggcgacaaacacatgcaaaactacctgaaccaattgaaatattctcttgctgactgtttgtgtgcatgtttgactaggggctgcaggaa

SEQ ID NO: 10516 - DNA, 649 bp, Oryza sativa
tgcctccacggagctgagattcagcacccgttggaccactatcttgaagtcctcaggagcccagtcccatctgaccccctggtgggtcctcatacagtcctcggacccggtgtactcccaggcgccccgggcgcgccgctggagtggcgcgatccggcgacgaagatagtcgccgaacaccatggcccctgtgagcccctgggatcgcaggcccgccaagcggttgaggacggcgtcgtagccatctcccagatctaccggcgcccgccagttggaggcctgcgctggaggctggctcggaagtcggaggcgcgcttcgtcggcgaggggggtgtagaaccagtcgctcttccagtcatcccacttcttgcggaggacgcagggaatgtagcggttcagcaccggcccccgcgggtggaagtagcaaccaccaacccccgacggcggcgacaccggctgtacggtgaagaaccaccggacagccgaagggatgggcgcaccccgatgaacatctcgcacaggtgcgcgaagatggccaatgtcattaccgcgttgggggtgaggtgcgccatctggagatcgtaaaactccagaacatccatgaagaaagaagaaaatggcggaaccagccctgccatagcaaaagggg

SEQ ID NO: 10517 - DNA, 1054 bp, Oryza sativa
tgcatccattggctatagtagcagtggaaggcggggacaccatgatgatagagaatcgcatagtaggcgtgatgaacgtgagagatctacatccgttgactacatgaacaagcgaagtcggcatgagcatagctcaagaagctcaagaacacctggtatcatgtttgtatctaattcttttcatgcttaggctaattggcttgtcacttgctgataaaattgtggctgtgattgcaaattgttagcaagatctgattgggacagtggccgatgggaatgggaagatacacctcgtcgggagtaccgtgatgatcgctcaaattcccatagacaacatccttcaccatctcctatgcttgcagctgcatcccctgatgcacgcttagtgtctccttggctaggtgggaatacgccacgttatgcaggtaacaaaagctcagctattcaatgttgtttgcacttttcttctttaatttaaatcaaataaatcatacttctattgttgttttgaatatccagcatccccatgggataacgtatctccatcacctgcaccaattcgcgcttctggttcatcaaaagggtcttctatccacgttctggtggaagatcccaccagcttactttttcgtctacatctgcatcaaatgtaagtcaggattctgttttcacaaaacatgcctttatgtaggaaaaatcaaaacatgcctttatacaggaaaaatcaggtgttttttttttttgcattcatctcatatgttgcaagttcggtatgattattttaagacatccatacacccaggaggtgaagtagagtagacgaagattgtagtcctatgggctatatacattgtagagagttggaagccccattcatacattcctaaacactatcacatctattgagaaattaatcctccttttagcacgacagtcttttaatgttgaatctcctggaatgccgatttttagaagtggtaactctgctggtaatttaattcaaccatttagaccagtgctcgaaacaatgataaatgtaatgaagcatgtattt

SEQ ID NO: 10518 - DNA, 738 bp, Oryza sativa
aacttcccaagccttacatgaaaaactcttttctcagtaactgttggttcctcatccatgggcttcttctgtctggaagattggaatccatcctcgcattcttccgacagccggcccttctccaacctctcatcaaaatcaaacatcaggctctctatggtcaatccggggacatagagcgtaccacggcaaagcgggcacgtcgaattggacagcagccatgtatctatacaatgcagatggaaggcatgaccacacaccggcaacaacctgagcctgtcctcaccgtcgaactcacacaagcacactgcacaatcaaacggctccttgtcaccaccaacaatgtcgcggtaggcaaacaccggcagcgcgtcgatgaacgcctggtcgagcccagaatcgtgcaagtggaacagctgctggagctgccggtccatcgcggcgtcccgcccgacatgccggctgtgcggcgacggggcggcattctcggctccaccacggcggtgctgctttttcatcagcagcctcaccaggaggtggagaaggccggagatgaagaagatgaccgcaagaatcactatgatgaacaacaccgcggggctaatcctccctccattaccaccgccatctgccgtcggcggcggcggcgggggtcgggtggtgtacgccgacgagtccctgacggcgggatggataccatgggaaggagagcgataggcggatagaggtgcgagagat

SEQ ID NO: 10519 - DNA, 3304 bp, Oryza sativa
aggctccaagtgttcatattgcttgctaacagcagcagttgtggcaacaactgcagctgcagtgactgttgcagcagctgcaacaggcacgtcaaagttcacatcattgtttgatttagcagcagcaacaaccattgaagacgcaaccactgcagcagttgcaacagcagcagccgtaacaggcaattgctttgtaagctgcgatgaagcttcctggggaggtgcagaaggttcatactgagaaataaaagatgtgttatcttggatgtcaggggggtggtcaatgcccaaaccctcaactggcttaagtgagtctagaggtgcccggtgaggaacttttgatgggagttcatgtccaggatgatgaggcaataatggaccatgaccacgatcagcatattccctcgacccaagttcattcatcctctttttcatttcatccttgctttgaaaaagggtggtgtcatacacgatgaggtcctttggctcttccatggaatcttctgaaaacaagtcaggtggtgctacaactccattttcaagtaaaacctcatggatcttctgagctagttgtggattctctttggcagcattaatcatgtactccgaaatatcctttactttcatcctccggacagctggagtactgcctacttctggggaagaaggtgaaggtgaagttgacgaagaattaattgttacacttgatctttctttgttctttgcggcagcaatgtcgtctgtacttcttgattcatttgtaataggcctattttcactagtgaatgtgctaacagataaaatcccgaatgaatctgatagtgtattttgttgattgtttttacttgtctggctcgttgtagctccatcactatcagaaggaccaacgttgatccatgtagatcttctgtcaagtaactcacactcaaaagaaactacatgcagaattcgataaactatttgaagatcccaactgcctgatgtcattatctttgttaaaatgatgattatttgagaaggaactttcttcaaattctgtagacaaaacagcaccatctgaaggaataagtgtaccaggatctgcgacaagatcaacaatgaactccctgcaaaatgcagcacggtttagatggttatgaagtgaaatgtgttcttattacatctttcaatcctcagtgcaccaacacttaaaagtgaatgcatgaagatagaaagtccaatactatcaggacagaacacacttgtgctatctcatgtttatttgtccaacacaatcctgttcatgttgtaaaggatgcaataccttccatcatcaaatttcacaatattcaaagccccatcgtccgatccagtgtactgccttcctttcaggagtcgacaggggataccaatgttatcggccaaaacctacatgtaaccattaagaaaagtaattgctatcatagatagatttgtgtgtaatgtgtcttataatggtaattgggtcacccttctattgtattagggcaaagagaaaatgtatagaacttatacactgaatttgaagtagagaaaaatatagaaagcattataacagatggcattcaatgttcagtgtccatgttgggcaaattctcgttgtcaataaagttcaggactagagcaacaaagatagcttggagattagccacactaatcttaaatacttaatatgtcttattaagtaactaaccttaaatagcagtgcacgatgacgtgccagaccaatttttaattggccaagaggaacaactacacttccaatactggttctcaggtatctcatcattttctggtatttcaccaacatgccctcagaatcaaaaaaagttccacccatgtgtctggctactaggccagcaagtttctgaaccaaatcatttccaacaaattctgaaggtttagattcacggagttcaaggctcatgattagagccgtctggtcaagtttcataagctcaggatcttcacctctgtgtaccaatacagcttcccagttgaccctatgtgatagtgactgcgctcgcaaatctttaagagagggcatggttattgaagccgggccattcccagtcacatagagatcataaaacccatctgatattctgtcatcatagccaagggcgttgaaattctgtgaggcataaacaattctatcatatgagagacaccagaaaatggaccatgttaagaaaaaaggaatgtacagaactttggagtgtgttgagtagaaacatgaggaatgcttcatctatttaaaaatgttgattaaatgtgcgattcataccaatgtatggtctcttttacgtatggctacaattcattactgaacaggcctcttttacatatggccacaatgcattgctgaatagcaacaaataacatttagttttttttcctcaaaaacacaatagagctgtgtttctttgtattatcaaataacaattacttcaaaaaagtaaggcccaatcttataaaggatatactagaatcatactccagaacccacacaagcagtgaaaattatactgggggtgatgttagtcacaagataagaaagtttaacttatctgacagacagacactaggtttcagcaattaggcagtcagactgcagaagatcattgtatgtaatgtaatgtaccacagaaagtacaactaagctcgtgctaccaaccccaaaaatcacccaatcgatgcaattgcactagctatgaactccagcactgaatcactgcccagccagtcaaagatgtaaagtcaaccggtttcacagcatggagtctattccactatcagaattgcaccatggaaacagctaattagcgatggaaatgaatcagagtggctaacccagtatcgggccgcgagggcctctgcagtagagctctgaggcgggcagaagcccaggctgatctgcttggcaacttcaatctccatctcttcaggattgtcccgcgcgctcatctcaagcacaagctgcagctggaactcctcaaggtcgtcgtcctccttctccctgacccgcttcctctcctccgcctccgacgactcccttatcactcgctcctccacctcgtcctcctcctgcgaccgcctcatctccctcacggcctcttcctcctgcgaccgcctcctctcccactcctcctcctgcgatctcctcctctcagccgccacggattgcctcctctcctccgcccccgaccctaccgacgacgagaacggcgacccctccgcctccgacggcgtcgacggcgtagggggctgaggccgacctgggacg

SEQ ID NO: 10520 - DNA, 17147 bp, Oryza sativa
cggcggtgaccagatcatggcgcttctcctcttggtggacggccgcatagggggatgacggcatgaggcgacctcctagacggcgcgctctccctcatccctctcctcgagtggttctgcctcgtcgtggggccacgcggtttcgaagtcgccgccgcggcctgcttctcccgcccgccgccattcccctcatcctcccactgctacgagccgccgccgccctcgcctgcccaccctcccgctgccacccacagccgccgcccgcgggctgccgcctctgccgctcggccgccgccgatgtctcgatgccgggcgccgggtggtgcgggtggtggtggtgcgagaggaacggcgacggcgtgacatggactccagcccgccgcttcagctccagcccacggtcgccgccgctccagctcccgcccgctcgctccccacggatggccgtaggggagagggagaaagaaagaaagaagggagggaaagaagaagaagaaagaaaaaagactgccatgtggggccacatgtcagtgggcccgacaattgtgtgcgtgaatgaaaaacgggccccactggtagcttttaatttgaaatgacacctaagcgccacgtcagcacacagactaggtcaataccggcacgtcagcgaaaccgccctccgaaaccaccgagggagtcaaattgcaccggttttcatactttgggggtcaagatatccggttttgtggtttagggtcacggattagatttcaatcacttttgagggtcaccaagtgaacttattcccaaagattaatggccttctctttttttagacaggctcttgaacgggacaggttgaaatggcccaagtatttgcttgccgctatctgatactctagcaattaggagggttcaggaatcaggacatagtttcctggtctctagcaagtcgtaaacagcagcttatccactgatttttgcactcctgataacgtgtctgtaatttcataccgcaatgaccttatctgattaccttatactatacaaaaccgcatatgtcctccatgacaggcagcctctctcggagcaacattgtcaacttcgtcagggaagaagattttgcttatgtgaaaaatcagggaactaatcaatgggaaattgtcaaaagatgtttatattattgctgtctagataagatattccctgctactctcttcgtcccattttaaatgcaaccatgatttttcgcgcataactttgatcgttcgtcttatttaaaaaacaatttaaaaaaaattaaaaacataagtcacgagtaaaacactattcgtgttttatcatctcataacaacaaaaatattaattataaaaaaattaaataagacgggcgatcaaagttggacacggaaattcatggctgcttttaaaatgggacggagagagtatatattagtaccagtgcaagcacttcaggttgcagcttagctaatcatacagcgcaccagccaaccacaaggagtactaagatatttgagaccatcagtccatcaccatatatttatttatctgttactacctgtacggctaaacgtgctatatatacaaacagtatggtggcccgcgtagattgtgcggctagcatcattatattttctctcaattaatagcatatatgttttctcattatattattaaaatatattacaatgacaacataattttaaattttgcaataactttacgaaaatattaatgtgtaatatttatattgtattttatatacgtgttagttattaattattttattaattatcaaattttagttatttgcaaattatatatattcctatatggacactagacttgtgttttaatatttgttttttttattctgaatttttattatttctaattatatttctatgtggactctaaactcatctttcaatattctttaatttttaatttcaaatttcagttacttctaaattgtattcctatattgactttaaactcttcttcccatgtttttcttaattttgaattttagttatttgtaaattgtatttttatacagactctaaactctacttttaattttattatgtttattacgaattttagttagtattaaattcatatatggactctatactctacttctaatattccttatttttttaattccgaatttctatttttttttcttaattgtatttctatatggactctatactctaattataatattctctatttttaattccgaatttcgattatttcctaattgtatttctatatgaactttgtactctagttctaatattccttatttttaattccaaaattcagttatttcctaattgtatttctatatggactctagtctactcttctaatattccttatttttttagttccgaatttcaactatttctaaattgtatttttatatggattctagtctcctattctaatattccttattttttaattccgaatttcaactatttctaaattttatttttatatggactctagtctcctcttctaatatttcttatttttttaattccgaatttcaacaatttctaaattgtatttctatatggactctagtctgctcttctaatattccttattttgcaattccgaatttctactatttctaaattgtatttctatatggactctgccttttccttttctccgattaatgtgagaatttctaggtcatgagagtgaacgtggaggctcctttttattccgatttttagttagttttaaattcctatatggactctgtacactacttctaatatttcttattttttaattttgaatttctattttttttcttaattgtatttctatatgaactatatactctacttctaaaattctttatttttaattccgaatttctattctttactaattgtattcctatataaactctagtctcctcttctaatattccttattttttaattccgaatttcagctatttctaaattgtatttctatatggactgtgtcttttctttttctttgattaatgtgagaatttctaggccatgagagcgaacgtgaagtctcttttttctattcctttaataatataatagatatgcgactgccttccattgctggacagccatcccgcgagttgaggaagaccaccctccaattctcaaatctcaaaaacctcggtctactcgatccactgatctactctatctaaccgaggaatgtttggcacaaattctgccgccattgtctcccacgtaacacttatgcaacgctcacgccatcctctccacacaaaaacacaatcctactatacatcccaacaacgtgtcgcacagtcgaccctagcgctaccagctcaagatcgaacatcatttttttatgatctgcataaactgtttgatcggcagagcatatatatgcatgcactagctagcacagtagtagcacacatcgtgctggacctccctctaagcatcgaagaaaaagcaacgtgccaccagccggccgtagatcgagccggagacgatcgagctggaaagcagcaccgatgatacgagaaggacggccgcgagatcgatcctcgatatgaagatcagcgtctggtcctgtaagaggaaaaaagatgcttcgttttacagactagggaccgtacggccggcgtcgtcgtcgttctcctcgatcaatcatctgcaattctccgccgctttacttccggttctcccgatcgatcgaactagaataatatgcctctctttttctcttttttttctgctcttccccactgctagccatgatcaggaccagcccatcaaaagcaccttataaccacgccgttctaattaattcggccccaaatatctgcaaaacgtggggggggacgacgatcaagaggaacagtacacgcgacggcgacgatgacgacgaagacggcagggacaaccctgcatgtaatgcatggccatgattgactttagaagcaagcaactgcacattggcatatggctgtgggcaacaaacaactggggctaccggaatcggggctcctccaggttcagagaacttctcccaaacagtgcaaggactaatggtcctccctcccttcctctttagaagcagtttagcgacggactgaacgaggtttgaccggtctaacccatcgataaattagccccgggagccatcatgcatgcacgcgtgcacacgggttaatacgattaaatgcagatgtatagtagtcctatcaccaagcacatgcgattgccttggggaaccacagacactgctttaattgattaagcagatcaagcaaggacgatcgtgtgcaatgcgaggagctgggtgcggccgaagcatgttgggttgttttttttcccttcccgacggatacatatatacatgttgtgttgttcgtttcctcttcctataaggacgcatacatatgttgcgtttttttttactgttgtcgatgtcgatacacggatgggctagcatctgcatcgaattccaccgggttcttctaccacgcagcaaaaaagcagctgatgggctcgtgcgacgcggtttccaccgggttggcttggcccagcagggagcatggcttctcgcctgggcctcggtctcggctacggatggtggaccagcgcttcgatccccaatcccaccccatcccaccaagcgccccacgtttttcctcctccatctcggcgtccgtcccgcggcgcgcggggcgtcgtggcggcgtgggcgacttggggcgaggatggccaagcccccgcgcttgctacccaccaccatcaccaacgttgcggtcgtcgcgacacgaggccgacccaccctacgctacgtcgctacacgggtagaagcaaaccgacagaaggaatgaacgacgcatcagccatccatgagcccatcacctactagctgagctttgtctccatcgatcgagccgtacgtaccaccctcctcagtacagtacagtacagtattattcccatcgagaacacgcgaagtggatcatcgcctacctatcggcgaaagcgagcgagcgagccacgccgatgctcatgcccatgccggcagccgcgcgcccagcgcggtagtgttcgttcacttcgtcgtcgtctctccagcgtgcgccgcggagtttggtgccacgaaaggatggggctcgcgcgcgcggttgactccaaatctatcatagagctagctaggctagcacagtagtagcacggtttcgatctcttgcttgcaccgcgatccgtctactgggatcttctacagggcagcgacgcggacgccactggacagaatgtacgcggctacagtgcacgttccatcgccacggcatctatccgcttgctgaacacgacggatcccagctactcgatcagggaccaacggccaacgggtgcggtttttgttttttttttctctgaagaaaaatgggtactagctttagtttgcgggtttcagtaggaacaatctttcgttccgggaaacaggcttcgatgggagctaatcttgggggagttttcacctgctccaggagcaaaatcccccgtttcatggatctagtagcaatgtgctacaaaccctactagcctacgattcgtaaacaaatacccgttggcttatgacaagctagagcatcacaaagctaacaataaagctaagtggtgggcagcagaacatttggaatctgggcgtacaaatgatatttgatcatctcctaaacaatatacaggccatgcatggccctttttctcttgagaaaacgcctcttctttctcgccattttttaactcgtttatcgtcgtagtggctctcatgttgggggcaccatatgcaagtgctcgtactcgtgcactttacagcgtctcgctggcccgtgcagtacatgctgtgctgggtaagtagggttttttcagccgataatggtacttggaattaattatgtgcacgtcgcgtaagcaggtccggtgggcccagggcatggaacctgttcaaagtttattcccacacagcaagagacaggataaaaggcttgcaattgcaagttttttaaggacagtatcaacaaaaatctgacatccggagcagcttttgtgggtattttaggagcacgctttagcattgttcatcgtccttttgctcttttgttaccgttaacaacaaagaggagccatgtggaggtaaaatgtgaaaggcaaaaacgcacaccacaactcttttttaaccgacaaattctgccattgaaaaaaagtttggaaccattaaacccatattacagctgaaccatccgacggtgaagcatgcacgcacgtgttggacagagtcagctttgagtgcttggatcaaagaagtgatcatcaaaaggttaacagaaaccgaaaaaaaatttctactccggttagaacagggtgatcctacaccgtccgtaaccgagatccaacggctgaaaataaatcttatgcttcgaaggagaaatcaaaaggttgcgacacaatggagctctttcttgtggcattcgttgtgctagactgccagtgcagcagacgatgatggcggggtgtggcatgcgcgggaacggaggcagcaggcgagcgtggccagggactttatcttcagctcgccctttttttagtcgccactaccaatcttcatgttccctgcctctttttacgatctactcctgctgttaaatatggccctgcgcactgttcaaagcacggcttcccgtgcagaaatggagaagtttgtggcaatttgtcgcacttggacttgtgtttttccctccaatggtaagctgggtgatctatctggtagccaggcaaaagaaaatgggaatagtatttgcgagcgttgaattaggtggagactagctagcatgtctgtgtttgcatttgcacgattagattatttgatctataacttagtatattgataaaaattactaaaatggagtactacttgatagaatgtttgtattggagtaaactttagcaaaagaaagatcagaattgaacattacgcaattcaatgatggaacaatcacaagcaacgccccctaactctgaattctaagcttttactaccgatgctacaatgtttaaatcgtggagtagtaatatcttttattttttccgtgatggctacaggattgaatttactctctggaaaatacacatgaaattccctcacttccaagttccaacttgtcctcagcaagctaccgcttgagctttcattgacttctatagctgcaagttattgccagtggaggagttgaaagatatggtggcgattggtccggatccgactaccgagttgccgtttcaggaatattcacatctacggtgcaggctagcactagcagattcctttctggatctgattttcgggacatttgtggtagttttgatggctcctttttcagattccgttaccgataacactcgagatttggcagaaacaaaaggcaaggacagggagctggcacgtcactgaccgccgtcccctatacggactgacgagcttctgtacgtacctcgaatccaataaaaacgggaattgattttgttcaccgagactttcagaggcgtaattcgattcaaagcgcccaatttacactccacgaagtcttaaagtctagcgccggaagcaatgtctctcatcactaaaaacaactgatcttaccagacaattcatatgcaaactccccccccccaccccctgagttagtcaaaaaaaaaaacaactgatctgaaattctgaatagtttgagccacagcgacaggaatgcatgacacagtcttgtaatttttgttcgtatttcctaacatggcgtggactattagtacgtcggtatggaccatgcatagtgtacgcaaataccgtatagtacttttcaatagtagtacaccacgcgaatcagccggcaaaagccctgtccgacccgggcgggggcgtatctatgtacgagccccatgaacaacagctcgatccatccacgcgcgcgtgacggctcggcggctgtcaccaacccggtcgccgggcggtctcgctcgatctgggttgggatacataccgcatacgggttgcagaacgcagatagtactaccagcacagcgcatcgcgatagataaaggcaagcaaacaagggatggtccaaaccgagctcgggccgcgctgccatctcgcctaaataaaaccgcgctacccatcgaccgatcctactcgcacgcgcacacacccaatcaaatgctcctcctccgccgcctcctctcgctgagctgagctgagctgtgaaatagtgccaccgagtgagcgctgagctgagctcgaagcaagagaggaagaggaggaggagggaagagggggggcgaagatgattacggcggcggacttctaccacgtgatgacggcgatggtgccgttgtacgtggcgatgatactggcgtacgggtcggtgaagtggtggcgcatcttcacgccggaccagtgctccgggatcaaccgcttcgtggcgctcttcgccgtgccgctgctgtcgttccacttcatctccaccaacaacccgtacacgatgaacctccggttcatcgccgccgacacgctgcagaagctgatggtgctggccatgctcacggcgtggagccacctcagccgccgggggagcctcgagtggaccatcacgctcttctccctctccacgctgcccaacacgctcgtcatggggatccctttgttaaagggcatgtacggggagttctccggcagcctcatggtgcagatcgtcgtgctgcagtgattctttgttacacgctcatgctcttcatgttcgagtaccgcggcgcccggatgctgatcaccgagcagttcccggacaccgccgccaacatcgcctccatcgtcgtcgacccggacgtcgtgtcgctggacggcaggagggacgccatcgagacggagacggaggtgaaggaggacggcaggatacacgtcaccgtgcgccgctccaacgcgtctcgctcggacatctactcccgccgctccatgggcttctccagcaccacgccgcggccgagcaacctcaccaacgccgagatctactcgctgcagtcgtcgcggaacccgacgccgaggggttcaagcttcaaccacaccgacttctactccatggtgggccgcagctccaacttcggcgcggccgacgcgttcggcgtccgcaccggcgccacgccgcgcccgtccaactacgaggacgacgcgtccaagcccaagtacccgctcccggcgtcgaatgcggcgcccatggcgggccactacccggcgccgaacccggccgtgtcgtcggcgcccaagggcgccaagaaggcggccacgaacgggcaggccaagggcgaggacctccacatgttcgtctggagctccagcgcgtcgcccgtgtccgacgtcttcggcggcggcgcgccagactacaacgacgccgcggcagtcaagtccccccgcaaaagtagcaatcttttatcttcaccgtgtactatttgcctgatttggggagcatttcttgggctaatttgtactgactcgtatatttcttttacgtcagtggatggagcgaaggacagggaggactacgtggagcgggacgatttcagcttcgggaacaggggcgtcatggacagggacgcggaggcaggggacgagaaggcggcggcggcggcgggcgccgaccccagcaaggccatggcggcgccgacggcgatgccgccgacgagcgtgatgacccgcctcatcctgatcatggtgtggcgcaagctcatccgcaacccgaacacctactccagcctcatcggcctcatctggtccctcgtctgcttcaggtgcgtacaccccgggcttctcgcaaacccaaacccatctgctcgtacgtgctgtggtggtgcggtgtggtggtctggttctgacaaggcgttcgtctcgttttggcgttgcaggtggaacttcgagatgccggccatcgtcctgaaatccatctcgatcctgtcggacgcggggctcggcatggccatgttcagtctcggtcggtattctcttgtttccatgctaacctcacctcacccccggcagtgtcacgagctgttcccctgagtttgcgatctcgccatgcatgcaggtctgttcatggcgctgcagccgcacatcatcgcgtgcgggaacaaggtggcgacgtacgccatggcggtgcggttcctggccgggccggccgtgatggcggcggcgtccttcgccgtcggactccgtggcacgctcctgcacgtcgccattgtccaggtaaaccggaacggaaaagaacagccatacgcacacactgtcacacgcacagtcacacaccgaaaataaaggtctccgtgtgggtgggcatgcaacctaccgcgcgcagccagccagcgtcgttcttttctcccagcccctcgtgctcgttcgcgtctgctttctctcctgccttttgctctccacggccgcggcactttctacgtttggccagcacgaaagccttttgctttggctaacctttttctctctgttgttcttttgtttggtccaaaccgaacgaacgaacaggcagctctgccccagggcattgtccccttcgtcttcgccaaggagtacagcgtgcaccctagcattctcagcacagcgtaagtactagattctctctcagtttgcactctgtcctgaatcgacgggccactgacattttttgcctttgctcctgctcgcagtgtcatctttggcatgctcatcgccttgcctatcaccctcgtctactacatcttgcttgggctgtaatcgagttgcatgcatgtaaattcctgctcctgacaaccagccatgttaagaagaggggagaagaagacagagctggtacactgtttgcaaagtcaggactctttgatttttcttttcttttctgtatttcttgaagtagaatttgggaggagggggattggaagggagtcaaacgagtcaaggggaggacaggatggtagctagcttagctaggacaatggtgagtcacaaaagagcaccaaaagcaagtacaagtacaaagcttggggggacacaggatccagttcaggtcacagaaacggttcggttttgggaggggattgtggagttttggttggctgcgctgcgctgacccttgtaaaaccggaccccgattctgacaagagatcgaccttgttttgttcgtgtcgtggtattgctgactactactttggaatgattaatctcctactactaattactccagtctttttgctgtaaattcactcttctttttacctatacgtcaaattggaactttgtgcacaactaaatggagagcacactgctgtctaatctactgctccaaaaatcgtttagcacagcgaccagaagagccgctttcgctttcgcctggccgagtcgaagccacagaaacgcatgggtgacgaggcctcactccctatcagcggttgctgatttgataagacatgtcggccgttagagctgtgtgccgccaattagtactagtacctgatgaggtcgcttacgtggagatggcaccaataagctagtgactctagctgtaatcatggagacggacgaatgcacagtaccgtagattcatggagatcagctgagctagttctaaccaagcatgaaactagatgatttcgcatgaaatggttcataatcagattaaggttcattctatacacatattagaggcaacaaatggacataaacggaattgttgacttgtatatgtagttcttcaagtagaaaatgtgtctgtccgcgctgtactattaactgactgattggattagttcattcgttctgaacatctgatggagaaaatattgcgaaggggttggtggccctacgtttggtgcagggcattatgcgctaatgtgggatttgatgtggaccggtggagcatatccagcgacaagcagggccctctaggttgctgtcgcatttaagtgccttgttggggtccctgtgctccccctgctcattttccgccactgttctgaatctgccgcctaacctcttggttgaatggttgttagacctgttcagttcgttccacggctagtgccttcatctcccctcttctccgggaaaaaagaaaaggcttgcatttacgtacggaaaaggattatctaatttaactattgtgcagttgagccactgatatatggaccttactaaagtggaacccacgtatcagtgactcaactatatgtgtagttaagtcataggatctgctttccacgtatctcattgtgttgcatccaccatgctcatacatagcaggactacttgaagcgaaatgcgagtttcagttcaggtgtagtttctccttaggctgtgttcgttaataggggttgggaacccatctcctccgcacgaaaaagggagcgatccattagcgtgtgattaattaagtattagctatttttttaaaaaaaatggattaatttgattttttaagcaactttcgtatagaaactttttgcaaaaaaatgcatcgtttagcagtttgaaaaagcgtgcatgcagaaaacgagggagaggggttgggaagaggctgaaacgaacgcagcctttgtctttctaaaggcatcttcatttttatacccaaatccttcacataggaagagccgtggtaatatgaaaaacatgcataggtttattgttgtaaaagagacattgacaatgacatgggggtcaatgtgaaagaatatcatataagttccaaacttgctaacagcaccgacacgatatttgtcaaactacatcccagagcattgattatggacggtccttaaaaaatagcatcatccttcgcaagcgaaccaatggcttcttgacttggacctgccagggactgcgggatggacgacagacctgattgatcaacttgtcggggtttggagcgccgttcaggctatacacctggtagagcacgaggaggacaatataacatggaagcttactaaccacgacgagtacacagcagcatcggcatataacgcgcaacttcttggaaccaccgctaccaacttcaacaggctaatctggaaaagcctgggcaccgcgtaagtgtaagaccttcgcctggctaatcatccaaaacagagtctggacctctgacaagctggcgacaagaggttggccaaacggttccatctgccccttatgtcgtcggatccagaaaatagctatgcacctcctcgcagaatgtagatacacaaaaagagtctgggcggcactagcgtagtgggcgacgtgcgagcaaataaatcctagcctatggcggcaaacttcaacggtgctagattggtgggaggctaccgcaaaaatacaagagacacctaagaaggcactctgcattttgatgttgttggtcgcctgggagatatggaacgaaaggaatcgcagaaccttccaacagaaggagctttcagctacctcccttttagccaagatcaaggaagaggccaaaacttgggccttagcaggagcgagaagtcttaataggtggctttcttttagttagctcggaccaaaggtcttagctcctttctttttttcctttcgctttgtaaagttctccttctctattcaataaaattggcgctcgttgattcgttaaaaaaaagaaggtatcgacaattcttgttaagttatgtcagggctaatcgttcgctcgcctatgttacaatgatcgtactgttataatatgtagtgcctctctatttaagagatagactaggataagaaatccaactctactgctattctaaatacctacactctccgtcccataaaaatccaacctaagaggggatgtaaccacttctaatacaacgaatctagacttgtcacaccgcctcctggattggtttttttttttggcgagggagtattacaattcaagtcatactttgtaaccaattttgtactatatttgatataaacactattcaaaacaaataatatcacgtataattttatattgatatagtaagagaaaaattacaaaactatagtggaggctataataaaaaaaactagcacctctatcaaaccacgtgaccgccaatgtataaaaaaagaaactagcatctgacctgtcgtcgcttagtgtgaccggatgccaagatgttaaaggcgcattacttaccggagattttagagctgggattccagatgaatttaccaagtctaatcagcatttttcttccctttcttttgaccaggtgagtctgatagagtgatagtgagcttgcgaatatggtatgccaatcctattcctacgaaaaatatgaggactcggcatttgttcctcgtggtttaataagagattagaaaagttcacggttcaatgaaccggatcaatgcctaatgctcgcatcgaaaggagaagggagagtggccaaatcactttgactatccttttaagacttttccgagacctgtgaaacgacagtagttgccattgatgcattgtttcgcgaaaaatggttttggtttgtggcttcacagttgcacgaaaaagtcggaagtgaccacaggctggccagctcgcggcatgcatgaagcatgatgcatgccgcgaataatcaccggccatctgcatcattcaagctgggctttctgtaatcaaacatgtgacccactttatcacgaaggaatcaccgctacatggtttctcataccagaggggatgcgtttaggtccaccaattacaggcgattgattagcactctacatgaggtaaccagcgtaacatttgtcattccaaagaggccataaattgttgtcaattcaattatttcggcccaagcacagttccagagctctcagaaaaagtggggaaaacaccacgttctacaaagatcaccggagctttccctggacatggacacgcacgatcgtctcatggctaccgatcgatagtccatctgatgaaactatctttcgcagcccagatgccaccagcaaaagtctggacttggacagttggaccggtcaagtcgtcaacagcaacggcgtactccctcccacctgcatctgcgtcggatatgcactggacagcacggccggctcagagattccagacacgagagacgagagctgaagagcgagtcctctgaagtctcagcttgtggtggtggtacgattcaaagggcagcggcgaccggccggcacgcatgcaaaagccatggatcgtccgccagagcgctcatgatggtgtgtgtgctcggaaggaggaacaaaagacgatcgagacgggtggtagcctagcctagcccaccacccccatcatggcgtcgcctcctcgaccatcgatggcaaaagagaaaaagggttcgatcggcacgaaagaagggaagcaaaggcatctctaggcacagccccggtcgacagacgagcgcaccagccgccgtacgatgcgtctcgctacacgcacgtacggcatctcgcgcgctgcgcaggcaggactcgctcctgtcaccggcagcatcagcgtgctccggcaaacgggggacgcaccggcgaggccgcgagggggaattggcacggcgcttctgccctctcggctttcctttcggcgggaggcatcgcgcgcgcaaagccgccgcgacgtgggggcgggccatgcgctggcacacgcgcgggcgaggggggccacgtacgagagtctacctggctggcgtcacgccacgccacgccacgccacgccacggtacacgcgaaaggtaggcgccgtgcaggacgagacgccgtgcgcgtacagctgacgcgcagtcatctgcgatctgcatgcatgcacgctccctctctcctcctccctcgtcttgttctccggtcgatccatcgaagaggctaaaaggctttaattgagccggtccgacccacgcatccgtccgagtccggcagccatctgatctgatctgacggtacggtgtgcgttgaacgatcgacgatggcgtctgacgcgcgcgcctgacatgtacgcggacgcgcatacatacacgtagtgccacgcaacgccacgccacgccatgccgcgccatgatgccatgcccgtttcctcgtgtcagcttccgccggaccggcagatttaactgtggcgtagcagtgaccgaaccggcgcccctgcgtgtggcagcttctgatcaccgtatcacggggcccggccccgcgaacgatcgatcctggaatcaccggccacacgcccgtgttccgtccaaccaaacgtaacctcgtcaccatgcgagaggtgccgtgccgacctgtgacatgtaaaatcagcatcagctagctggaacctgatcgcctaaacaatctggacgttttcgcttgtcccgggtcaggcttgcatcatggccacactatccggtccttgtacggcgtgatctatcgccggggcctctcatcatcccatgccgccaaaccacgtctccgtcacaggcgttgtggccttgtacgatgagatcgaccggggcgtgaatgctccgtgacacaggggccttcccgtgtaatgccaatggggctcactgctgcgccgaattgacggtgccggatgtggcgccaaggcggccactgcgccggtttggagtttgacgcgaacgggtggcctccagcagtagtagtctctggagcaggatggatcggtgagacgacgggagggcgacacgtgggcctgcaggggcgacggaggcttcagccttcagggaccggacaaagcaccacctccattttgagctacagttttgtgagcgactccagcgatttcatggcgtctcgcacttggcacgttgccctcggtgagacaccgaaagcaacagcgaaagagaacacacgtagaaaaaccacgggccatacgatttctgacctgagccgaaaggctttaaaaacggaaaaccaaaaatgtcagcagcgtttacgtcgtgtatactgcttgtagcagggcagaggtttcacctccgtttgcaggttgcagcgtgcagcggtcggtccccacgccggcttcgcttgccgcctcttgcacccctggcacttac

SEQ ID NO: 10521 - DNA, 7806 bp, Oryza sativa
agcgttcaagctcgatgatcaaaccagctgcctgaacaagacgctactagcagattttctgaagaaactcaaggccctgaacaaaccatccacgcctgaacacatgtaaaggttagctagcgaaagcacgcgtcagggcgcagcatcaggcaagcgaccagcttttgcaagttgcgatgcgaagaatgaattattctgtgcgtgtgcagatgcaagaagacaaacccatgcgggaacagttggagcctgtagtgagacagaaagaggagcatagtgccatggtgggtttcagtgttctccacaacggaggcacatccactaatttgtagtattctatatgatgcctgaggtgaatatatgctgatgataatacagctcaggtagtaggcccggtgctgcaaacgtatgatgcgtatgtattgagcaagaggcaggggcacatacaaatactgcaccagatagcaatggcgagagaaatcagagagcgtaaattatgcttcctgtctctcacaagtgcgaagcagcgagtggacactaaccttggtggccacctagagctatcctagtacaaatatgtttgcttaaaaggtgcatatctctaaggtagagtacaagatcaccttgtaatttatcaactcaggtgctcttttggtcgggaggatccgaaagcacacagtgggaagtcagcaaaaataccaataaacatgcttacatgtaatgcattacctacttacctgatttctttatcttcaggtcgatccgttgatgtagatgatagtgtgatatcagacggcaaaagattgcaaaatctgcactgcgaaagctcacactttcagatgcatcaactgccggagaaaggatcgagagcgatgtatgtggattttttttccatcaatcattacttcatgagtgacaactgcaactttcctagcaatcgtttgctggcttagtatggaaatgccggcgataaaatatgatttggaggaaaaagaaattgcaacaaagaagtggaccatccactgaagtcccaactctgtttggaagttagtacgtcgagtaatactgcttgatagcatcttccgatcgagggaccaatctcaggaaggtccaaacgaatgcaacccaaagcctaaggttcattgtttctgcaaatgtcgtgttttaatcacaaggtagcaacctaactattccgacaatatggatcgatgcttatctttattcaccttctatcatatctgtatatatcacaatgccgacaagtcagtaataatatgcgtaacatggaacctgaacttttctgataagtttattgcaaagttttagtttgcatctaatcctcatactaaaaagaagtgaaggtaggttgctttccctctcctaatgaaaaaaaaaataaagaataagttgtctgaaatgcagaaggatcaatacatgaaacacgcatacctcactgctatgcagtggaaacacctttgttatgcatctcccatagcccaggacctctctgaacatctagaatcctatatcctttgaaagcccgatttcacctaaaagttagatcttagatggaggcatcacatgagaaatcattctatgaaagagaattaatggaacttatcaaatgcaaaaaaaaaagaaaaaaaaagaggaagaatgtgaacaacacctgtccaactggaaatgctttacatctcatggaaattgacacgagcaaatgatcgatgatggatcatgtctctgctacagatgctttcaaccattgaagattcctgcttctcctacaaacattcactaccagcttagatggaaaggcaaactgtcaaccagtggatcatgcaaacacagtgaaacagaaaagctactatatcgtgggctcagtaagtcagaaagatacacatcaacgttctggatggtctgcatggacaatcaatctatcaaaaagctagataacaattacatgcatgcagcacagcagtactgcccatgatctagacttatcttttacgctatgcagttattcctgaaaataaaaggcagtacggaccaatctatcaatgatcagaaatgacaagcaaagcattaaagtaatagacaatcattagttcacattttgaacagatgtactagatatgcattaaacgtacataatcttttcttgattctcatctgtaacaacctctgaacaattattagtggaaaccttaattctctaagcacgtatcttcgtacagttccacttcaagtatagaacagctgcaaaccttatgactgtactctggccggcccggcgaaaaaaaaaacccttatgactgaacaagccctgattcatttaatcaaaaacagcaaaaccgagtccaaatcagcctcagctatgttcctcttgcagttttaagaacaaataacagttgctccaatatatcagtactggatgttaaacacctaacggccatttgcttattgtctcggtattacctgcaatattgttctatagcactaaagtaagaaggccatatggccatatcatcatttacgaattttgaaaggggaagctatgatccttacctcaaccacattattctgatttgaggtgcgatggattacctggtggtcaaattccttgataagcataattaattccaatcagattgatccaagaaaaccgatcagcgatctgaccggtaacagaagccagaaggaacatcaaatcctgagatagcatgtacaagttactaactactcctaggtagtggaagattgatgtgcttcacttggagatgatatgagataaacatgatgtcatgatcttaggaacaggcgtcagcaggacgggcatcaggagccctatagtatgcactcaagaaagaataatatagttcgtaaactattttaccttgttaactagagagttgggatcctcaattgcaaaagtactacggagttttttttttctagccaacgtgaaaatcataaccaaacaataagccaacaaagttcggagatgctggacaatccggtctggcgatctccttactggcggttgcgatctggcaatctcccgtcttctgttaccgccatgatctccccgggctccggccgctgtctacatttgcaactcgaatccactatcgcgggagaggagagggagagagaacatacgcgcatacggcaaatcactggcgagtccagccgccggggtttcgccgccggtgagtcaccagcggacgatggctggggcttagcagttgggctcggttgcgctttcccgtggagtcgtccgccgtttactggatccacttgggtggcggcccgttggaagtttcatggtaggctttccgctagggcaatcggcttcttgttgggtttgtctcgggccttgaaatcatgggcctcttgccgtcttctatagtccgtaaccaagaccattttggacgcgcgctgctccgtctcatcatatggaactttcctagcgatcctctagaaggcagaacaaactctaaacgcggcctaggcgattaggatttataggcgggccagcgttcatgttccgtgtgatattacaggattcatgaagttcgtgaaattttcctccaaaaagaagtaaagtgcacggacggcatctaaacttgtgtacgtgtatcatctagattcctgaactcttataatatacttttgaatatcaaaatatcatacaggtccaaatagactagacccattccatgcgctaccgtgatatgctacggtgacgtctatgtctgttggtgggatccacgtgtcagtcaaatagtaaaaataaaattaaagagtgaggggaaaaaaagaatgttttgaaattttgaaaaaaaaatacaaagagaggagaggatatgagagagcgagaggagaaaatgatttatttatttatttaatatgagactaatatgtagatttcactgacacgtataaactatcatggcaagtcacatcagcagatatattggattgaagctcgtttgaatctatatgacacacacgataaatctgaaatccaaaaataaattttaaaagtttagataccaatatgacatatccacataaatttagacacacgtttgcactttactctttaaaaaaaaagttcgagaaaaggttatgttatttttccatgcttgttagtcacgtactcttcacgagtcaggaatgtcgttgggtttgtgatctcaaactcttttttttattattttcaaggatgccgttgagtttacggtctcaaactctcctttttttatttactagaaaaattgcccgtgcgttgcaacgggtggagactattttaatcttattattgttatacggtttaattaaggtgaaatttactatgagaattcgtctggatatatatatatttctatataaaaccatgtgatgtaattagaagtctgatcatctcaagttagcatgcgagtttttttaaagagatttcttatatgactcatgtatttacaaaagcgaacgaacttaaaacccgagtcaaatacggatttgtatttctaaaagcgaacaaacttataaaccgattctacacggatgacgtaccaaagtaccggcaaaaacatctttaatttttataatattagagatttatttttatctgactctagattgcttgaaaaacatgattttggaggaagagacatcattgcaaatatttttttagaagaaattgtaaatatgttatgaattaaatacgggaccttaggttaaaattatacaccccttaccactcccctgtcaaatgcatctccctagattgtttgaaagcaaccgtagatacggttcgcccgtgaacttgcagcgcagcgggagatcaccgcccaagtctccgaccattttcatttctggcttggcagagttcacatcagcaatggcacggtaccaaacttcaagcatcggagcatactttatccaaatttgatttttaaattttcaattgatttcagtcttcagaatggcggacagttcttgaaaacctgcagaaatcgtaaggttgacggctaatccatgacttgcgcctcaaaatgctgaggcgcacgcgttacatgcctgatcctctggccgcccaaccccaagtacccaacacttcctatccaaaaacacgcactttgcttccggatgatagctgcaacaaaccatgagccccacatattggacactgccttgaaggatcactattatgttgttggtttggtttgactgagccacggcctggagcaacctgcttgcttaatcctctcgataacacggttaacacctgcggattgccgtggggaaatgctcgtcctctttgtttattccagaacaccagatcacaaatagccaatcatgtacttcctgtttcggcgcaagaggtcgcctacctgcacaagttctgtgcagctgcctgctagctccagcttcgtggccctcgatctgtgctgtgcccgcgctgtccatcccgatcctgtcgttcaggtgatcccgtattcaagtcatcaatagttacgccaatgtaaaaaatacgttaagacacttttaaattgtaggaataaaaatacacagaaaatttgattaagatgcaagggaaaatcaaataattgcaaaacaagaaaaaacaaagaaaaaccattgattagaccgtaggaaaaaaacggatgaatttcggatgagagtgatgaactcaaagaaaatttttcaagaatttcaaatgacaataggaatttcaaagatccataggaaatttgttttaacttttaaaaacttctcctctaaaaaaattgtacttttacaacaaattttctacaaaattaaaattctttaaaattcatattttttttcctacgaatcaaaagggcatttttctatctagactgataacgcagaaatgacagtactgtattcactgcgaggtgcgaaaagaatattccataatattatgactggataaagttgtatgaaaatattttaataagattaatggcgtgttagggagtaatggaaccggagaagtaagcgtagaccgagttttagcgaacgttgcgagaggcgggcggcctacaaagcgggcccgcgtttcccggcccacgtcagcctgccgcgcctaccgttgactctccccagcccgatccgaaaccaccacctccccaataaaacccacgcgcggacacagcgcacgcaaaatcgcaaatccacccacccaaactcacgaattcgatggacaccgacctcggcggcggcggcggcgcgtcggggatggacgaagcggaggcggccttcttcgcgcggcgcgggcggcggtgctgctgcttcccctggccctcgtcggcgtcgtcccaccagcgggtcggcggggcggaggaggagagctggtggcagcgcgccgtggacgcggtgctcaaggtgcgggagtggtcggagctggtggccgggccgcggtggaagaccttcatccggcggttcggccgcggcggcggcggcggcggcggcggcggcggcccccggccgcacaactacggccggaagctcaactacgacgcgctcagctacgcgctcaacttcgacgagggccacggcgccagccccgagggcgactacaccggctaccgcgacttctccgcccgttttgccgccccgccggcctccgccaagtcgtccatggacctcggcggccgggacgccccgccgctcttcaacccgccgccgccccacgacggcgccggccgggcttgacctctcgttcctctcccccacaatcacttcaccggatcaaacgagaacacggcgtcctgtcctcgatttgcttcgggttgcaatgtcgtgatttggtgagaagcgagatcgatcgttgtttcggttcggttcccctctcatcttctgtttccttcaattgagttcgttcgttactgtacaaaaaagaacatagatttgtttaattcgttctctgtcatcgaattgtcgccgtgaattcgtcgatcgtgtcgtgccacagttttgtcccgattgaagcaaacacgtttgaagttttttgatcgatcaaattttactccctctgttttgcctggaaacttgcatgaatggtaagaaagaggaataatcaaacctaattccaatccaaactctgcaatctgaaatcatgccgtgttccagctgcgagtgattgcgacccaagaattgaatgtgaggagaccttgggaaagagccgtgcacgttggacttctggtcctacaagcaacttgagactagcaatagcaatggctacggtcttgttcccatcgatccttccgtgtgacgtccacttgttgctgagaatagcttcccattgcctctcacattccttcctaactggtaactgcggctgcagctgcgtgattaaaaggtgtctatttgttaatcacgggaattacgagctatcggttcagataatcacggaccatggtattgaattccaggcaggcaatcgtgattgatactagtcatatctaactatgaacaggtaggtacttgctgagcaatataggattatttgcgttgcatcaaatcataccagaaacagtttggtggattggatatagtactaccactttgatcatttgatgtctaataagagtgccagctcgtaaagcctacagacattcacagctactccaaccatccaatggatcataatgatttgttacaaaaaccacacgtaatccatgaaaataaagatcgaagatatagagtatgatacctgtgagcagaagcatatcatttcctcatttcatcctatcttggtctttacccatacgttactga

SEQ ID NO: 10522 - DNA, 2458 bp, Oryza sativa
aagaaagcagaatccccacttcaccctgggacatgattgctgagacctgaagcccgtggtcccaatgtttgtacaatgatatgtacaagtagagtctaaaacttgcaacaagaaggaatatttgcatgaattgaccaaatctggcttttccaaggaaccattctctgaacagctggtaaacaatgtactactagcaagagatacaaaagaaaaaaaacagcggctactggaactgctgtaaacaatagttctgccgaatcggcatctcgctatgattgcagtagttgcctgcagcatttggtactggttgaacactaatcatttgcacaccaatgattttagtagctcagatctcaaaagcaaaacgctggaaatcttgtcggtagtacacatattgtttaatcagtgtggtgtgggtgtgtgagggctggcacttcttcattgctctgtgattaaatatgctaaagatgagagactttataatttagtatggcactatacaagtattgtaaaccactaacagctctctaacagctagtatcatgtaatataataataacatgataaatatcaatggcactcaaaaacctagtcatcaccacctggcgcaataaccaaaagctgaaactattttgagttggaaacctcgagcgataagcaaaagcttgggcacaagcaggattgacaaaagacaatggttgctacttgtctgatattatcaaacaaatagcagcggtaataatgagtttttaacggacaaggaagtcaaaggaaaagaaaaggaggaaggacatgaccaacatttgcaacaatgaagggttacacctttcagagtgatgaacaatagatatcactgcaatttattgacatgtaaaatactgcaaatcccaaatagttaccattggtataatggaaatattaattgaaaacgaaggtatctggctttgaataaagggtttcagacttatcatggatgaagaaagttatcatggacgaagaaagctcatggaatgctttctgcgatgccaaaagagaaaaaaaaatatggttctaccatgcaagttaagagattcttgaagatggtattgtaaaatccagaaagcatcttttaaaagtaagaacattaatctctaaggtatttatttggatttaaatatttagtacattgctaagagaatgcaccctgagtcatgcaaagtaaaggccctccatgcatctttctggttacttatcaggaacaacaaagtaaaagaaaaaaattaacttccagcaagatgtaaaaactatatagttatttaccatcagtccaaattggtagctaaagcaagttagaacttcaatcctccaacaattatgataagacgtccaaaagtgcactttataatgatattatcattcaaaaacaagatgtcgttatagacccttcttgttcagaaacatatgccttcctatgttttgaagaaaaaaatgctcacaatctttccttccatatgctctactttttaaaaatttcccataatgaattatcatgcacatgcctatattgttatgctagagattgaaataaaatttatgtatgagggagtagaagatagtaggatacaggcactgaagcacatacatcactgcgatatgtgagttcttttttgggggggttacaatgaaatgactgatgggtttactcagactttatgcaatcatcccaggaaattgcaggtcgttaatcagaggtttctccttaaatgggtactcctgcgacttaaatcccagatgtgaccaaaatgtccaaaggtgacactaagggaatatgttctattagtaaattgatgatgcaagcaatctgtgcagttgtctggttattacatcgcagcacaggttcctatttgatgaacataataaaaggaaactgagtaatctagaacacctattatcatatactgatacaagaaacagtggaaactgcattaatcctgaacaatcacaagcagggtgaaatatgtaagcctgtcaaaaattatctttcgatggggatggtcattctagtgaaaaacatacacatgtgaaattagaccaaaagaatagctatagttaagaaattcaacaaccagcactacaaaagaaagaactatagacagtgtcacatatttgacttatctccagtagcatctctcttcatccacggaaaactcgccgtttctgagcaattgtctgaaccagctggcagcttgcccttcacattagaccactgccaaatcttcgacatggagaagctctcacctttactctttgcacaaatcctcttgccctccataatttcagcattgacagagcttatgccagtagctcttcccttcaacctgctgcccacgccatttttgttacgacctgggtggagagccactcgaagttcagaagccccaagaacatattggtaagtgcccatggagaagcacctcct

SEQ ID NO: 10523 - DNA, 3552 bp, Oryza sativa
tgaggaagagaggagggtttgacgaggttaatcctcctccaactcccaagatcccctccccctatcagcgcaaaaccatcgcaagaagaaacccccccacccccagcaaccaaaatccgcagacgaaaggatccaagctcccccacctaaaaaaggccaaatttggtgcaacgcggacgactccaaagcactagagcccaaaaccgggcgcgcgcgcactttcgtgcgtggagccccggatcagcagatcgggggaagggagggagggacgaagcggatggggaacaaagcacccaagaattgtgtggccggttgggttcacctccgaattcctcctgtgcgatgagagaaccaggcgaggcgagaaggagagggacgggagcggtagcttttggctccgtgttgtgttgtgttgggctttgggtgcgcgtcgctttcggccgcgctagctttcgtctccgtggaaaggaggacgcgagcccccgtgtaggtgtagccgcctcgttcggtttccgctttgacccgcggaatctcagctcaaaaaaatcatcagcgccacgcgaaaagacgagaaaaattcatccgatctgctctcaaactcccagattctgctcaaattttaaacgtggacgaaaatttgcagtgcgagtgcagggacagatcaatggagcactggaccgctatcgttgtcgtccaacctgtcgacaaaattaagaattctgacctttgtttgaatctatcgggcagttcgtcgctgcgagagattcagacagggggacagcgagttcacaacaacagttctgcatggggcctcgctctgtgttgtttagcacggaggaggggggaccagattgggctcgtgccatgtgagtaagtcttggcatttgttcgtagcaagtgtaggcgccagtgacatcgctgtgcggcacatggccatgcagatgagtgtcctggaacaagtaggcggcagcactgtagtcctttgtctggtgcagctgggactccagcaacggtacgggagaaatcaggattgaagtaacgagtcgcgcagaattaggccctatttagttactaatttttttttcccaaaaagtcacatcgaatatttgaatatatgcatgaaacattaaatatagataaaaataaaaaataattgcacagttatgagagaaatcatgagacgaatcttttgaacctaattagtccatgattagccataagtgctaatgacggcttaattaggctcaaaagattcatctcgtggtttccagtcgagttatgaaattatttttttaatttgtgttcgaaaaccccttccgatatccggtcaaacgtccggccttaatagttggaatcactcgggagtatttgggagggaattggaagatctagttcgccacgtcatgtgtttgatttattactatagctatgatttgttgtagtttcttaatatttactttctaactttgttacaatcatgattataacaatttattgggcaaaaaaaaaattgacatccttgcccagcacgagttataacaatggtagacgtgactaaacaactcttaaagtggtctaatatatctatattcctaaaatgaagtagtgctagttgcagtaaatttgttcctgtctaccctgttttctttaaaaaaaattatctcttgaactccttgtttttttttaaaaaaaatcgaatcttaatggatagcatgtataaaatcatataaggtcaatattccctatagtgaaaggatacaaaacatatattaaaaagtacaatttaatttactgtaaaccattttttttttgtgccaatagcaaagtacggacatttattagtaaattcttagaagtatgatagaatataaacatatttcatatgtaaattctcgtgacatccagaaattttaactatgtataattgtaccacggataatctagaatggtataatgcttatgttgttctgcaattgcaaataatcatataaggggaaaactatatttaaccacttaaaaaatgtggttgtgctacttaaaaccataaaatatgatacttactacaacatggccaagtgtctagactccaccttgaaagaatctttatatcgtctatagggtagtgaataggcatttcctgaaaatttaaaactcttttacagcggattagtagcactcggaatctctaggcctaggagattggagtctccgagatgacaggaaaatacccccaaaggggaacaagccatcaacacaactagtacatagaaaatatagcaataatggatgtaaactagtagaaaacaagatacacaagctatcacaagtaactcgcaaaagagatatctatcaatagcacaaaaacggtaaaagagtgcgaggagacaaacgatttgttcccgaagttcggattctccttcgagaatcctacatctccgttgagaggctccagggagccagatctcacttgatccctttcctcaccaagctagcaatcacaaggaagactaggtttccaagcaaccacttaggattagcaagtctttaaatgaccccaatgtttgtttagatgatgagccccaatccaccggtggcacttgctctaccaagcataactctttccttgttgagatgagggaaaccttcacaaactttccgtggttcaccacatggttggaagctcaccgggtgatgccttgtcgtcaaggagggttgacctccaaaagtattaaacacaatcgaagatttgcttgctatgaacttaaatgctcaaagtagctctcaacttctattctcaacctctcttcaatcccaaatccttatattctcaaatccccttctcaaatcacactcacaaaagagttctaccacaaaggtatgatatcagagagtggctctttggttttggatggttctactcttgtccaaagttagaaaccatggatggaggggttcaaatacccgagctctaaagaaaatagtcgttactcatgtttatgcgcataccccgaagtctcctggatttggcctggagccttcggtccaccccaagaactaactgctaacacacgggaaaccttctcgggtgcatggatgttatttccagagcctcttggaagcctggcttgcataggcccggagtctccaagtcccggcccaaagcctcagggaagccttcttgagtactcgaagtctcatggccacctgacaacaaccaagaaaaaaaatgtgtaacttcttactccggagtccattttcgacgatctgattgatacacataatccatagcttcaaatggtctcctacggcccgtacgacaatgtcttcacttgtccttctccaccggattcggtttgtcgacgccaagtcccttgcttgcccttcatcaccacacggtctatcatagccatgcttcgcttgcgcttcaccgtattgtcataggtagcctttttatactccgcgtgttcaggggccctttggatcaaataattttatgcaggaatttcatatgattctaatcctataggaatttttcctatgtggccatttgac

SEQ ID NO: 10524 - DNA, 31511 bp, Oryza sativa
  unsure (1)..(31511): unsure at all n locations
tggtttttcacttcccccagctggacactgtcttttccccacactttggtgaaacctttggctagatccatttctgatcatacaccttgtgtggtccaaattggaactaatattcctagagctaatgtgttcagatttgagaatttttggattgaacatgaaggttttttcgacttggttcagtctatctgggataaccatggttcctcccatgattctgctaaaaatatttcttcaaagcttaaagctttaagaaagggactaaaaaaatggagtaagaatctttccagactccagaagcttatctctaactgtaataatgttatctcttttctggacagtattgaggaatacagatatctttctttgttggagtggaatttcagagtttttattagatctaagctgcttacttacttaagatataagcaagtttactggcaaaagagatgtaccattagatgggcaaaatttgggggagaaaacacgaaattttttcatgccatggcaactgagtcctacaggaaaaattctattgcttccttgatagatgttgatggtactataatctttgatcatgagggtaaagctcatgtggcttgggatacttttaaaggtagaatgggagtttcaaattttgtgtctatgccttttgatctctattctttaattacccctcaaaatggtctggaagttcttgaggctccttttcccaaatccgagatagataatcttgttaagaatcttccaactgatagagctcctgggcctgatggtttcaatggactttttatgaagaaatgttggcccataatttgtcatgattattataatctttgtcaagattttcattctgggtcacttgatttaaactccttgaaccactcttttatcactttggtccccaaaaagttgacccctgaaaccataaatgattacagacctatatctctcatgagtatctctctaaagtttttgacaaagttgttggcagatagattacaaaaggtaatcctttcagtcattcatcagaactagtatggttttcttagaaggcggaccatacaagattgtcttgcttggaactttgaatttctccatcaatgtcatcattccaaaagagagatagttttgttgaaattagactttgagaaggcttttgataccattgagcatgaggccattttgcaagtcatgaaggtgatggggttcactgataagtggttgaattggattcagaagattttctcctctgcttcttcatcggttcttcttaatggagtacctggaaaaaatttccattgtaaaaggggggggggggttagacaaggtgatccactttcccctcttctttttgttttaggggctgatctcttgcagactattctcaatagagctttctctttggggttgctctctaagccctttccctcaaatcaggatcagaatttccctatggttcaatatgcagatgatactctcctttatgctaaggctagtggaagagaactctttactttgaaagctttgctccaatattttgctcaaggcactggtttgaaagttaattaccataaatcctgcttaattcctataaacatatctgatgaaaaggctgatttgctggctggagtgtttggttataaggttggttctcttccttttacttatcttgggctacctttgggaaccactaagccgagggtaattgattttgcccctttggttgatagagttgaaagaaggttgtcggcaaatgctgctttcctctcttatggtgatagacttaccttggttaacacagttttttcctctctgcctacatattatatgtgtactcttttgttgcccaagactgtaattgacaatattgatagagcaagaaaacattgcttgtggagaggttcagaggtaaactctaatagaaagtcgttggctgcctgggataaagtatgcaaaccaaagatgaaaggaggtcttggagtcattaacctttcaatccagaatcaggctttactcctaaagtttcttgataaattttataataggagaaaggtgccttgggttgacctcatatggaattcttactactcaggttgtgcctcatttttcaacctcaaagggttctttttggtggagagacatttgtaagttgatggatttattcagaggtattgccaaatgttccatgggtaatggttattcttgttgtttttgggaggatgtttggtctgaaaatccaccattaacctttctaatgcctaggctgtattcttttgcaaatgacaaatgtttctgtacataaatatctctcgactgatatgtcagataatttgattcttcctctctcacagcaggcttataatgaatatttggaactgaccgagtttctcagcaacatcaacttgtctcatgagaatgatgtttggtcttacatttggggtggccttaagtatacctcccaaaaattctatgccctcaattttagatcactgcagcctccgaggcatttcctctggttatggaagagtaaggtttctcaaaggttaaggtttttggttggttgcttctgatggaaaaattaaataccaaatttatgcttgatcataagcactgtgcccctcccaattgtgatctcttttgtgtgctttgtcaacagaggtgtattgaaactcttgtgcacctcttcttttgctgtcctttttcggtagcctgctggaatcatattggcatctcatgggattcttctctcaatttggagagcatgcttctgttggctaaagctctttatctaggaaaatgttttatggagaaatttctcttaggtgcttggaatatttggaagcaaaggaatgggtttatttttttaggataaattgcctttgttctcttcttggaagcaacttcttaagggagatttgcttcttttgctgtttaggctcaatgcacaagatcaagatgtagtcagggactggatccgtctgctgtaatctctttgtaatttcatattttatttttattaataaaattattctaacagcggggccctcccctgctgtgttctcttcaaaaaaattctaattaacggagtgctcgatctgttgtttttatacttttattgtccgcactttgtaggaaaataacattggcgttgttcggctaccctagctataacaacaagcctgacaatagtgctccgtgccttttatagctgtaggatagccgcaacaatgtcaaccgaacactgccaatcatcatttcaaatctttacccttgattcaataatttaaaaacacaatagcccgtatagatgtatcagctgccgtttactctacgattatactactacaagtagaacgttgggcgtcaaatgctatccaaaacgggtgccaacgttcgaacggccccacatggaagcgtagcctgttcacacggggtgcaagaacgtcatttccctacgtttttgaattcgaaaccgcatccagagagccgaaggttcctgcggcgcataggccacgtccataggccacacgcatcctaggcactcaagccaagcaaccaacggtgatagatgcgggacgccccatgcaccgggtccacggaggcctcagacgctccgttccttgtcacgtgatgttaagcatggcctggaccgggtctatacgccacacgcggtagagaatgcctacggggcttagcgccactcacccacgggtctatagacacggtctatgcagacgataggctaaaacatttcgggcgtgtgccctatttttttcaatttcgccgggcgggcgcttctccctctcacccattcgtcatttcgcaaatctctctctctccctctccacgccaatctctctctcgaggagggcgatcaagccctaaccctaacgaagccccccgcgacgccgccatccagatccccggagccagaggcattgctcgtcgtgccgggagattcgccgatccgccagatcggcctgaccgaggtgagttttttgggggctaattttagatttctagggtatttttccgtgagctgttggtctgattcgttttgggggattcgtggttagggttccgatggagggttccgaggcagcgcagcagaaggacagcgtgaaggtggtcgtcaacatccgaccgctcatcacgccggagctcctcctcggctgcaccgactgcgtcaccgtcacgcccggcgagccgcaggtatcgatctgtttggggactagtttgtctggttgggtaggatcgagtggcctgggggacgcgatgcttctgggattttgaattgggtgcatatatgctagtataaattggcgaatgatgtgacaggccttggggtttttagctaattcgatgataatttgggtagagtggcttggcaagggccaacggtttctttgctgggatggatagtgaaagatctatgcttgcgctttgctgattctgagctagtttgaataatatctttaatattatagttttaccactcgcaactcctatccagatgtctaaatcctaatatgaatgctagttaagaatattgtaattttacctggacttttgtattgttaaagattgcttcaaggcccaactggtctgacgatgccttctgtgctattgtaggtccaaattggcccacatgtcttcacgtatgaccatgtattcggcagcacaggctctccttcctcgttaatatttgagcaatgtgtgcatcctctcattgattcattattccgtggatacaacgctacagtcctagcttatgggcaggtgcaaattctttagtatggtggcactaataatgatgctagaaatgtttttttagataattgttttgtgacttgtatttttcctctaacaaaattagactggctccggcaagacatatacaatgggtactaattatactggtgaagctaattgtggaggaataattcctcaagttatggagacaatattcaaaaaggccgatgcattgaaggatggcacagagtttttaattagggtgtccttcattgaggtatcatacatggtggcatctattgttgttttgccagttccaactgccatcagtttcattcgtgataacatttttgagatcttttgtgtgcactccagatcttcaaggaggaagtctttgatttgctagatgcaagtcatgctgccctcagacttgattcagggtctgtagccaaagcaactgcacctgccagagtgccaattcagattagagagactggtaatggcggcattacacttgctggtgtgacagaggctgaggtgaagacaaaggaagaaatggcctcatttttggcacgtggttcttcctcgcgtgcaacaggaagtacaaacatgaatagtcagtcaaggtaagttacaaaggaatgatagtatgcttatttaaatttacagattagtttatgcaatttctttatgcagagattatttttccttcattgcttctggggttcttgtgccatgtttttaccatttaaaaggttataaatacaatattagcacttcatgcataatgaaacttgcactcgttaagctgcatgcatgttctggttttgcattttgtatttctgcataataggtatagttttgcatgatatatttgcatcgacgtatagatgcccaaaagtatgtgtttttgttatcaacaaaaaggattgggtataactttattgtacttcttgacattattggagccaataatataattggttagcaatggtagtatgagacaagtaggtgttttttacaagtccatttactatttgaaaatttgccattaggtctgacaattctttctgttggaatgacaatttttctttgtagccggtctcatgctatctttacaatttcaatggatcaaaagaagacctcgagtgcctctgacaagttatctaacgatgactatgatattttgtcctcaaagtttcatctagttgaccttgcgggttctgaaagggctaaacgaacaggagctgacggattacggcttaaagaaggtaaggacggatttacctattaagttgagaatataattgggcatctgatctgaacagtgttctatatattttgtggctgcaggaatacacataaatagaggccttctagcccttggcaatgtcattagtgcattaggcgatgaaaagaagagaaaagaaggagcatttgtcccatatcgggacagtaaattaacacgtcttctgcaggtatggatcctagttatgtcacaagcatattaaatactcaaatccacgaattactggacataaaaatatgcgattactttggacctgattgctctgtcacagtggcacgtttgcatcatgctcattactatattcaattttttttgcaggattcgcttggaggaaacagtaaaactgctatgattggtaggtatatatgtcttgatagtaaatgttgtattggtagtatctttactaaaatccatcttctatgttgtttatttacctgtagcttgcattagtcctgccgattcaaatgcagaagaaaccataaacacactcaagtatgccaatcgtgcacggaacattcaaaataaagctgtggtatggtcattctccttaaaggtatgctcacagtattttttcagttgatataattttcccactgtgtcctatgtgtagataaaccgtgacccagttacagcagagatgcaaaaattaaggagtcagttggagcagttgcagactgagctcctgttctcccgcagtgggagtgctgctctagaagaactgcaggttggttttgcagatctgcaaggtctggttgaatttatcgatttattgtctaattttgtttatgcgtctttcagctgctgcaacaaaaagtgtctctacttgagctaaaaaactcagagcttaaccatgagcttaaggaaagggaattgtcatatgaacagttggcacaaagtgcacttgccgcccaggtatttatgattgattcctgtaccctggtttatctaagtgaagttccaatatacttgtgcataacattattttgtagtactacatatgagttcacattgctaggtgatgctgtatataggtgtattctagatcatgtaatatgtttctctggtaactattgcaattagtatgaaacacatgaaaattatctgtaacatctctagaacagaatgtagctagtaaactaacatgcaaactgtctaaagaaagtaggcgtgaataactctgctaacaataatatgttacagcttgaaaaggaccagttgatgttgaagattgaatcagcacgcaatgggaaatcatgggatgacattgagaatactgatactgaccaggtatgtccacccatctcctgctcttcagatttgtgggaatatttcttaaacaacgtaattgaacaaatttttacatatgcttttgttctgagcaggatgtggaggtcatgaagagatatattttgaaaattcagcagttggagagtgaactgacaaggcaaaagttctctagtacctgcaaaaatgatttacatgatcggtttgccatggacaaggatttgcttctcgatgacttgggttcaggttgtgaagtaggaacacctgatgcttcaagtaagtaaaaggaagtcagaattactttcataaaatgcggttgttatacttttttgaataagtagcttgttctaagtcacattttacaatctagtgacttctagcactatatctaggattatctgtatgacatgttgattcttcttttaacatgaccactttatgttgttttagctttacacttgttcacacgagattggtgttaatgcgtagaacattgaattgaaagcagggcttttgtgcatcacacagtcacttttgagtctgcgctctatgatattagcagtgaacttgcctgtggtgtgttcctgtgtacatcagtatagaataatataccactaattaacttactgaaattaacagttccaaagaactgtagaatttttcgcaccaaggactagggtttcaagtactggtttgtatggagttattggcccctagtgaaatacagtaacgggaaattggatcactaactggttactgcccggaaaactctaaaattaaaatttgaacattctaaatctaatataggtgccgtaaactttagaataactccagtacctgcaggtgaagccgatgaagaaaaggaaagagaccattcatccatgcaagacaaacttgataaggaactccaggaactagataaaagacttcagcaaaaggaggtacaatttccccttcttaacaagtgttgctgttcatagacaaggctacaacaatttgacttggtctaaacactttttacatgaatttgattattctaacactagcttttaagttatatgtatatgtatatgttttgatttatctcactcatccatgccatctgtacaccttttttttttcgaacaactgactttatatcacatctatgtgaaatttttttacgttattctattgtttgattcacggggagtgtaattatattccattttcaattccaaaaggcggagatgaaagaatttgcaaaaagtgacacctctgttctcaagcaacattacgagaagaagttaaatgagatggagcaagaaaagaaggctcttcaggtttatttgattaaaatggacaatttcttaacttctatctttaaagattagtaacccttttttttgttttcagaaagaaattgaggaacttcgtcatgcattaaccaatattacttcttctactgatgagagtgcacaaaaactgaaagaaaactaccttcagaagctgaatacacttgaatctcaggtgcgcacacactataactgccttttctcttcctcagatactgattgccattgttttgcaggtctctgagctaaaaaaaaagcaggaagctcaacagcagctaatacgacagaaacagagaagtgatgaggctgctaagcgcttgcaagaagatattcatcgtataaaatctcaaaaggttttctcctcacagtttcctagagacccaaacatagtttagctttatattctgacatatcctcaatatgtgttatgttaggttcaacttcaacaaaagattaagcaagaatctgagcaatttagatcttggaaggctgctcgggaaaaggaagttcttcaggtatttgctctttctgcttgcagtttgaattcttgggaaatccaaaattttcaaaagactggggtgatcacgtgatatttctgttaactagctcaagaaggaagggagaagaaatgaatatgagatgcataaactcctggccctaaatcagaggcagaaaatggttggatttctcagtcatctccctttctagactttctaggtaacatgaaagtaataccattcttcttcaaaacataggttttacagcggaaaactgaagaagcagcaatggctacgaaaagactgaaggagtcgcttgaagcaaaaaagtccacccgtgacacatatggtaataagctgaaaacatcgactaattttatttcccattcagattactgtgcacttgtgagcaagtaattcgtaaatactgcctcatggttgaaaatttatttattttttaaattttcaggaagtgcaagcggttctgggattcaggtattatcactgaaactttgattattttttgtttgcatatatagaaaataatgctttcccattgcatttcatctgaaatattctcttgatatgtcattaggctttaatgcgggccattgatgatgaacttgaagtgactgtaagggcatacgaattggttcgcactacgagcgacaaatgcaagagtaagtctttgtcttcatgatggatggacttccacagggtacatttattttttttaggtataacacattcatgtatcaaataaatgggtttcagtaccttaattacaaaaggtagcccctagaactcgacggtatggatacagcctgagttaggtcacatgatgttttttttttttttttgggggggggggggtgagcttaagctgccattgaagttagggtggttggtcttcttcgcacatccagttggacttcttttctcttaataatgcaatggcacacaaacttttgcatattctttttttttttttttggggggggtgagcttaagctgccattgaagttagggtggttggtcttcttcgcacatccagttggacttcttttctcttaataatgcaatggtacacaaacttttgcatattcctagaaaactgtcttgatcttttcatctaaattttaaccaaacttcttttgtttccaaaaaaaaaaaccttttgctttgagccaatccacaatacatcattctgatcagtgcagttcaaataattgttcctaactttcattctggttgagaaattgtttctcattattctcctctaatatcattttgtttttctttaacaggagagcagcaatctccaaggaaatagcaaagctgaaagagtgtcccaggctatgtctcctagtgctagaagttctaggatatcagcgctagaaaacatgctgtcatcatcatctagtgcaatggtgtctatggcttctcaactgtctgaagcggaggagcgagagcgtgcattcaatggtaaaggcagatggaaccatgtaaggtcccttcctgatgcgaagaacacaatgaattacctttttcagttggcatcatcttcaaggtatgtcatactttgctttctgaaatgtttaaatcctcttaacattttctttggtgtttcttttaatacgaataaacaaccctaatttattgatgctgtttttatttgatgcatgttgcctatagatgtcaacaacttgacaaagaggtgatgtgtaaagagaaagaacacctcatttgtgacctgaaggaaaaggtggttgcacttaatggtagaatcagacaattagaaactcaagtgaaggatttgaataaccaaaatatgctggtaaatattctgttaattttgcagtctggcaaatctgattacattatagcaattttcatgatgcatttcaccagtatatgtttgattgaatcgtgtgtgtgcttatactttttcaatccacagttatttactgctataagtgaagcaaaaaatcctgttggcacttccagaaagggtactgttggttctgaagatggtcaacattatgctatgcgaaaggtattttttttgtatcttggttcatctagattatatgtggtgatatccaaaatgcactagatccatataatccttgtaaagtgtgtctgacatcttcccttttgcatgtagagcattcgagcttcccatagtttacattatagtaagaacagcttcttgtggtctgatgacatggatatatcagattctgagaaatcggaaggatctgatgcagattgggaagcatctgatgcagactacggagcatctgatgcagattgggaatgttcgaagaaggtcagaagacgtcggcaaacagtgtccagccatctgaatcctaacccgggtagtggtactacacaaaaaagtgcaaaatcagaaatggccagtcaagaaaagtctacttcactggaccttgctccacagtgctgctcatgctcgaaatactcatcctgcaagacccaaaaatgcgaatgtagagcttcaggttcacattgtgggggtgattgtggatgtattacctccaggtgttctaatagggtggatatgaaggaagaaaaggaaggtggtggggtggttgaagtatcttcttcagatgatgtggatgatgcaaaagttcaggaaattgtgaaggagggcgtcatgcttcttgagaattctatgtcagagaaggaagctcaagagacaaaatcaagaaaaccactggctgatattggaaatggtgtggtatgtgctatgcttcactccaggccacattgtcttgttgattaaatttgcatatctttcaatggatataattaatcatcatcattatcgtgcagttttccatgtcacagaaatgcctcatattgcttcacactcctttcaggtgaaacaaactggggcaaaaccaaagcaaaggaagaattggcgcaagtctaccgttcagctcgtcccttcagcgccacctctcccacccacggcgccgcagaacaccgagccggttccacggaacagagacatacccctcaggctgccccgagcaatgtcctcaccagctgtggacagcatccctctcacggaccgcaacgccgcgaagcctgacgaatccatgagcagcaacaaggagaacgtcactgccgttcgtgcgagatctcctgctcggccgagaaagaacgccaacgagaaagagaatcacttgcgatgattagttgatcaattggctcactcgagcctgtgaagctgcaagcatccaacggctttgttgcgaagccttttgatgttacttggtggtggggatgctgcctcggtgtccctcggcatggccggctgcggaggcaaatagaagtgaacctctggagttcctgtgaactgacccgctcgtgatgcaccgttgtttcactttgttgtcttttgttaagctatggctgatcactcaacgttgaatgtagacactttgtacaactcttgttgagatgaattaagttggttaatttatctcatggtaatgggtaacatttccatcagttggctcgcacttcatcttcgctgccttagcctatcctagttccttttgaaaaaaagtttatttgttttcagttacttctttcagtatgggtaatctttgggctcgctgttttgccttggaccgtgtcctgggttaccatgttcctgtataattgcttagtggaatttaacttgcattacagtagtaaatgcgtaaccaatcccactaaaatgctgccaatgtaggagcaaattggctcaatctgctgatcaacaatggaattcaaaacatgataatttcaatattgatagaagaactaatagtgtgtagatacccaacacgagacattaagcgagcactctaaattcactcctctagaaattaaccagcaaatgctatgagtctgcaaaagattttttttttttgaaaaaaaaatccctcttaaccctatgtatctcatttttgattttttttcccttagtgttactccctttgttctttgttatagaataaacaaatctagtactaaaggatgtatcacatctcgtgctttatttatttgggaataaaggatgtatcacatctcgtgctttatttatttgggaatagatggagtaattgttaaagctatattaatgatgttgtcttggtcttagtttattcaaaagaaaataattaccttgtgagttttgattaaaaagccaattattttataaatgaaatcagtaatagtagattattgacatggagttgaacctacctactatcatctgtcatctgtgaccagtttctcgtaatataaggcagcagcgactagtggctgtggttcaacagatacatctcggacactgttttaaatcggcgattgaaatgaattccctcttgtttcagtttgtagggactaaagttgtcaatttcttttagcagaaagattatggtccttgaaaaaaagtactgagattcacatgatcatacatgtgcatgttattagggcattcctaatgtttgttacaaaagttggtagtaagataagtccatgtcagaagacaatagtagattgaaaataaatcacaaattcacaatgtatatatatgtagagtggataataaggacccacataaatgtagagtggataataaggacccacatatatgtagagtggataataaggacccacataaatgtatatatatgtagagtggacccacataaaaaacccaaaacatgagccatgccacaattaaaaaataggtagaacacaccacgaagtgacaagtcaaacatgtttaactttgatcattaatagcaataaaataataaaaaaagatcaatcatgcaaaattggtgttatttgatttattattaaaaaaactatcacaatatacaactctttttatttaaaacatcttacttttatagatattgttggtcaaagtagcattttagagactgtgtcaggatctaaaaatacttatattttgagacggatggattagtaattatttactactttcacaatatatcttatctggtggcaagaatactttaatccctatatacccaccttttcactatattatggatgcaacatattaaactatttggcactcttacaagtgctaattaagtatttgtcattggacccacatgtcttagacacttaaggacccaaactatgagtgataaatttttaattgctacatcttaaaagtggcaaatagttgaatacccctgtggatgcccttatatatggatagtatattcacccgtggaaatttatgcattattaaaaaaaacacacacaaaaagttggcaaattgcaagacgaggccatgggcggatctacattactagggctagtgtcaggcgacaccgacgacttttagcaaaacctataacaaaactgcttatctatatgttataacaaaatgatctaagtataattagcatactatgataccgatagacacgttatgataccaacgaatcgattttctggatccgccactcgacgaggcatatccgcctctcatgctggagtgctgggtccagtcacgggacgatacggatgaagtactactcctcgcccactgcatgctccctagtcccttccgtagagatgcacggtgcgccgtgccgccgcgcgctgtggccaggggcaacgccacgtttagcttgccgagtgcacaggcaccagggaaaaatttagtttttagttattagcatctaatctccatcttttatgcactccctagaaaaaaatatgtgtaccaccttcagctactgcacgcagcccatgaaggcctaatttcaaatattaaatcatctaattagcacttttttacaggttattatcgtctcattaaggactcagcttaattatatattttgcccattgctatgtagacatgtactaccagattttttattttggtaagcattttttgtcattgtatacattacatttacatttctattacatgcataaatgaagtgtgcactcgggtcctccgtgctctagattcgcccttggctgtggcgtcgactgatccgcgtgtgcttccctggctggctggctttctggccaggtgtcggtggacgaacgttttcattgtgctgttggcttccgcctcctcgcggcgccggcgccgtgaagagttgcaaacagcagggaggaaatatgtaatctgacatgttagacgagacgatggcaaggcgccaaggcagaagagtctgaactctgaaccagtacaaatcacctcgctggcgagttggctatgcaagacagcagagttcaatcacattaaacatgagaagctagaaggatgcacagtctcacattacattcgatccagtgcatcgaatagagactagaaatgccagtgccgcggctgcatgcacatttcacagacccgtacgagatcatgcacgatccatggagagccgatggaccgaacagttccacgacaaccaacatatgctgcccaaccacttaatttccgcagcttcttcctttgcccaacaatcagtcaagaccgggccacgccgcacagtaccacgtacgtacccggccatgttacgttccacctgcagatttcttcatcttccacacacgcccaacaaatcattgcccaggttgtttctttcggcgaaaaccctgtacactgaactcggacgacgaacgagttgacggctcacgacgctaacacgcgaacgaacccggtcatctgcgtgcatatgcagcgtgccctcgcggcgtgggcacggcgagctctcgctgatcctgtgcacgcaccgtgcggtcaaaggatacaaacatgtgtccatccatccacagggaccccggcccccccgtatcgtccatcatatcgtagtacgcatcgttgcagccacggtcagcgaaatatacggagatgaccatactgatcgtgtatggggacagtgatatatatgtatatggagtatgtagtaggggcgaactgtacacacaggtcgtggacgccattgcgagtaattatgaacgaattagcagtgcacaatggatgacggatcacagcacgtaatgtgtgtggtggtgtttggatacatggcctaaacattagtctatatagcatcgaatgtttgaacatagactacttacaaaaactaattacataaatgagagctaattcgcgagataaattttttaagcctaattattctataattagagaatgtttattctagcatcacataggctaatcatggattaattaggttcaataaattcgtctcatgaattagtccagggttatttatggaatgagttttgtcattaatctacgtttaatacttataattagtgtccaaacatccgatgtaatagggactaacaagttttagtcctatcaaaacaccccctaattatacttataattagattcgtctcgcgaattagtccagaattatagaatgggttttatcattaatctatatttaatacttataattattttgatatgaggaggagtcaaactcaacgatggcgatcgattgatgtgaaggactggatcgatcacggaacctttcacgtttcccaatgcatcgatcgatcgatccgtcgacagcgccgctgcatccgccgatgagtgaaacggacacactcctcccctttacaagttacaactcacatgacatcggccgtacgtgcatggatgcatcatgcatacatgcatgcgagcgtcgcatggacaaacatggtgaaacacacgacatcgaaggctcgaagctagccgtgggcggccggaggcatcgtatactggcagccagcgtaagagagtgacattgaatcgattccaactctgcaactcactgtgtctctgaaactggtgtggttcagtgaaacagtgaaatccgcacggttcattctagcatttttcacattcatattgatgttaatgaatctagataaatatatatgtctagattcattatcattaatatgaatgtgggacttacattgtaaaacgaaggaagtattaattaataagttcaacagtgttttaagttctttaaaagaattcttataaactccttactgataaaaaagtatactataaaagttttaaaaaaatcaagattcaactataatacaacacattagcatttgtaaaaagcttataaaaaaattgctatgcacccgatacatatgcacaacttacatccggctaattcatgtacaggtgatgctgcttacctggtctcgcatggtaaaacactaaacttaatgattgatggatgtggtagtcttatagcattactcttctctttataaaaagaatatttttatatcattttccagaggttaattgccttcgtaggtttggctgatgtgacatgcatgatcgagcaactgtcttgcagcagctgggttttcgtcatgatgggtagccctggtctagttgctttggtgcattggctttggaggcaaattgaattgatctggacatcagagacgtgaaccaatccgcaatgttcgcatcatcagggcaatgttgccgttaaaattctttcaatgaacttgtctcttgcccagttgcattacaaacttggccaattgtcatcctaggatatgattgaacgaaagggttattatcacgatgagtcatgaaacccataattctcgatcggtccataatggtgaacacttgaactatgaacccttagaacattaaaaagttggcaccctatgttgtgtgaggaaaatgtatcaaactttacgctatcaatatggcaccgctaatatctcaaaaagattgtaaaatcagttggtaataactactttataagtttaaggctctggcagaggttttataggattttctaaagaaaatcatatgaattggaaatgttccactatgggcgagatgatagggagtatcatttttttttcattttaaaaattattttaattatgtaactgatgtttaattaaaaagtggaggcaaacgaatttatacacgttcgtttaaattgtacttccataaaccaaaatataacacattatagtttcttaaatttattctaaaatataataattttttcacctacattatcttctcaaccaaaacaaaacaccttctactgttcaaattatgtatctatcttcttttttccaatcaatcacaatctttttctatttaattctattaaccaatttaatatatgtgtctaatcttaaaattttgagtaaatttcaaaaaactacaactttagtgacaaaactatcagtttgctgtaacattaatgacatgtttcagtttgctgcaacaatagcatagaaaattatcataaaactacaacttttacgctatatgatgctatagttgttacctatatgtactgtagcagcacataacgtaaaaggtttagttttgtaataattttccacgctattgttgcagcaatctgaaatatgtcgctaatgttgtagcaaattgatagttttgtttacagtttcctaaaatttactctaaaatttccgatattacgcaaaaatcaaacttgctggtaagaatgcagtacagtgtgattgatcgacagaatctgacgtacaggatatcgtatgtacgttgcagtacgacacctccaactagttcaaagcacgcagccgcacacatgattgggttaatatagaataatcatcacaatgcgacactagaagaaaaaaaagaaaagatgttacaacaaccgtgcgcgcacagcctcgagacggagacgtgcagagagagaggctaaaacactaaaacccctcgtcgggtttagccacgtctacgtagtacggcaccagcggcgtcgtggcggcgctggtgctctcgccgccgccgttgcccgccgcgtccatggcgtcgtccagctcctccttggccacagagccgccgccaatggcgccgcgaatggcgccgggcgccgccgtggggccgaccgacggcagcttcgagaggagcgcctccaggctgctcatcgacggcacgatgtggtgcatctgcgccgccgcggcatgggcgccgtagtaggggtcgtagaggtccatcgtcggcgacggcgcccaggccgcgtcctgcaggccgccggcgccggggaacgcggccgacgacgggtgcggcagcagcacgcccgggatgctctccaggtacccgaacttccgccgcagcgccaccacgtagctcaggtcctccgccacctgcagccatggacgcaacgcaacgcgacgcaccaatcgatcagcacggccatgccgacaccaacacggcggcgagctgtacgtaagggtgtaaatagttaacccgtaacctacttacaggttaaaataaataatttattttgatctataaataagtttacggttaactgcttatacccttagctataggcatacattgcccccttatttgtcgtgcatgcatgcagctacgcgaagccagtgagcgagcttgacatgatcagtgacaccaagtcacccacagtgcaactgccagggttgaaaatttcgaatcgaaatttcggtcatttcggtgaccctgatacgatattaatttggccgaaatttttgaattttttaatttattcatgaatttggataatatttttacaaattcaactaaattttgttcaaaatttcagaaatttcggaccgaaatttttgaaattttgggatttcggtgacccccgataaaaacccctgaaccgatagagtaaaccctggcaactgctgcacacagtagagtgggtgaagaggactgaagaacagagcagagaacgggcgtaccttcttcatggagcctaactgtacaacgccttctctgacggcgatcagagcaatggtctgccaaaaaagagagtaaaaagatcatcagctttggcattcacaaactctttcttggtaggtacgaggcgtacgtgtaccttgataccggactggaactgagcttcccatgtccttggatgctgcaatcagcagaaattatacggaacaaaaacatgttaattgttgttattgcaagcatcaatttaggagttttaaccgaactgattagataggtgagaagatgctgcagcttacagaatcggcagggttgttccatgaggtaaccaggttgatctcgtgctcattggcctcctgggacacccacttgtggccatggtcagctgcaactttcccaaccaaccttcaagatggatcatcgcatcatgagatcgtgcttcacgtgctgactaaagtgattagcgtaggttttcccaaagaacatagattactaattaagaaagacggccaatactatgacactaattaattaatgatgtttcaagccaaactgctaattaattagtactaccacatacccttccccatagttgtagatgtcatgggacatcttgaagaagagctcaggctggaggcccttcacctcatgcccagctgctgcatagtcagtgtacccggcagcagctggtgtgtcctcttggtcacaggcagaggctgcaaagttgcagaatccatcctcccatgccaggatcctaggcgagttttgtaaacccccaagatgaatcacaaacacgaattaatcaacaaacaaatacaaatgcataaggaaagaagatcctgcaccaaccagttcctcctgtttcctctactcctgtcataaacaccaccctgaagatcccatctgaccatattgaggaaaaaaaaacagcaactagcatcaatactaaatatggagcaaaatgctactgctaattcttttactgtcaaactaatcagtgtcatcaagtgagtattcagctaagctgggattagttgactcactttggaggagggtagtttcttgggaggattcgccagaagacggcgtacacccactgggagtcgccttgggtgcagaggccgcgcagcgtgtgctgcagtagctgtgtcacagccagtgggttcagctgctcctccattgcagctgagctgaagctgcttctgttgctagctgatgctgcacacacaagcttatagacggccaaggaatcaagaacaagatactctagatgcttgctctcattagctatccacagatcactgtgtatgtgatgaagctgccgcttgatttgaagctgaagggctagctagaaaaagttgatttgaagctatgagaagttttggggggcaggggccaggagtaggtgtaggcgtttcctttcttgcttgatagcttccactttgatctctctaataagctgcaaactggctgggactttgtgaggccaggccaccacagagggagcaaccatacttgcctgaatttatacacagccactcaaccgcacacactctgaagagagaggaaactctttcaatcactcggggatgccatctcgtttattcaaacacattacttaaactgttataagaaaatctttaaaaaatagcgcactatccaataaatatttagtctaaactctacttatacatggagaaataaaaaaacaaatctaacaaatgaacagtatttgtactatttacacttgaatttacttttgttcttaatgtatagatcgagtttaaatttgattttcgatagagtaatagatggaactctggtctacaccgtcaatttttcatatattttttataattatctattatattattaaaggaatagaaaaaggagcctccacgttcgttctcatggcctagaaattctcgcattaatcggagaaaaagaaaaagcaggacccatatagaaatacaatttagaaatagctgaaattcgaaattaaaaagtaaggaatatttgaagaggagactagagtccatatagaaatacaatttagaaatagttaaaattcgggattaaaaaataaggaatattagaagaggagactagagtccatatagaaatacaattaggaaataactgaaattcggaattaaaaataagaaatattagaagtagagtatagagtccatatagaaataaaattaggaaataatagaaattcagaattaaaaataaagaatattagaagtagagtatagagtccatataggaatttaaaactaactaaaattcggaataaacacaatagaattaaaagtagagctttgagtccgtataaaaatacaatttacaaataactaaaattcgaaattaagaaaaacatgggaagaagagtttaaagtcaatataggaaacaatttagaagtaactgaaatttgaaattaaaaaattaaagaatattgaaagataagtttagagttcacatagaaatacaattagaaataataaaaattcagaaataaaaataaataatattggaagaagagcctagagttaatatagaaatacaatttacagaaaattcggaagtaaaaaaaagaaaaatattaaaagacgagtctagagttcatataggaatatatataatttacaaataactaaaatttgatattaaaaataattaataactaacacgtatataaaatacaatataaatattacacatttgtagtttcgtaaagttattgcaaaatttaaaattatgatgttattttaatatattggaataatataatgagaaatcatatatgctattatatgagagaaaatataatgatgttagccgcgcaatctacgcgggccaccatgctattttatattgaatttgagagatgaaattagagacgttcgagattagaatctgttgctataaagagagtcatactactacagcgatgactttaatgtggtgcattgtttctctcttgtcatagctttagccgagtggctaccataccttgcatatatagctttcctttttccttatgaattctgctctctagtgtctgtctccttggtgcccgcatcaagctgatcgtacgtctgtgtgctgacggagcctttcttgcttcaattcttcttctgaaaagcttggctccgagcctccaaccactggctaaagaaaagtaaaaaaccaaatttcgcaaaagttcatatgatcttaaaggatcgcacttgagtaaattcccaagtgcaatggaccttacatagttacattcacctaggcactgttcaagatgaccaattcacagtggtttgcggtgcccagtttctcctccgtagtccgtatggtttggagttttgattcgcattgcgtcagtattaaatccggggtcaaatgccggacccagcaaagaacacttggatggagctgaatggctctgcaattctgcgttacaattggcaacacactgtatgagatgaaattatggacaggccctacattggtctctcattctgacactgcgtgagagagtgctcagggatttttgtcactcattccatttcttctaacgttcttgatcctgatttctgaataatggcactgcgacgccaatgtgggtggccctaagccaataaagatgcaaagtgtgctgctgccttgagcaggggaacgaggaaattgctagctgctgctccctcttgttctgacaacctggaccaccggtctctccgaataacagtgttgtagtagtatgaaattagtatatcagatctgtctatgtgaatgtgtgcagatgcatgccatacaaatttatgggcctttgaatattcttatttaacttttacaagttattcgttttcattatcgtaaggcaaacgaattgatgtgtaaatatgtgaaggaccgtgtagagaaatgtcattaacaaaaggcagattttctctaagaactccaaaaatgcaatcaatttgtaaataaagggttgaacagaacttgctgcatttgcgtattacttttccaggctttagctaatttttaggcactatgtgtcttttagcgcagatgtaccaccctagtgttaaatttgtcgatcattttgatccacacacgcgcactatatatgcatccgaatccatcggtcactcgcaccagaaagctaataccaagagtcgtaagcatgcatgattgcatgccactttgtctgagacttcaccttacctcgatctggaattggtgtcaaatggggagcaaagcaatccctgcagggagccaatgactccaatgagtgaaggttgtaccttctcgttgcccaggatgatcccagctcgctaacaaaaagcatggcaaggatataggcaccatgttcaactcaataaatttcattaccagtatgtttggtgtgaaattttacgttcttgagagagtacttataggtgttaaaattttacactaaaaattttaatacctcaatatgcgcagtaacccatttttggtggtgcgcatggcagtaggttagagagtttatgtgttcaacttcaaacttggtaggtcatattaggcacaagagaattcaaatggcacgtttttatggaggccctctgccatcgatacaatctattagattaaatgcctgagaccttatttggatagctcgagatttaaaataaaactagtgaaaatctggagaaactaggttttcctagtttctagcatatatttcaaacctatgtaactataattttttagattgtaagtgagattctaaaagaaaatgtagctgctaaaaactcctacaataaggttgaatttgacatggtaatacacacttaccttgtttttctatgactgaaattgaaactttgcaccacccttgaaaggaatataaacaggtagaaaagtgatgaaagaaaaaaaattgaagataggggggcagggatactcagagcacgtatctttgtctctatctctactattataaaaattaaagatgtttttgccggtattttggtacgtcatccatgtataagtcggtttttaagatcatttacttttggtaatatagaaggaatcatatgagaaatatgtttaaaaaaactcgcatgctaacatatccaagcgaactctcacagtgaatttcatcttaactaaaccatataacaataatgagattaaaataaattttcacccgttgcaatgcacgggcatttttctagtcagtaaaaagtgaaactttaaatgattcaagaataagccacatcatttcattaataatggccatcggatttataaggagacagaatagctaaaatcattatggaccatcggatgaaggatcgatgatgggaagggcctcatcgtttggcttttttttaataagccaaaacggcttattagataataaaaatgaatttgtaggtaaacttttatatatgtgttctcgatgacttaaaagccaatgctaaaaagaaactacgttgaaaatatctcaaaatcaatgtcaaaattaaatttaaaaatttaaattttagttttttctttgactgaataggccatccgataggagccaaaataaggttcgagagctatcacgagtgttcaagtgtcttcggctgaaaatctcatctgagcttttttattctcttgtcaattttacacatgcacccctataagatcatttattctagggtcctctaaataaacaatattttttcaaatatgcttttgctctgatccatttacttacttagaaactcttaggaattttgtattttaaaaagtgaccaatgatgcaggtggtggggttgatgacatacgcaaagtggtgggtttatttactgaacgcgtacagtaaacttgaattcaatacaacatacgcataacaaatttgatatgatgacatggcgatggtaaaatttctataaataaatttgcttcaactaaatatataagctttgtgatacagtttagaagtttgacataatcacatggttaattatttgttattatggtaataatgcttaattcatatcaataaatgacacatttaaaattttaacaatgatggaggtgtgggcgtgaaagtgtggtatattattagatgtgatcttaatattgttacttacaaatcaagataaatctgctaatattatttatgccaagtatattcttcaaacgcatctacttaagttgtaaattactataataattatagctaattactcaaaacaacaaaccacaagtaaacacatttaatataaagagaggttaaaggttgcgagaatacgtgaccctataagctagtattaagataaaggatatcgccgttcacaagagcatctcagttatgtacaaacaggataaaaagaaaaaaaagaaaaaggggtgctaaaggtgatgtgtcctaaagtccggtgcaacttttttcgggcggaggtggctagatgggcgtgcccgcctcacgccatagggcagtttctatcgttgcagcctctacaaaagtgatggaaggtgtacacatacaaattcactattgtgtcgtctctgtaccatattttcttttgttttatctaaccagattgacaaaaggtatgaaaaagtaaagaatatttctatttttcacgttaaacccaaatttatgaaagaacaccaatcaagattcaagaattgtttcaacagagtgaagtgatcatgcattcttcccatatgtatttcagtatccatctgcttgtctgttcccttgagagggacttgtgctgaaagaggcaagagctttgaaatgttgccatcgggctcatccgctcatgggcaaagcctatgccaacactagaatatgagacgacatgcttgcaatttctattccttgtttctgataggaattccaggacatgggatttaatgcagatgctgtgggagggaatgaaggtatgggcgtcagggatggcaagggatatgcatttgtgcatattgctactggattttctcattgtcctcatcccctgtacctcaaacaaatgcaacaatgccgaagaggtcaccaccagaaacagaagcagaaggctctcgaatgcaagaaacttcaaaaaccgaaagatgagaccctctgagccggctaacggctggggtgacagatatgaattttttttatacctaaaaacaatcacacctgttatttgcatgtgattaaaatagttataaaattatatgtgcatgcgacttaaatatatattaaagtttttaaaaaatagtaaaatcgattagaatgacataagtttgtacacaaacataacaggctaaatacgatctacaactaaaaataataattaattaaactagacaacaaatagtgctctatgcagcacaaatataatttattgttttttcttcatatgtagatcgaatttagactggcatgtgttgtgtagtgacttgtattatcataatttatactgttacaattttctctataattttttaagacacatgcataaatttaggtgtgattgtgtctaggtgtaaaagataatttatgttgtgatggcctctgattaatctcatgccgtgaggaggtgacattggaggaggcggcttccactgtggagtgagactaaaggagaaaaatatattgggagcgttcagcaggcggctaccacggctgcagctgcggctgctcacagtgagggtaatactattcgtgccggctgtgccgcagccacgaaaacggccgccgaacaggtctatttttacccatttaccagggagcagcacccagtaagcatggttgtggtatcgacaggtacccaatctcaatagttgctcgatttggatggattaacggcttagatttggtacctcacttcccgtcttccggatgataatacacttcaacagcctacattatagttcaaggatcacacgccaaaacctatactatgttattaacccatatttaatcaagcttgcagtaatgctagatatacgatcgcagatcgccgtacacatgaagcaaattgggccattggggggggggggggtgggtggttcagggttgcgttggtcaaaaccacgaatcgactagacagaagacagatcgtcccaagtgcagagaactgcagatcgcaaagccagcatttgattacttcatcaacactatccatgtttgcagcgaaacgatcaaacgaaaagctccaagacgatcacgtgaccgacacctcattttcgtagagtatattgctctgctcagtcattatctaaaaaaaattgctctgctcagtactgtggagagcagcagaagcggggagaatttagttggaaactcagcatacaaactgcatagtgcaagactcctttttttaaaagatttaactatttgtcactcttaaatttaacgtttaaccatttgtcatttatgtataaataatatatggatccttatatatctacgatatgtaattataggtggccacatttaacagttgcaaatagtgttttttttttggcgcattggtgaggtgtggggctcgaagagaatagtgcagaagtttgtttttacggggggaaaagggatcatggagacatcaagtcatcaacgaactgatcaagaaatgttgtgccttggcaagtagccctgtgagagttgttgattgatgagatatagtataatactatagcttttgccaactaagttagctttgtctttgcaggtgtcaacatttttggattaggattgtgcctctctttttcttcagatagggagcatcttttccatttgaatccaggaatgctagtagatcgattgccattggataagaacatgattccctggatgagttccaacaggttcagaggataatggtttgtatagatcgaaagagcacatcattagggaacataaaaatgataactttctgtcattgaatgatgccctccctaccgtaccccagtaaccttgtggtgcttacctccactgcaacagtgttcagctatcaaatcatatgcgttatccaatccagtggcaacttgcaagctgcgactgtgacacatagtcacatgcatgcagctttcattgacatgcatgaagttacattattcagaaaccaaagaaagatgtgtgtgcaggtgctactgctagtactgcatggacagatgcttccatgtgtaaatggacaaccattcacagctagtatgactttaacctctccaaattgcagtcgttgaaaaaagcaagatccaatgataacgttagacctgactgaagcatgcttccaaatgattaagcagagagttctctgaagatactgctccagtacagtagtagaagaatacagccgttcagtacagcacaccgttgcgcagtctcctgcagataggacagtcacagtacttgttacgtactcgtacttctccgtatgacaagttactgttccattaccttggcctgccccactggtgattaaacgaagattttatggcttgcaccgctgcactgacctttcttcactctgcttatgtacctggagactggcactgaaagtctgaattgatcactcaatccagcactgtatcctgtggttctccctgaccacgacatagaaggatgaacaatgtgttaactataatcaggagaatttattgtactattagtactccgcatatacagtaaagtagaaacagatgtcataaggtttatcaggcctctgattatcatgcctttacatctcctggcaaacagccagtcaaatgcacctcaatacacaaggggtctgcatttgcacatgacaccatcactaagtgtctgtgtctactaccactagactactcatgcagcatcaatcaagcactgacgcactgcaagttcttgttctcagttctcaccatctttacagaagggaaggcacatggaaaagctagaagaattataaggggggcatcaaaacttgttcttcctttaccatagggccagtctggcctatggattcttcatcaaacaccattgatggtcatatcatagggtgtgagagatgagaatgtgaaagtagctacttctaccactaaccaatttcttgagaaattagctgccatcaaatcagttaacctcttgcaaagttgaaacttgcaaggtggattgatgcgtggtcacttaactgaccacttattattgggaacagtgttcagtacagtagccaggagcacaagactgcatgtagggcagtgaccttgttttcactttgtgcaattgatgcttttacaaggtgcccagctgcagaacggagatggtaaggtaacgaaataaattacatatgaaagacaggaaagccaaaaaattattagacagtcgatttattagtaatctgaagcctatgcaaagtccatgaagcacaccgcttctgcttatacattctaacggattgacgaggaatagttgggctgttgcctgttgggccaagtcactcttaggattcaggtagaacagatcaattcagctacgacaagtgaggttccaattgtgaatttcagggtagtacgcatatgcatatgctttgcacgtgtggattgctgctaaaaccacactgtccataatgctaatcagttgaaataagatccacttctgatggactggttaagccaaataacatgcnntctactgttggacgtctgcaagcacatcaagcattgngtcattcatgaggtcatagtgttgatacaaactaggaaaggtcatggacattgacaggcttatgagtacacttagtactagtagtagtaatgcaggcaaagatgttgcttttcctgcattgaaacgacttcagaactcagaaatgatgtataactactcctggaaacttattgataacaaagttcaattcgaatgttcgatgctagtagtgtcttccagatctccctttcaacatatgtaaaaaaaaaggaaaaaagattgcagcatattggcaatcagctcgtgtagtttgtcatattaaaagtaaattcatataatggaagcatcaatcgatgtcatgtaggcaaagttaggcatatgtcatggtctgcatgatgaacgatgaaagaaataatagcccgagttgatattgtcttttgaacaagcatgcaaatcagccacagttaatattgatcatggactgtactttcagatacataattattgatcatgcagttacaagccttaaacggtcaatttcagaaaaaaaaaaggagcgtctcatttcaaattgtgaatttaaatggaaataaatctaacagaacaaatagaaatggtattaacatttgcccttcatctagtgagtagtcacaattgtttcagaaattgcacatgataagtttcagtttcagatatagcactataataatctaacctgtaatcatcataattccacaggcaaagtatatactacctccgttttttaatagatgacgccgttgactttttctcacatgtttgaccattcgttttattcaaaaattttatacaaatgtataagatataaatcac

SEQ ID NO: 10525 - DNA, 921 bp, Oryza sativa
tgtctcagctcctgtagccgacctacctctgtcctagctctgacacgtcacagaaacgttaacatggtcagttagtcacgctgatacataggagtcgtagtacacagccgcgcgccgacccgaccgagccaaccaacctcccaccaacccgtccatcgcacggcgcggcccacgccaacgcaggcaagtcatcagtcaggcagccggccgcccgcgcgcgcccgcaccgtagcgtgcaccgaaggtgatccggttgtttccccgtgatcagctgtgcctgtgcacgctgcccctgctcgatctgcatgcgcgcgcgcgctgcagaggcagagcccgatcacatggccagcacggggcctgtagctctccacatgccgttgacgggatgacgggtcggcgcgcgcgatcgatcgatcgcggcgaaacgcatggtgatctctgatcaaaaacccgtacgcgcgatagggtttggtggtttgctgctgctgctggctgctgcggctgtgcaggggggcgcgaccacgcacgcaccggccacgcgcctgcggaccgatcgatcggtcgatcggcggcggtctcgcgcgcactcgagcgagcggcagagcgcgcggcaccgttggtttggttgggtgcgtgggtggttaacagcagctgggtggttgtgattggattggatggtccctgcagctggagctggggtttgtgcggggttgggtcgttggagttagctgggttcgctgctgttgtcgcccgcttgctggctactaggaggagtacgtactaggcgtggtcaccgtgggcgtattgtgcagcgagtagtagggttgtagggcatgcacgcttggacagtacgggtgcccgggtctgtaacacgcgcgcgcgtggctataattaacagggaggaaccaaatagctatagat

SEQ ID NO: 10526 - DNA, 571 bp, Oryza sativa
caactatatatagcttattggcactcaaaatcacatccaactgagttgagttaaagagtactcgaaagaagtgggaagggcaatgatggatgaacattacatatttgcctgacttgatatcggagtagatcacaatgaaatcaccctcctgcagctcgtttgaacgaacaaaatcacctgaaaaaacatatgacaacgattaatcaacaatacttgagagccacaaattaaggatggaagttattggcatggcttgtgactgtaaaatttgaataattcaaaagtttgctattcacctgtgttttcgagaagatacatcctgcttttgttgttgggccaaaacctgtgttcatgaaaatcaatatccattaatgtcagtgaatcaaaatctaagccatcatgtattcgaataacttgggcatatataatattgccaatggaaataattaaattaattaatcaaaaacatgagctcagcagaaccagcaaaaatcatatgcataatgttagtactgaaaacagcaggaaaagatcacttttatttttttgttgtatgcacttgagcatcaac

SEQ ID NO: 10527 - DNA, 600 bp, Oryza sativa
ctgtatcgaattcagcaacatcaaaggtgatctgttctgtttggaagttgttggcttggccgaaagtcacgggcaacgtaatcttgcccaaaggtctggacgatgattggggagtaattccatggaagggttgatcagttggtgtcaactcgttttgtggaattcccatcgcgtccaaagtgctggcgaaaagaagattgattgagctgccaccgtcaatgagaactcgcgctaccttgatgttccgaatagtaggttcgaccacgatcggatatcgtcctgggataacggcggtcttggggtggtcttcttccgagaactctatcttctgctcagaccacttcatcttgggtgtagccccctgtcatgtcgaacagacttcatgttccactttcttgtattctcgcttggaggagtacgttgtggaaccgctgaagatgtgtgagacgtggaggtcggagtctggatacgctaagtccggttcgtgaggagccgtctcttgattcgtctcaacaacgcgtactcgcttgcctttttcaaatgccatgtgcttcttcagcgactttttgaaaacaaggcaatcttccacagaatgtctgt

SEQ ID NO: 10528 - DNA, 1333 bp, Oryza sativa
ctggcttgatgatataggccgagttacagtgaagaacaggtgagtaacttacaaacactgcatatgaattcacgtcatgtgcatagaattttttgtcaaaattaactaaacctgtgatcaacataggttaaatttgcgagaatgcccgttatgaaggaaagaacacccagaaccatagccattatatatcactccagatgaacacaactgtccactcgaatagttactgctatatagcttgctattagtctacaaaccgcataaacaaggtaatagagatacaacacactaaggattacacaagctttacacccccaaaatcgtggcacggcattgcaaacagaacagaattgaaaagcctagttagttttccagaactatacaaccaaactaacggaattatggacaaggtggggagccccaactgaaagaatgaaccattcaaatgctacctacttgccagcttgctagaatacagtatagctctgaaagaattgcaggaatatagtgtgaaagctcagctgtgaacgactgaaagccattgactagttgagtgtggaattcctggtcttcttcccctatcattctaaaatgcacacggattgcgcgcttgcagactgccatgaattccagcaatgcagcgatgagctgctgcagttcttgagatcggagcctagttgcgggctcaccagataagaatgcagtgcacacacttaatacaccactatttacctgcatcgtcaggtttttgtaaaagtagcaaaagaaagaaaatagaggagcatatactcaaggcattcttaaaaaatggttcaaattctgcacaagagttacaggcttacagcttacctgaacagccacacttccttggagtatcctctgcaggctttggagtcttgggagttggtcaccttccgaactgcgtggttcttctagttcatttcgcaaggcagctgtccttgtctcgatcattccaatcgcattctcaacaggagaaaactctagagattctgatttgatcactaacagacgattcaccaaagcaggaaaggaaccctctgtctggagtactgtgcgcctcttccactgatcttcaaggccaccttgtgtttttccattctttgtgaatggtgtatcaaaaagaaaacggtcgaacacacgggcccggacagtaccagtagataaagagaaaatcctttcccttctactccctaggtcctcatcctccattacaggatcaacagcagttatctgcagatagcagacaccaggttgcaactcatcagcgttgacttgtctcgaatccggaatgatgtgtaaggtgtgattgcca

SEQ ID NO: 10529 - DNA, 666 bp, Oryza sativa
aactgctgatattcaacatgctgagacaacaatactccctccgtaatcatattatgagttgtctgactttattaaagtcaaatctcttgaaatttgaccacgcttattgaaaaatataggaatatttatatctctaaattagttattttagatccaacatttttttgtgcaaactattagatccaacgattgaatatgaagtagacaggagctttaatctatgttaaaaacattgttatatcgctctatgacatgtggttaaagttaaacacgcttgatggataaaatagtcaagcacgactaataatatgacacggataaaatacctcataacgggccatctcgacatacatgctgcgaccacgaaatgcaattcttgcatccacactcttatcccgtaatttagcaaggccattctcaatcaattccacaaacttgacactgctaccgtccaacacagcacggccatctgtaagtatatgaacccgtatccttttcgctccatgctcactggctccttttagaagcagttgcaagagccgaccaaaagaaccattacaagagaaactgatatagtgtgctactactgacctcgactgatcgacggatgaagttagaaattgaattatatcaacctcgcactgatcaatccttgaatggactcct

SEQ ID NO: 10530 - DNA, 746 bp, Oryza sativa
  unsure (1)..(746): unsure at all n locations
aaaccggtcgggctcctttcgcccaaacctggaaaagtaccgataaatcccaagtgatgttggtgtccccttgattgaacaagcagaagtgatggccgtggaaattgtgaacaaaaccaggcatcgatcctgaggaggagatgtgatccagtctttaacctatatatcccttcaaaagaacgaccacatatctcataggccatgcataggtataactccaaatagatagggcgagataatggttactagcaggctatccacttaatatgcctaatggtatgttggacattcgatcggtaagggtaaacatctcattgggatatatggctgggcacactggcgaccttgaagctcctatcgtggggtgcacggcaggtgatcaaactgtttaggcgatcatgaatgcactgctctctgtcttcctagccgtgcaagggttgataggggaatgcttcaccttctactttggtgtgcatgattatcactgcttgaaaatgctcatggcggaccggaattctgttatgtctatcgttctcgatgcgagggaccaggtcagtggcattaacatggtcaccgtccactctggcactgcgggtgacatggngaaaagatatcagatctgcttaacgtttcctgacaggatggactggtcagcgttcacctaaccactgtgaatgcaagaggtgattccagaatgcattgtttgcaatacacccggtaacaatttaggatctactggtgtttgg

SEQ ID NO: 10531 - DNA, 686 bp, Oryza sativa
aaccaagcacatggcaagaagctggaggaagagatggagcggtctctggaggtgctggatctttgcagcgccatgcaagagatgttcgctgacctgaagatgaccatccaagagctgcagatggttctcaacaggggagaccatgcagttgttcaagtgaaggctcagtcatacatccgcctggtgaagaaggctaagcatcacctgaagaaggccagcaacaagtctacctctgatgaggatggaaggcttgtcagtctgttgacaacagcgagagggatcactgcctcggtcctgaaatctgccctagagctcctgtcgaagcaaatctccacctgcaatccaagcaagtggtctcttatctccaaatcgttccagaaggccaaagtttcatgcgaggaggtgcaattgcaggcattagagttgggcatcgttgccatgggggcggacatcgcccccgccgcccccggtggcgccggagcggactctatctcccctcgccctttctcgccggagccttctccggtggtgggagtctgggagaccagaccagacgagtaggcagtagtaattttttctggggccgcgggcttacttgtatttgggcctggtgggtttttccggtatctcatattaagcccactacaaaatgggcccccccacaatcaaaatcaaaatgaacatcg

SEQ ID NO: 10532 - DNA, 1722 bp, Oryza sativa
ggcgctgctgcttcttgacgtcggcgcgcgccttcctggcgaggcgcgcgtaggcgctcgccgcgctctgggcgccggcggcgtcgcctcggcggacggccacctcgaggtcaagcgcgcaggcgcgcatcgcccgcaggctgtccctcgctgcggcgcacgcgtcgagcagcgccaccgacgcctcagctccctcctccacctgctcggcgcaggcgaaccgcacgagcggcccgacgtgctcgtacacccgcgccacgccctccagcgcgccggccatcgccgccgccgccgaggaagacgacgacgacgacgccacgttctgcctcagcctgcacagctgctgctcctccatagctgcagatcaccacactagcttccctcaattcttgggaattaatggcgatcgatcgaggaagacgaatgcatgcaccatggacagatgcgatatatatcctgagccgccggaagaatctcatcgctggcatgtcggtacggcctgcctcgccggcaaggcctggctggcatgcctcccgtgggcgcggcacccacaccgcacgagcgcgcgacggcgacgacggcgacgcaccacgtacgtactaggaagcgtcgagcagttgcaaccacgagtggttggagcttgacgacgagctcggctagggacgcgtggcgcgtctccacggaagcgcgcgaagccgacgagtgggttcgcgcgcgaatttgaatgaatgattgcacggccgtaccagcgaaggaggggaggaggagatctttggggatcctgcaatcggattaaacaaacgaattaaagttgattaatttgtgctctgacgtgcatgacatcgtcagatacgttcatacgctggcctgatacagcattatctgtatctgtataagtataatcatgattaaggtttttctctgctgtgtttcgtctgattgatgctgtctctctcacctaatacatgtacgtgtcactttctcaccaggtttgtgaaactggtttgtcttgtctccactgatgcaacagatgacaacatgctgacatcctggcttttgttttctcaattcatcatggaattgttattactttttttattcttttttaatttttaattttaaaaatattttttccgaatctgaacattttagccacgccaccctacctgtagtggatgtgtctgtatcgttttgccacaccaataggtttagatttagaaataggttttgcgagattttatttttaaattaagaaggttcaaaaaaaatttagaaaaaaacttcaacatcatgtttcatatgtactgatctggttgtcactttcaagaacagcttggcaaccagattcaagaacagtgcatactgagacaggttaagagatgaaagaaaaaggctcaactcaagttacactcgctgtacaaagttacagtgtcacaggtacaaatgaatcatatcatgtgtatacagataaacgcagagagagactttttttcgacagccaatcaaattaggagattgaagagttgcagtatcagggccatgtctgcataaaatgctgtcatgctgaggctcccaattcccaaatgcttcggtgggaattatcgagtagagactccaaacagagcatcaaacatgtctcattatcgatgtagaggcaggagtgatatccattatctaaaaaaattatctcattatcgagtatcagataagattcatccacag

SEQ ID NO: 10533 - DNA, 11378 bp, Oryza sativa
atgttccaacaattagcagcaagaatcagcaggctagttcacttgactggtggatcttgacatatttgtgtgctcaatgtattattttaatggggtgctaattgagttttattgctggcatgcgtgttctctagttttgttgcagttgttaatttccataggtgtttttctatgcacaattcagtctgcttacacgctcaacctcgtgtgttgaagctggcttgtttttttctgtggtagcaagatccactacacaaggatcctttgcttgttgctggtgcaacatatggcatctgaataacgtggccatacaatagtaaataatttcaaagatcagagtgaacagtctttgctaactacttctataacaggcaataatggcaagcatcttataagaaaattaggtgcttctgtcaaagcatggatgaaatgcaacaagaagtagataaaatactgtgctttgtttctcaacttaatatctgtacaattcctctaatgtatatacacattgctaaaatgttgcagtgaccagcagatcctttaaaatttggacaccagtcacaggggatcaaagtggtatatgatctatctacaagctgagagtgttgagaagagaaactctgctctggatcgatttcctgaacagattcttgactccagtgtctaaatcagcaatgttcgactccaacacttgcaattgctcctcttggcagaaaagtgctctcttcttgaatgtcttggagacaagagaccacttgctagaacttggcatcgcaagttgccttgagagaagatggaatgaggtttcaagcattaagatagctatctctcttgcttcagccaacagcttgaccaccctgcagctttccagatcaactgaagaagacttcttgctgatcttcctgaactgtttttgtgccttcttgataaggcagatataagactggatcttcacttgcacagctgcattatctcctctcttcataatcagctgcatgtcttgaatgctttgcttaaggttggaaaagctctcctgcatggcattgcagaaatcgagcaagatgagagagcgctcaagctcttgctccactgctttcctctgcagtggctggcaaattgcaacatggctgcttggcaggcacatgatctcattgatgcagctgtagatattcccgatcctcttcaagccattactcattgtctcaatggtcgaagacgatgaagaaacaattgccttcaggttctggagctgcccttcgatatcgatttcgttggagcgagggctcgatggcacacttgcagatctcaggtggaatgccatgtcttcagaggaagctgtaatactttttttttcctcctctctctgaagttggaagaggagaaggtatgctacaatggtgtcgacacggttagctttatctctatatataacggaagaagaagaagaagaagcagaggcaatggcatctctactctgtagacagcattggaatctcaattacatttaagtaatgtgctgctgcaacggatgccacccatctcctcgacaagctgatgaattttatgtttggtaatcaagtgtgtgtaacagtgcaagtggcatgtctagctcatcttgtgtctatcatgtgctggctattggcagcaaactcattgcacgagcatgttgtttaaatttagatccagatccagatcatgggattgatgagcttgccactaaagagaacaagagctgttcctttgctcggccacgcaacaggtgactatacctccatgatgtgttcttatctggtacgttcttcgtgcagcatcacatcggtggcctgccttctgcactcacagcattcagcatctgctgcaatctcaagatgattccacgtgctgtccaaatttctgatgcattaggcctaactgagtcacattgtcatgttccagttattggcagcaggaatcagcatggcagcttattctattactgagccttgtcatacgtgtatgctccagcacccatttaatggagattgctaatcaactagtattggtgccatgtgtgctattgcatctgattgctgagcaatttatcaacaactatttagttatatggggagcaaaggatcttgtgcctgttcctgtctcatgtgaatactggtgacatgaccatcccatggctttacgaaggcaaggtgggaactgtgtacttattactaattgcatatattatgacagccaaaaatggtatgtgtcttctgactaatttattatttttttgcttgaacatgcttcaggtgaagcgctccaaatgtccggtgattgtttgagagcagtatgcgtcaagtgaagggggaaattagaggcaaaagagtgaaatattcattgaatgaactcctgtacatttcctcatgtatgatgtaggtgaacatacaaaattgttttggtgatcaacaaatcctctaataggcggacgccaatcacaggtgtcagagttgggaatgttccatcattctatctacatgctgagagcgtttagaagagaaactctgctctggatcgattttctgaacagattctcgattccgctctcaagatcaacaatgtccaactccaacgcctgcaattgctcctcctcgcagataattcttctcttttggaatgtcttggagacgagagaccacttgctataactcggcatcacagtttgcttcgagaggagatgtgatgagatttcaagcattgagaaggctgtctctcttgcttcagccaacagcttgaccaccctgcagctctcctgatcaggtgacagagtcttcttgctaatcttcttgtactgtttctgcgccttcttggcaaggcggatgcatgatggaatattggcttgaacagctgcgtcttctcctctcttgataaccaacatcatgtcttggatgcttgccttgagctcagaaaagttctgttgcatagccttgcagaggtcaagcaagacgagagagcactcgagctcttgctccactgctttcctgttctgtgactggcaaaggagaacttggctgctaggcatgcacatgatctcgtcgatgctatcatagatgctcttaagcctcttcaagccatcgttcatcgtcctgatggttgaagaaggtgaggagattgttgcctttaggctctgcagctgttcttcgacattggtttcgctggaccgtgggctggatggcgcactcgcagatctgagatggaatgccattatatttttctcttgttttcttttctctggagatggataggaagagaaaggaaactgtgctgcaatggtgtcgacctgggcatggtttgcctgtatatataacgaaaggagctcaagcaatggcatttctgattgtgtagacagccatggaattgttgtgctgctgcaacagaagccacccaactcctcgacaagctgatgttttttttcatgtaagaggcatctctagctcagctaatgattgtaccatcatgtcccgattattggcggcaaactcagctgcacgagcgggttgcttagtgttgaattcaagttcaagatggtgagaccaatgaagcatgcaatgaaatgggagaatcaatcatgcggtttctgcactagcatgttactcctgcctgccgtgctaaactgcaaaatgttcttatcagttgtgagttgtcatgctgcaaaataaggacacattgtgacattgtcaaccatctctaacaagttgatgcttcatgtcttaggttgtgttggcaaagtggcaaactcatctgcacgagggcgtggttggttcttgcttgtgtgagaggattcgttgttcttataaatgacagccttggtccattgacatttcagccattatatatcactctgttgtcttcacagcattgctgtcatgtttcagttgtatggtacagcacatttctctgttcaagtgttcattatggatatgatccacatttagtgcattttttcagtgtattaggtgccgttcgtgtagatgagtttatgttttttcaacatcagtttccggcatcagtctttgttatagtatgtttcagctgtctgcggttagtatttgatgttcatatgccttttattttgatattatgcatgtttgatcctttttcaagtacaatgttggtgcctcttaagagcttaattaccacatatacattttccagttattggcgagaatgaaaccagtagcgcactggtactaagccaaacaggtgcatgcatctttaggtgattctaaatccaaaatctttttaaggttttaaaccaaacatatcaaaatatattaatgccaaaattggtcaaatttcgtcattaccaagttttgataaaattgaaagtgtcaacaaagtgaaaggacccgagatgcgcattctctgattctcctccatcttcctcatcagcttgggccgaaattgacatgtgacgcccatagtaaagcccacacggcccataacccaccacgcgtctcttcaaatttccgcccctaaataaaaataaaacgaaataaaagaccaaaaaaaaaaaaaactcacgagaggcgcatcggcggcggcgccgccacagggccaccggccgccgtcgccggcgatctgcagggtcaagcactcaagcccccgcagcctgcttcccgccggaggtcagttcggaaccctacttttttattagcgttgcagtgggttaccgccgtccttccactgttgcgttatcgcattagcgattgggttagggaatgattacagactaattggtgctaatcacaaggtcagacctcgtggggttggatctggcatgctgcgtgtatgcagggcaggccagcatgatccaccattgaaggatcgtgcgctgattatgggattaaacaagtgcgaggtcacatggccactttgaaatcaaacatttaggttcagaaatggacagcattaagcagttgaaagttgattccatctacttataacttattctagtcgaatctctctcttttttctctatcttcctgagaagagaaatcgtgtttcacttgcaacaataattcacatcttctgtttttttcatgttttttttttgttacccatagttttatggacatcagcacatcacaaaatcacatcatcagataccactgaaatcagaaatcagaagcatgtataaatgattggagatgagacactggctagatcaaaactgctgttttcaattgctctttttgttctatacatttacagatgtacaaagattggcagatcctttaaaaggcggaggccaatcacagggtgttagagtgtcttcactttaggagaatctatgagctaagagtgtttaggagcgctactctgctctggatcattctcctgaacagaagttcggctccattctcaagatctccaatgatgcactctaatgcctgcaattgctcctcctcacaaacaactgatctcttcttttggaatgccttagagacaagaaacatcttgggaaccactagttgctgtgataggtggcacgatgtcgactcgagtagagagacggtgagcactctagccttgatcaatagcttgatcagcttgcagtcctccttgtcagaagtagtcttcttgctcatcttcttgcattgcttctgcgccttcttggccaagcgggtgaaagattggatcttgacctgaatgcttgcactgtctcctcttctgagagccgcgtgcagatcttggatgatggtcttcaactcggtgaagttctcttgcatggcactgcagagatcgatcagctcgagggagcactccatttccccatccaacattttcctttgctgtgcagagaaaacttggttgctgggcaagtggatcatcctcctcgatctgattgtagacatctccaagcctcctcagaccatcaatggtcgtggagggtgaagagatgcttgcctctaggctttgcagctcatcctcgatttcagcttcattggattgcctcttggatggcaaactgactgatcttaggtggcaagccatctttgtattggagtattcgagagttgggagatgtggaagaaagatgaaacttgggtttgatgtctctactcctcaggcgatgcctatttatacactggaagcaactgagacagcatcaattttttaagaaatgggagagagcgagcatcttttgaaaggtagacagaaagaatcatgccatttgatttcccagatgctgtctgttgaagttgcatgctaatgctgcagaagtgctgcattatcaaggcttttcacgtgaagtacacatatttagttcactagacttcacaaactggtcttaacactctgtcatgttgcaattataggtagcaagaatctgcatttgttccaaccgtcacgatgggtcttgagggaaatgcaaggaaaaccattaacaggttcttaattgagtattattagtgcatgtgtattagttcaattcttgttgctctttgacattagtaggtgtttccatcagtaaatataaatgataatgctaattaccgggttgtagctcgtgtgttggagctggcatgtttcagctgagtagagcaagatccatttcagaaggatcttccgctagaggaacatgtgagttaacataacctttgttcccataaaaaaaaaccattaacgtgaagcccgcaaggctgtaataacaagttgataaccttatggagacatgtcacttttgttttaacatcaaaaaattataagaggcacaaaattttacttggctggaacggcccggatcttaggttgttcttttgccctgtaaatggatggtatgtttgaggcacaatacctatattttagttatgagaaacgtcaatcagtcatgatgtgaataataccaaagactcatagcatgaaattgacaaaattgcttctctttctttttaatttagtgaactttgtatacatatccacaagactatacatgttgcaaaattgttgtgatcgactgatcctttaaaaagtggaggcctatcacagggtattggagctcaggttgcctatgagctaagagtattcagaagagaaactctgccctggatcaatctcctgaacagaagttctgctccactctcaaggtctttgatagtgagctccaattcctgcaattgctcctcttcgcacatgactttgctcttctggaatgtggcggagacaagagaccacttaggcgtctcaattttcttcgacaggaaacaggatgtagactcaagcaatgagacggtgatttctcttgcttctgctagtagctttaccaccctacagtccatcttatcagaagcagtctttttgctgaccttcttgaattgcttccgcgccttcttggctagccggatgtatgccttgacttgagcagacgcatcttctccccttttgatggccaacatcatctcttgtacactcatcctcaactccatgaagctttcttgcatggcattgcagaggtcaagcaagacgagtgaccgtccaagctcttcctccaccaacttcctttgcagcttctggcaaaggctaacttggttactaggtgtgcaaatcagctcctcaatggagttgtagatatctccaagcttcctcaaaccatcgcacatcgtgtcgatggttgctgatggtgaagagacgactgtgtttagggtctggagctgctgctcaattgtggtatcatttgagcaagggctggaaggcacgcttgcagacctttgatggcaagccatgtcgggattgaagctttggtgttattttcttctgtgggaatgggaagagaagagcaaggaagagagaagatgcactttgctggtactcaaacactttggctcctctcttatttataactgaagaagcagaaccaaaaacgtgattgggtttgaacagagcaatcgacagaaagaatctcatctactaacctccctgcattgtgcgttgtcataataagtgatctgttctgaaacatagccattcaagcctagacatgttgttattcatctgatttttaattagtgcaacaaatgctaatgagtgagcttatgagcctgtcatgtctcaactattgatgacagtatacttgcacgagggtttagtttgatttcagatccagatacatcatcaggaaggaaggaggaaaagcagccttttggtgctggtgaggaaataattattttggttttcttctgatactcctacattaggacgagttgaacattcatctctcatgcagcagcagcagcagcagcatcgctggcatgttccagctatccacagaaaggatgaccatgcaagtgcacgcattcttgactcaacaaccagtataatttatcttgtaatatcaaagtttcggttggatagatatgacacgatcatgtcaaatcatatttattagggaaggtagcagtgagcagctaagcatacagcagaaatgtgacttgattagttagcttaaattttgacaagaactttctaggatgcaacacttgcacacgaatgcaatcatcatctggcaaaattttttgagatattttaagagtttgcaggcgtgcaaggaagtgttgagaaatcaaacaatcgttgtcacagtagtcaagtcagtttgcgtagcttccgattgtacacctggatagagataatgtgccacttgttcataagttgatagggtaaacacaggctccaagatggtagagaaggaacaaatcacatgttaacaaaactgtgtaatttctttttgcaaggaagcaatgcatgccttctcaattatgtatcttgctatacatttagacttacgtacatattattcaaaatttgtggtgattgacaggtcctataaaagttggatgccaatgccaatggagcatctatgagctaagagtgttcagaagggaagccctggtttggatcaatctcctgaacagattctcagctccgctctctaggccaacgatgcccaactctaatgcctgcaattgcacctcctcgcatgaaactttggccttctggaacgatttggagataagagaccacttgcttggattgcaggtggagatttgcttcgacaggagctctagggcagatttcaggaccgaggcagtgatccctctcgctgttgtcaacagactgacaagccttccatcctcatcagaggtagacttgttgctggccttcttcaggtgatgcttagccttcttcaccaggcggatgtatgactgagccttcacttgaacaactgcatggtctcccctgttgagaaccatctgcagctcttggatggtcatcttcaggtcagcgaacatctcttgcatggcgctgcaaagatccagcacctccagagaccgctccatctcttcctccagcttcttgccatgtgcttggttgctatgcaagcttatgatctcgttgatgcagttgtagacgccaccaagcctcctcagagcgtcagacaccatttcgatggtggcggatggcgatgagatgcctgagcatatgttgcgcagctcttcttcgatcttgatgtagttggggtgaggcatagacggcaggcttgtcgatctttgatggccagccatgtttggaatgaaatttggtgctatgcctcagactctgagtgttgggagcagatgatgaactggtggtgctaatgctccaactctccctacttataatcaggaggttgagaagatggtatgaggcaaattatgcagagacagcaggaatctccactgctctgctctcccatctgctctttgattgcatggccaatgcagctgcagacaaggtgatgcccttcagatgttgtctaattccaggtacactgctaactaacctttgctgtgttgtcatgtctcatgcattgcaagcagagtaagctgcacgctcaagagattgtactgttgggttcttatggatgacaaaagcacaaaaagaacgaaacaacagaggtacgtggaagtttcatcggtgttgattgttgaaacttgtttcagatatcgtaagcaggatccaccatttgtattcacctgccaagttgtaaggatctgagcatatctgatcaaatgaacatctgaagcaacacatcatcacttgtttggcaacattggaggttcactactcgttgatcctgttgctctgtctgtaggatttttttttcttttatgtccaatgctttgtctacaactctaagtaggacttctccatcatgccagcgggctcatcggagattcctcatactgcaaatgatctcaaatagtctgaaaatttgtgacatcaaaaagacagccggaagatgcaatcctctaatttgctccagcttcagggaacagtgtgaataactctactttggctaagtgaaaagaactatgtgaagctgagctgatagcgtggctttgccccttcccgctgtttaggagttgcttttagctgccgcagtagttcctaagcttcagtttttggctttgctttttctcccttcccttgtaacaaaaattctttttcttctaatatattgacgtgtaatccttttgcgcgttcgcgaaaaaactgagctggtaatatattactctgacactagtctacttaaggaggtaacctatcctatgcaaataagtttcgggtgcatcctcaaaaattcttgaaaaaattatacatgtatttccaatagtattgtaattgtgtgtgaagtctctttaaaaaattcattatatatagagagagaccaaattctaacttacttatattcttaaaactattagttttataaaaaaaaacggatgaaataaaaataactttgaagcggagactttacatgtatgtgtagtactattggaagcacatgtacagttttttctagaattttaagtggaatttgttagatggtgtgcacgttgtgcatccaaaacttaggctgtgtttgagggagagaggattgggaagatacgcaaaacgagatgagtcattagcgcatgattaattgagtattaattattttaaacttcaaaaatggattaatatgatttttttaaataacttttttatagaaattttttgcaaaaaccgcaccggttagtagtttgaaaagcgtacgcgcggaaaacgagtgacaatctcccctatctccaatgaacgaacgcagccttagttaatgactgattgttagtccagtttatgtgaaagttgtttcacaacaaataatttcgtacatgtacgaatgtaaaagactaaaggagtagtagttatgaaacaaagctaaattgtgttcatcagcatatgtgacatgagaattctgatcttttcttcttcctttcgatgggtatgatggcatcggagagcacagtagtccaagagaatgg

SEQ ID NO: 10534 - DNA, 2997 bp, Oryza sativa
  unsure (1)..(2997): unsure at all n locations
catagacatactgcgtcttggagtccgtgctacagctggctacaaatctgtagcccgctgctcttctctctcctgatttatcttcttaaaatatgtttgcagctggcttatagcctgctattgtacctgctctgacagacagcatctgggaggtgaactggcaggattctgtttgtctaccctccaaatgatgccatatcttacaaatcctctgtataaatagacctcagcacatagctagacacatcaaaccaaaactttcccttcctcatctctcagattcaacagagagacaaagttttagccacagacatggctttccaccaaagatcaattagcttgccttctaggcctctctccaaagttgaagaggagcttcacagcatagaggcatgcatctcttcaccctccctgaccattgagatgatctctgatggtttgaggaggcttgaggacatctacagctccattgaggagatcatgtgcctgcctagcaaccaagtttgctcatctgggcagaggaggttgttggatggagagatggaatgctcccttgagctactggatctctgcaacgctatgaatgaggtcttcaccgagttgaaggccatcatccaagatctgcaagtgtttctcagaaaaggagatgacgcagttcttcaagccaagatccagtcgtacatccacttggtgaagaaggcaaagaagcattccaagaagactttgaagaaaggttgtgttagacaaggagtgcaggatagtcaagctcttgagcgaggctagagagaacaccacatctctattcgagtcaacaatgcacctcttgttgaagcaaatcgagatgccaaaattgtccctcatctccagggcattccagaagaaaaacccagtgatttgcaatgaggagcagttgcaggtgttagagtgctgcatcacagatcttgaggctggagcaggacttctgttcaggagattggtccagagcagggttactctcctgaacattcttagctcatagatgctcgtcaagatctgtcactcttaagaccctgtgattggcatccgccttttaaaggatttgctgatccttagtatatggttagacttatagtgtacagaaaaaagttatacatgaaagaaacagaaattttgatctaattcttgtcgtgcgctcaatcctcacatattattgagatatataatgtgattatgcaacacgatgccagtattattgcctttgtgatgaatataatttgcacaacccaacacatgaactatgaaatatatgtgccaagtaatatagttttcctttattttattatttttatactccaaatgattgctgatatactgatatgccatatggcctcacacatttttcttctagacatgaatatttggaagcaaacaatttgcgctggtccacaactgcctagttgtttatatattcatgtggccatgttacttcacacccgcctaagccaataattagtacatgatcttagttttggtgcatctcacgctacattcatgaaacatgccaggcccaagctacaaagctaaaagcttgcaatcagcacaatattttgtgggtgtgtgttcttagaggtggatcagtgttgatccctccttttatatttgttttctttcttcttaatgcaatgaagcacaacacacctgtgttttcaaggaaaaaaaagttacatcctaaatttgctgcatgatcacatagcttacctagtattgtgttcttgtgtatatattatttttactgttttggagcactgatacacatcttgataataaagcacgttttaattaagttcagaagtaaagagaatttcttttaagcacagaaaaacagtataattatagtgtgcacagcaagacacagattatcttgagacacatctcaagtttatctcagcaaccacaatttaaccatgcaatgtccatgaaactcataactcattggctcaccaggtatgtgcctcgacttggagaaagacatatacttattgagaaagaacaagattttgtcaacttcttgattgattacactgtctatgcaagctttggtacaaaaacataattttcacagaagactgatgttcatcattattgactgttacatgaacagttagcacagatagttccaattcacttttgaaatgctttactacgaaatagtcacatagccaatgctagtttctatgccagtggatcttgcccccatagctaaaataggccagctaccataaacaaagttgagcgggcaagcagcatggattgcacataatagaacacatgttgaaattaacacgagtattaagaaatagattatgcatgtataaaagatactactctggtagcactctactaaaattatcccatgagagcatgcaattatgtctaacatccacaagtagagtgaactaacctgctggttcttgttgccaatagttgggacatgacaatgtgatagctcacttggaagatagatagcagtgcataacaaattattataacatacgagagattccatatgctgctgccagatctcaaaccttgagagacagcatcggggaggtgaactggcaggattctgtttgtctaccatccaaatgatgctctgcattgcacatcaactgaataaataggcctcagcaaaaagctagacatatcaaaccataagtttcctttccttcttatctcttggattcatcacaaagcgccagagtttttgaaacagacatggctttccaccaaagatcaattagtttgccttctaggcctctcttcaaagttgaagaggagcttcacagcatagaggcatgcatctcttcacccttcctgaccattgagatgatctctgatggtttgaggaggcttgaggacatctacagctncattgaggagatcatgtgcctgcctagcaaccaagttgctcattttggcagaagagggtgttggatgagagatgaatgctccttgagc

SEQ ID NO: 10535 - DNA, 17514 bp, Oryza sativa
tactttcaacttgtaagtcaaatgttatagtatacctccatgtcctcacaaatatatgcaaagaggtccacactatgataaaaagtcaaacaatctcacaaacttaagccctgtacacctgattcacactagggaacataaccattccacagttggtctatgcagaggcacgcaatccaatgaatccagtctactacaaacattagcagtagaaccgacacaaatggcgtctaaatccccaaaggggaagacatgttagacctaagtacataaacccgagtccaataacaaaaatggggtttgcactagagtgtaatccagtctaatacaaacattatgaacaaccacaaaaagacatccaaatcccacaaggctaacaaatttgcatagatcataaagttctcaataaactagcgtaacaaaatcaattaacctgcctgcctgccctaacttaacagaaattaaattaaggggctgtctatataggaatcgaatgatctatataagttaaaacctatattgatctacacttcagatcaatatctcaggcttcatatttctagcttacatttgagtacacacaaagaactagaaaacaaaatacaacgtggatatagtacttatgtagcaatagtaatacaacacacaactaaatcacacacatcatcatgatgcaaagtttctgaatctatacaacagttcttttgatgacccatctaataattaaaacaaagggagagagaaaaaaaaagcacaaggagttattataaggatgcacatatcagaagcaatggaaaaaatgaaatcaaaaatagaacattgcatagcacacagggaaaatagaaacataatcaatacataaatcatagcaataattcactatcagatcaacagctaacaataattcatcagctagcaagctaaacaaatagttgaagactacaaataaagtacaaatagttagagatacaaaataatgcaacacaaacttttataaatccaaacatgagcaaacttcttcataaacatcattcaaaacaaatcacacgcatctactaaaatagcaactcgcagattcaacaaatcacaacctaacatccggagaacaagggagcaactatagaatcaactcaaattcccatgggaaaaactagatctaactttacacatcacagatcacagagcacaattcgtaaatcacatatcacatatcacagatcacacatcacacatcacataaacgaaactttctagaacatcgcatagcacaaatttatgaacaaatatatcatagaaacctaaaaaaaaatcacaaaagcaaaatcgaacacgaatcatggggattcaatgaaacaaacaccgaaacaaaaggtgctcagatctacgaaaactagaacgactagtactacagaatcaacgaaacacaacatgtagcatgctaaataggagatggaaatgaacaaaaaaggaaaaaaaaacaaaaaggaaagccactggaataatcttgcgcaatcgacggcgcgacacctccgcaacaacagcagacgccgagtcggctcgccgaagagcagcctcgtcgcctcgctaaatcgctgccacgtcgccggagacgatgagaacgagacgacgaaatcgtcaacctctccttctataactctctctctctctccgtcggcaaaaggagcacaactagcggagcaaaacaacaacgaatcgagcagcaagctaacaaatgaagctggagaagaatcaaaacatactcaccggagaaaaagaggagaaggagctcgaggacaagatagagaagcccacaccgcaaactccagtggaatcaccgccgcgacgtagcctgcacgaatccacgccgcggcgtagcttacgccgcgtcgtcgcctcccggagtcgccgacgaaatctccgccgaaatcaccggaagagacgacgaggaaaaaggcaaaaagcaaaatgaatctctcacactctctctctagtctgattcagacaatctctccggtgcggatttcaaaatttaaatagtgtatgtgggtcccaccattaacactcacaaaaaaatctctctgtcggcaacacaaaatgggtcccacaaaaatgtaaaaaaaaaagaagcccatttagcccacatatggaagcccgaacttacaataatcaaaagcccacatagtctagatagcacgaatcttaaacaaaatccaagggacaaaaaaacgaatgatacagcccaacaaaaacatgcgacagccatatagcctttcccaaaaaaaatcctcctaatcacaatgccgtcgcggagatgacaatgacagggacgatgagctcgaggtcgatttaccaccgggagctccttggccccatcctgccttgatccgtgccatcggcacttgcttccagcgaagacgaggtggtggtggtggctccgctgctcatgtgcctgtacaaggcgagacgaagttgtagacgacactggagggggcaaagctggcagagatggagagggccagagggaatacctccgcgacggtcctggagctcgacagcccgcgcgggtcctcgatacgcgcctgctcaccagccatcgccacctaccggtggtggtccacgccgtcgccagatccacggggagcggctcggctcaacgccaccctacttgtcatcggccttcttcaccacctctgcgccaaatcaaccgctcggatcgtctcctcgatagcctccttgccgcttccgccaccaccgcctcaccgcttccgccgctcgcaccgcctcctcgtccactttcgcaaccaccgctacctcaccttggctcacctcatcgtcagcccgctcgtcgccggagatcagaggcggaggcgatgacagatggtggtggcatgccaagcgacggcggggactctggctcctccttttaaccagctgtcgttcgatccccgccacctccgctgcctctatcgtgcatgcagagctggcctcatccatcggttctttctcagtgcaaatcaatggtggaaactcgaaagcacaagccacaaccatggtgtatgagagaagacgagtgaacttggattgaaagcagaggtggacgacgaggcactcacagctcacagctcccgattcccaaaggctacctgctaacttatgcgtgccactaacacctagcaaatattcattttcacccctaatagtattttttatcctatacttcactacatataaaatattttcgaaaatacccctaggttagtactcacgtatttatgtgcaggaccttctaagttttaacttttcaatactggtttggtctgatgtacaaagagtaaccttttatatgactccatattaagaccgtgtttagttcatacctttggttgaatttagaacgatgttacggaaaaattagaaatttatatatagaaaagtttagatataatggaaaagttagaagtttgaagaaaaactttggaactaaacacggcctaagttgatgataggagtcatttactttaaaaatatgcattctataaatttcgtaattttcatgtaatttgataaattttgtagatcctattaatctaaaagacatatcttccaaagtatttgttaaacgcatacagatacgcttaaagaagttatttgtctgttaacaaatctgtttttaaagttgaaaaataatttacacgggacaagtacagctatctaaatacggcacagaagaattagccatgcataaactgatcgtattgctctcttttttaataatagaataaaatatcgtggcctttgctcaaacaagctacaaccaattattacgtagctcacacaatagcaaactcacacagtgagtccggaaatcacagtatgaaatttttaaacaagcataaactaatacaccaccaacacaagataaagatcccacaactattgaatcctatttgagaacctccatccgaagttggcaaagagctgcataatcgttgactcaagtttacgacatgtatcattaattagtttgatatcttcttcacacctctataattgcccaatactgaagccaatacgttgccctgaaaagtacctgcaaataagatttttatggtaatttatcaaagcccatcttattcctactaagtcagagagcccaacataaaacggatgctccaacaaaaataagattcttaattttttttatcaacaccaaaaaggtgttcgggagtgagctttggaaaccacactccctagcacacaaaacaaatcagcatttatctcataattaatcaagtattagctaaaataaatttgaaaaatggattaatatgattttttaaagtaactttcgtatataatttttttttgcaaataaaacactgtttagcagttcgaaaagcgtgcacgcggaaaatgagagagatgagttgggaagatggagataagaactcagcccaagccaattcctgaacatatgagacatcctttgtggaggatataaaccaaaggaaatgtgtacagatctccaaataaatcttaaaaaatgacaatcttttttgtaaaaaacatcttaagccatttatatttgattctaattcggatttttagggcgttcagtgaaaaatgttggactacttataatcgaagccatccctagagccactgtgcattatgcagataaacaaatttcagacatgttatcttatcctatgtggcactttaaggccgctcatatgaggctcttatactgtgaatggtctaagaaagatgatagaactacagttttttggtttataaaaaaagagaaagtgatggatacactcaggctgaattttttttaaaaaaaaataaatacagggaacgggtaaggaacaaagtaatttcatttttttatgaagtaactaaaatacatgttaattgttagggctattatataaaacatataatttaaagtcataaaacgatggaataacaataaccaaatcgatcatcatcaaccacatatatttgacattgtcctctgttttgttttatctgatatgtaatttaaatatatacaaacataatgcagacaaataaacaataaataatacgtgccttactgtgtaatatggtttatacaggttacatggatagggcgccaacagcgcacaggctttctagtctcttaaggcctttcacagtgctcctaggtggagtgttgccttattgtgccagctaggaatttcgccgacatgtcgcgtagcaccgcgtccttgttgagccgctcgctcccaagcaaggaaacgcgattcctcgctcgcgcgaggtagagggaacgcctggagctcgcgctgtggagggcatgcctccaactcaccgtcccctcgcgccctctccagcgtcgacctcgttgccgtctcccgctccgtgccgccgacctcgatgtcgccggggagctcgtcgccgcgccgcttcgatccgtgccgccgccaccatcctcgtcggagaagctcgccggctcgatggggaaagcgcggagaaggagaggagctcgaggtcaatgccgcgtccaacctcgccgccgtcgccttgatccagtgggcctaggccagatctggccgctcagcccggcgtcgtagccgtcgccgctcggaccgccgcttcgcccggctttgagaggaagacgaggtcgcgtggctccggtcgacgacgaccgccgtgaggacggccgtgccgccgctcgtcgtccgcgaggaagacgaggtcacgcggcgacctccgcgaggaagaccccaccgagagcccgtcgctgcggagcggggtagggggagggaggcgccagcgtctgtggcctctggacccgacgatgagaggcgccgccgcgccgaagtccatgccttcttgcccgccgtcctcgccccggggcttcccgtccgccgcgtccctagcgtcgttcggtgccaccgccaccctcgccggctgttgacgtaaaacacgaggcctgggagatctgcttaactccagtgcaggtccaaagctcgccttcaggtgtgttagcgtgccagttgatttgatcctgcaatcaacaagaaatagaaacagagagatcgcggttaaatctataaatgatagccaatcggctaagtgccgataacatatcatttatctttgagccgatgtcatatgtgaatcgatcggagactataaatagataataaagaactaaatctactcgatcggttgtagatattaccaatatatagttcttatatcgatatatatttaaatcaagtgattgggatagatcggtcgccatgccgagacagtataaatcacttggatcgaaatatatattaataacaggactatatatgtttataacatagccgatcatatagatctagcatgtataggctaatactccgatactactctatatcaggatattaaaataagtataatatatcaaacaaaagcttaatatacttaaatgcaataagatcttgacataaagggcggatttaacatgtcactgaagcatatagagcaaatatggttaaatcagataatatcggctgaaactccgatactaccctaatcggcaaccagaaggcatgctagagattgatattctaagcacgacttaatagatcaaactcaactgatgcagcattaagtatgaaaagaagaacaatatctagacaatcaagccgctggaagtttcatagagtggtagatatcttatataatctaaatcaacatcaaaatctaacctaatcggctatcctctactaacagatgttagccgattgtaggttaggtagcgatatttgcagagattatgtacgatatatgataactcaacgaattacgtaaacaagattagagtatcatgaagatggaagcactaatcccgagaacacaagtcgtcgtaacaagttttacctcttgttgaagatcgaaaccgatgcagctcaacccgaaagcaagaactcgtcgaaataaaattaaagcaaaaaggtggcgatgcgccgaaattgtattgaacgtgtgttttccttttttttacatagggctcgggatctatttttacccgagaattacaagatatgtccatactggacacgactattatctctaacaaactctaagataccataagtctttgcggcagacttttgccctaagcatatcactaaggaaattatataaaacatcctaattaatagatacaattgccttttcaggactctatccacgtgggacaatcatcttgaagcatatcaactcaaacccaatgttggatacgagtcatattgccggaatcggctgtatcacctaatccagtctgattcagatttagccgattctagtcgtagccgatctggactccagccgattcttacactgttcccgcaacaatccttatctctgattccgcttcgatcccatcttcacctccgatgctaatattaccaaatttggtcgttaacatcggcttcttccgcgagggaggaggggagagccggcaccgctcggccccgaggacgccgccgccgcaggacccgctacctcgccatgcgtgcagccatcccgccgtcgaggtcaccgccgtccggccccgacaaggagaggagggggcgggcggtttgccgtcgtacgccgccgtggagccgagtgagggagagcctcgtcgttgtccacacgctccgctccgcgtcaccgacctcggtgtcgccggggagctcattgccacgccacttcggtctgcgccgccgccactgtccttgtcggagaagctcaccggctcgatgggaaagcgcggagaaggagaggagcttgcatgaggttgaggccgcgtccgagctcgccggcgtctgtgccttcttgcccgccgtcctcgcccttgccacttgccgtcctggtcagtggcatgcgagaagaatggatagatatagagagggagagatgaatgtgaaaagagagatggtgggacctactaatatgggtgggacccacaaacatgtattgtttaagacacatgcactgtgaagtgtggttctttatccggttctttgtctagctggaggctttgagctcctcatgtgtgttacccgcactgctactggccttataccgaattcagggcgtgttctcgagcgttagcgacgccacgtggctcagcccgattgcaaggttcgctccctcgctcgcagccgtcggatcgcgtatccatggtcagaaatcgatgcggtggagctaattgtaatataggaagtttaagggggctttttccaaaacggtgaatacctcttcgcctgttcggtcttgcgcttgtttccgtctaaggacagaggaactccctcttccttctcctcggtcgcgttgtcgccacttacctccaccaattccgccctgatcccctccgaacgtgctcatccgcgggctctcgacgaacacctccggccgcgacccagtcggactcggaggaggccgccagatttttctactccctccccctccgtgccgtctctctacccctctgcctccatttgccgcggccttgggacggaccaccatcgccgtgcggacggacgaccggagcacggcgtatacgacatcgtgtgcggcagcgggcccctcgacgagcctgcgcgcgtcggatttaagtatgtctttttgttgttctgaagaaattgtgtgtatcatttcttcaggtgccctgttgcaattgaagtatggaggatagtttgctacgctttcaacattagctcgctaagtgtgcataaacctgtcagtaatctggctacattattttcaaatagcactaattgttgttgtcagcgtatcgatttgctgccttgtgtttacacctaaatttgacacctatggacgaaatagggaaaaattgccaaagtttggaaagtgccgggtttccttcacaagggccggttagaccacatctatgtggacggtctgaccggctagtagggtcggtctgaccgcaggtatgtgggcggttagaccgtcagggtccgagtccgagtctgttttcgtcgggtctcgggtttccttgctcgggaaggcatgtttcgtgtttccattggtttctatcccgagttggacgtggagaagggcctgtagagagcaagaccaacccctatttaagggacaaggccggttcattgtaaaaccccctaatacaatctacttgaatcgttcttttactgtgttttctattttaccctagtttagtccatctttgtcggtttgcgccgtaaaccgtccgccaccgctgcgagagtgcgacacctctttgtaggtttgtcctgaaaaccttccgttttgcccacgagacgggtagttatcctcatatcgatctaaatcggcctagaggctgattttgatctctaaatcggctccattagccggtttagctgtttttctacaaaacccatcttgatttggccgcttggctagattaaggtggttggcgaggcgtttaggtgttgcgatcgtgcttatcgacttgtcacaaaaagttgccaacacgatttttgacgactccgttggggaacgatctaatcggccatatcatggccgaatttcatttaatctagtaattactgttcatcaaatcaggagtttcggcttaatagccgaaatcaatctacactgtactgctatcgctacgcactggtttcatcgccggattaatctattcggcggcgaagttaattatctagtcgtcactgaatccatctgaatacttgccgttcagcccgccgcgtataccgaggatcatcgtcgggaggcagaggccggctcgacggcctcgtttctttttgtttcacacggcaacagaaagatttgattgatcaaagctagtactgtacacgagttagaaaagatcaggctattcaatccgatctattactgttcacattaaaaaaaaggaagataaaaaccgattcaatttgtatcggttacactgtgaagctttagattagtttctaaattttgctaagtctactcggttgattatcaaataaatcaaatacttttgccgagtacagtacatacgaggaagtcaagaccgtatattaatttattcggtcaaaatatttcggctatgagctatatggccggaattaatcaaggaatttcttcatcaactataacgagcaggaacgggttcaacaatattactacacaatacattaggactgatcaaggcattatcccgctatctcaagtcgtagtttcaccaaaggtaacttccgattcggccaactcatactttgctattcaaaaggttaatgatcgttgtgtagatgcatatgctacctctagttttgctcctatacaatatgcttataatgctatgggggtcaatgggtgattatacagccgattacacaggaatcggctatatgcaaaacctagctaacggtatgactggtcatgacaccggtctaaccgcatcctatgccggtccagaccgtgccctattttggccagatcggacctcctatggccggtctgaccgcaccactaaccagggagtttctccaagttttcataccataactagcagtactgattttaattattattcatcacctgttaatactgttagtcatgctattccacatatccctaatgcctacaatgatattaataggggatatcctcccgatactaggtatggccaatataacaatattgtgccacaacaaccaccttttaggccaccaagtccaccaccagatccaccaaagcctgaaactgtggaggattggtttagaaatactatcagggagaatttcacaaaactaaggaatcgtgctagggagtaccaaaagccgtatcctgatttttatgacgctgtcccatatcctcctgattataaaattcctaaatttaccaagtttagtggtgagaatagtaggactacatacgagcatatagatcaattcttagcgcaatgtggtagggctagtagtatgaatacatgtaaattgcgcttattttctttatctttgtccggtactgcttttgcatggtctacttctttaccggaaaattctattttttcatgggctcaattagaacaaaaatttcatgattatttccacactagtgagactgagcttaggttgtctgatttaacatcggttaggcaaaaatacaatgaatctgtcgttgattatattgaaaggtttcgagatattaaaagccgatgttttagtttgaaaataactgacaaagatttggccaacattgcatatgatggattgcttgattctattaaagagaaattgaatggccagatatttcttgatattgatcatgtgttgcatgaagctctggctcaggaaagccgagtggatgacaatagcttacaagctagtttagatgaaaatgcaatatcatgtatagccgaaccaagcgatggttcggattgtggtaataatttgtgcaatgatgccgtaacgagtatagccgaaccaaatgttgattcggattgtcttattagtttggatgataacgcaataaccaatatagccgaaccaagtattggttcggattgtgttactagtttagacaatgatggaatagtcgaaccaagtaatggttcggattgtgttgctagcttagagaatagcatcattgaaaatatagccgaactaaatgacggttcggattgtatcacaaacaaaagtgaaatagcattgtcacctaagaccgaatcacaaatcggtcatgtggatgttggaaaagataatgaaaatgtcttgcgggatagtagtgagatagaatctaaaatatttatgcatacatatcaaaggctgtatcctgaatacgtagattcggtcccgtacccgcaaggatttgaggagcccaatttcacaaaattcacaggtgaggatgctagaacaacaatggagcatatcggccaatttattgatcaatgtggtaaggccggtaatgatgatttgcttaagttaaaattgtttcctctttctttgtcaaactttgcatctacatggtatagtttacttgctcctaattcaatttctacatggtcacaaatggagcatgagtttcatggttatttcaaagatgcaaacttgatgacaaagaccgattgatacttcatcggtcacttgtgaaactatttcggttacctctatgcctaagaccggaattgttagtgatcctctccttgttagttctattgatgttggcaaaaagaaagggaaaagtgttattattggggatcctcggcccaagaataggatcaaaaatgcgaaggccgaagatcataaagttacaaaagatgagtcatctagttcccaaaagactaaaaagccgaagctcacttttgagatgcttatggctaagtacaagaaaggattagctggtcaacgatttgataaccaaactagtgattcgaaaagaccaagatcatctcgtaggaagagatttggtcaaacatcaaagcaatcgaagccatcaactataccaactccatataaacctccggttgtgatgccatggtatccacatccaatgtcactatttggttatacttttatgtattacatgccatggatacctcaaccacatatgccgtatcatcgaggatggaagcaaccacctaggacaataccaagtcaatataattcaagacaagactgtttcccacaaaagaatcggtccggtagatcaaaggtgaaaagtgtgaagaaggtgtgggtgaggaaagaagccaaagctccggaggtcgttgctatcaaggagaaatctcaagatgttcaagtacctactgaagatgcggcgaaaactatacaagcggagaagactgaaaccaacgccgttgctgtcgacatcggcggtctgaccgagccagctagccagtctaaccgccagactacggccggtctgaccaaccctcctagccggtctgaccaaccctcctagccggtctgaccgacggcttgtggccggtctgaccgggcctaaaggccggtctgaccagggggcattggagaagagtgggaaaattgagagcaacacaggagcttctatttcgaccaaaaatattaagaatcattatttagctcctagaaaacagccacagccgaagtggataccttctgctttatctcgctctcaaaagaggagggtacaacgtcttcgggccataggtaaaaaagaaaaagaggccgaagatgtggagaacaaaacatgtaataattcagagccgcaaacgacacctaagcgagtgtggagacctaaagaagtaaaagttaaaagatcggtgctttcacggagtagtgatgtattcaatttggtgagagaagaatcatcggtcattaaagataagtctccttcacatgatgctatgggtgttagtgcggtattcatcttgccttcgaaatcgtgcaatcaagaaagccgattttgcttggggggcaagacattaatatgctcatgagggaaccaagaaaagaagaacggcaatggatacaacatcacatcttcgagccgccgttcgttggatgctaaggcaaggtatgggtttatggtgttcatcgttatattatatgcctatgtcatgttagaacattgcttgctatctagcacatgtgtgtttttgcttatcaaattgatattatacatacatgcaaatgccagttctaagtagtagaattggtaggttggcatataatttgtttcaagtatgatttggctcatgactctttgatatttatttaaagccaaatcgtatgtgtttttatggatcaccatataagatatagatttcatatttattgcaccatgaaagttttccttattagtaattcggctaatgtcaatggtcaatgtgatgatttattctagagttgttttctttagaaacattggcattgttaatattttgcatacatgctcaagtcgattacttacatttgtagtttattggaattcatgtgtgtgaggcatatgactttggtgattcattattgataatacttcaattggctaagtgttttgatgccatgatggttattgtttcaaaagccacttgaattagtattcatctagacatgttagttgggtattatatttttttcatatgtctagagagaaagagttttggttcaatagtttgatacaccaagcatctggttataatatgaagaaaggagtatttttgatattagtgaagtcggtgcttgatttttaagtctttggatgaaattggcaaaatcacagaccaggggttgtctgaccggcattgcatggccgatctgaccggtggtgacatgcggtctaaccggctctgcatggtcggtttgaccggacagacagggtggtctgaccggcattgcgtggccggtctgaccgatcccagacagaaggctggggggcacgttacaattgattaaaaggctgaattaattgtgaattcggacatttgtgcccatgagttagaaatagcttggagaattcctttgattagagttttgaaagatcctacacttaaggttgatcggaagattcggcggtaagtgctcaaatattatatcgccaaaaaatagatggagtattacttagataatgatcaactaaagttgctaggagagtagtacatgaagggatttgtgaaattcattaatcggcccgtaagataaattggttgctaggagagtggggtttcattggccgaaaataattgatgattgtttcaaatgttatagagggagtgaagcttgtcaatggatcggcaatgttcaattagcgtctaccgctgtgttgaatcctatcattaaactatggccgttccgaggttgggtttgggatttcattggtcaaatttattcttcgtcatcaaaagggtattggttcgtgctaattgcaatggattacttcactaagtgggccgaagccgtgccgctcgagaatattacttgtacggaggtaattgactttattttgaagcatattgttcatagattcggtattcctcaaacgttaaaggagtttcttttatgtccaaagaagtgagaagttttgccaaatcttatgatattaagttgttgagttcttctctttactacgcttaggctaatggataagccgagtcgagtaataaaacattattgaaattgccgttttgccagttgaggtaaatcttggctctcttcggtatttcaagcaagacgacttgtcggttgaagattacaagaccttgatgaggagcaattttgaagacgtcatcgacaagcgtttgaagattttgaaggacatgaagacacttcaagacggtgtttccagagagcaactaatgggagatagcttgaagaaatacttcttgagcatttggtaagatgcttaggaagtcctatggccggtaattggattatcgccctgagataacatgttctatgcttttaggttcacgtatgttcaccaaaaaggcagggggagcatgtgtttacacctaaatttggcacctatggacgaaatagggaaaaattgccaaagtttggaaagtgtcgggtttccttcacaagggccggtcagaccacaggtatatgggcagtctgaccggctagtagggtcggtctgaccgcaggtatgtgggtggtcagaccgtcagggtctgagtccgagtctgttttcgtcgggtctcgggtttccttgctcgggaaggcatgtttcgtgtttccttttgtttctatcccgagttggacgtggagaagggcctgtagagggcaagaccaacccctatttaagggacaaggccggttcattgtaaaacctccaaatacaatctacttgaatcgttcttttactatgttttctattttaccctagtttaatccatctttgtcggtttgcgccgtaaaccgtccgccgccgctgcgagagtgcgacacctctttataggtttgtcctgaaaaacttccgttttgcccacgagacgggtagttatcctcatatcgatctaaatcggcctagaggctgattttgatctctaaatcggctccgttagccggtttagctggttttctacaaaacccatcttgatttggccgcttggctagattgagatggttggcgactccatatcaccgcaaagcgtttaggtgttgcgatcgtgcttgtcgacttatcacgaaaagttaccaacaacttattgttgctggatcaaacgaaaacttcaactgagccggaggccgaggccccagcattgtctttcacgcctgcactgacttcagctgatggagctcatcaggagccgctcgtcgttgctacgaagaactcaattccgcggattgcacatatgccaatggtgccaacgaggaggctgtcctgtccagagcattttgtcaccacttccgaaggagttcatcagctcagtcgctatagcttggcagactggttcagaaatgagcttgggaatgggatttgggggagctggatatttctggcccttagtttcgtcattcttgggctgaaccgcgagatttggaggcagccgcagatactcaattgatctggaggtttatttgaagaggatcgagcttgtgcgtgagcaagtcaccgccacgctagaagagctcaggctcttcagaatgttgatttgttctctcgtttcataatctaagtactagacagtctatatgtatgtcttcgataatctacaacaatatgtctaagtacgtactactagacttaagtattacaaagttacggttacctattgtctatctacatatatattccaatgattttgtgataatacagtttgtttctggatcttgaatttctaactcgattgggaactatgtcatgcattgctagggctgtcttctaaatagttttccccattcgcaaattattacttcattctgtaataccactgaactgacacttccatccgattaaaatggccattaaacgtaaatgaataatttctatagattagctcatcagcatgatggtaaaacatgcaattgaggggttttggacctctgcctgcagtatgaacaattgccttctctgtactctgttccactccattccaatatcatggtttttaggagaaaggaggaagtcctccatggcttgctgctgcagttccagcgcatgtatgcgtgtcggtgttgtcataacaagttatttattgattactgccaaggcaagccatcagaatatcagcaagaaaattggtccttaccagcctgcagccccattcgcaggtgttcttaagtgtcatcatttttccatttcaccccatctaaaacgaccaaatcaaagcagtcactgatcgatgacccaagtccagaatttatttttcaagtgtaacccatccaacgatcttccctccctgcttcaattaaaaatttggctgctagttgctatttgtaaaatccatagctggcatatactccctccgttttttaatagatgacgccgttgactttttctcacatgtttgaccattcgtcttat

SEQ ID NO: 10536 - DNA, 621 bp, Oryza sativa
tcgctgtacggacaagggtacctggcgtctgagtggccagaaggaaggcgtggaagctgccggaaggcggagcccccgagacggtggctgtagtcgtgggccaggcgacgaagcgcagtccaggagaggtcctggtacgcgatctggagagtgggcctggccaaagtgaagtggtgtgggcaaggccagctccgtgtatacctccacgggggtagaggtacacagagagctcacagtgagggggaacacggcccacggagtaccccgtgtactcgggacacgagaagccaaggaaacgggcgaggtcacgaagctgagcgacgtggtgaccctcaccaaaaccatgggaactgaagctggcgttcactgccatctacaattttgaaagagggagaaagatcagtaaccattttagaaacaaactattgaaaataaggaaaccaaaagaagccttagcttttcgcaagtagttttgaacttagtatccttagggtcgtcctaaacatcgggtttcgccctagggccaagcctgtgctctgataccatctcttgtcaccccccgaactagtcccgactggaactagcccgtgacgctccaaattaacctgttaatcgatacca

SEQ ID NO: 10537 - DNA, 7243 bp, Oryza sativa
ctgtatgtaagaagaacaatgtgacctatatcagaacaatggtctttttgttaattaaaattgtaataagcgtgtgcttggttactggtggaatgttttttttccctttgtatctataacatgttttgaacaggtatcattggttttttttgtgtgtttggggggtggggggggggggggttatggagtacggtcatgagttatggacaaagtgtgagataacagcatcctattactgcttctaaatgaacacatgtcaatatggccttgtttagataaaaaaaaattggcaaaaaacatcacatcaaacgtttggacacatacatgggacattaaatgtggaaaaaaaattaattgtacagtttgcatgtaaattacgagacgttgtcacgatatgatttgacaatgtgatgctataataaacattagctaataacggattaattaggcttaataaattcgttttgcagtttacatgcggaatctgtaatttgttttgttattagtctacgtttaatacctcaaatatgcgtcggtatacttcaaaaactttacacccaaagaatcaaacacaccctaagctttaatagtatatagttagtggtactgatgtcttgggataatgaaaattatgattatgttggattacgaaatgttatgattatatatgactaatagagagagaccttcaaggccctcgagtcttttctgtaatcattgacaacaccaagttgtttgcttggtggctgtttctgcagaatggaaatcatgtgcacactattgatgcacatggtggtggttcagaaattatataggacctggaagactgcatttttcccgtgataaaatttacaacatagacagcaatgtgcatcatgaagaaaattataccccaaccacagccgtccacaatcttccaaaacaaaaccactgcttatctggtattaccagaaagtacagcaactctgcaactattgtagctaactgtactcacagcaccccaagtattacataggcattgttaaaaatttagattacatttgggcacttgcatggaagaaatcttacattgctcatatggattgccgatcatctctatgctgttccattgctagactttggaggtagaaagggctcccaccatccatactcatacttggggtatggagctgtccatttctcaggcttgtcaaatttcaagtcgaccgggttagaagccaatgcctcctcaagcgtttctgcttcaaattgttctgctaagaccctgtctagcctcaacttcataaaactgataacaaaagaataaaatgagtaaccttgaggattgccatgctacttaaattgaaagtagttaatcatggtatcggcaattacaagatcattaaaagtgtagatgctggctatttcagtgattgtttggtcctcttcctatctggaattttggatggttagaagcacaactggtctggtcatggcgattcacaccatgtcgtacatcatgacatccagaaaataatgtgatgcatagtcactgagtcacatgctcagagccaaaattctgtgtattatcatgttgtccagtttcgtagtccaataagattgtccctttccctctattactttttcactagctttctcatcaaatcagtgtgttcaggatgcgaacgactcattaccaatgtccacaactcgaaatcctacccagttagtatggtgcgtggaaaaaaatcagagaaaattcctctgtgccctgactagttttcgctcaatcatttctatgcctctgaatttttcctattttcctacatgctcccgagtttcattttaatcccatatatacctattccattagttgaccgctagatttctttttccaaaacgacaatattacccctcgtacttgtgtgctagcttattgagaaaaaaaatacaattctcaatgggaaaaaggttcattattttttttaaaaaaaacaaatggggtataattctttgaccacaaattttaaaactgaaatttatcatttttaaatcattttcaattcaaatgtaagccaaacaaaaatagttttggtttcaagttcttgatgaaattttgtatgaattttatcagtattttgaagtttgctaaaaatttgaatctttcatatttagggtcaaataattccatcacttttgattttatcatatataagaattttccacatcgagaattgtgttttttctcaataagctagcacataattatgagagaagggcagtatagtcatttcagggaaaaaaatataacggtcagttcatggccaaataacggaatgggtatgtagggtatcaaaatgaaaactcaagaccatgtaagggatgtggcaaaatttatagaagggattgagcgaaaaaacagaggcacgtaaggaattttctcaaaaaattaagatgacacttgtagatcattatcatgagccatgacaaagaaagacagatccaagcatcatagcaaataagatggaggatcacgtaaaattccaaaggactgttgacttgagcaaaactcaaaaggtacactcagtgtcttcgtttacataaggtgtattcatccattctgaaatgtttgacattaataaactaaccagcatcatacacaaataaacagagggagtagttctgagtttttccagtcatatcaacactacaatatacctatgcctcacaatacttcacaaggactacaaaaaacttttgtacttttgcatttgaaacaggatcttgaccaaatgttagaaatgtgcccggtgaaacacatcaaacttggaaaatggacgttacaattgtacagaacattacgggctcaaatctgactagttgctcttataagaaaaatattctactatatgtctatatccctccgcttgcatttgcaagagacacaatttactgttttgtgggatatatttatagctgcagaatgtgtttacagtcgcaggatgcatatttcgtgggaagcattttacaatcgcgagtgcaagtccgatggacaaggcactactagcatctttggctgtaattagtgctatataagaaaactactgcttatttgcaatagtttggcatttcttatccctgaatttgaagttttttcaacaaaaaaaaaagaagaatgcttgcatattaaccaaactaggcattttggcatcgtccttattttgtcaccagctcagaacatgtactgaagcaaatgtatgtcggcgtaggatcagcaataccgtaaagctctatttaaatccacatttgatgagtggtaagagaaatgaaaaactgttgatgttgtcatcatgttggttcggtgcttttgcagtttgtactttgttctctgctgatcataagtccataacacactacacacaggtaataccgtactgacactgcgactctttatgataggcgttttaatttctgtactagacatgttttgtgttgtactagtaattagcttattattagcatcggttgcggctgcaattgaaacgatcgatggagggagggggcactgcacttacgtgatccagttgccgtcggtggagacgagcgcgacggcggggcgcttgaggcgcttggtgatgttggggaacctgtcgaggaacttgggctccaccaccagccagaagtcctgctccttctcccgctccccgtagagccgcagcttctccttcagctgctcctggaagtgctcctcctcgtccagcatgaacttggcgttcgccaccaggaagtggtacttcttcggcttcgcctcctgcgcgcgcccaatccaccacaattctccgtctcaaccgggacgggaaaattatcaaaattagggcgggaggcgaggggcggtttggtttacctgatcgggaggctcgggggagccctgctggtcggagtcgacggccacggcgcggagcgacaggcgccgccgcctcggctggcacgagacggcgggcgggagcgcgaacccggcgccgacgcggggcagcgcggcgcgggacggcgcgagggtcgcgaaggggcggagggacagcgtcgcgggagccaccattgccccactcgcctcggctgccgaactcggggacggagccgaactgaagtgctgaagctggtcgtgtcagctcggagagggggcttgaggtcggaggacgacgatggacggtgagctttagccttatctctggacacgaggggtgggcgcctttaatactactgtgccgtgccattactggttaaatggctccatgacagcacacgggttttcgcactgtgccgttttgaggcccatagattttttttttgggcacacgtggaccctactttgggttttatataggaataagttcatctgaggtccctcaatctctatatacgatttcaggtctaatcccaggcctctcactgagccacgtggcatcacgcttgcgctccatccaaattctcagcaggagaacatgccacgcattcaaaatgtcccatagccgtccgatgacatacgaacggtgagaaaaaggtccagcggacctaaatataaaatgcaagttttaagaagggtttttaaacaaaatggacaatgccatctagaagagcctggagtagaggaaaaaaatcccagaaccaaaaaaaaagaaggggctgtctatataggaatcgaatgatttctgaagctccaatcatacagattttatctaccataggatgcacatccaacaactcagaaaaagtgatacaaatagatattacacttaaaaacagatatattatttgattatttgaacgccatttttttaaagcctaaatccagatccagatccataaaagcccaaatccatatccagatccataaaagcccattagtaaaaagaaggcccaaaatacaaaatttgaatcaaacacaaataaacaaagcccatgattttttcgcccatgcgaattatttgaaggcccaagtctatatccagatccataaaagcccattagtaaaaagcaggcccaagatacaaaattagaagcaaaacacaaggaaataaagcccaaatcataatccaacagcctatccaaaaaagtagtagggaccaaacttggaagccaagtagatgaaaaacatgtcacgtgaatcaaccatgtatgggaccacacttttcaatcccctacttttcaacagcactactagttcacaaacagatctagcacgaatcaaacatggagctaggagaagagaaagaagagagaaaaagaggatccaaatcgcagatggaaggagagagtacaatgtcagaatcaaagagtagttctataggaaagaagaaatcaaagacaacttctgaacagaaagttgagatccatacaaaggaaacacagaatctggagaacacaaagaaaaaacaagaggaaggcaaaatcaagagaaacaagaaggctccagttcaaggttagttcaaggctccaattcttatcccctatatacaattcctgaaaaagatcaaagagagagtttaggtcaaatatataattcaaaagaatacatgaaattgctgaatatgtcaaatgaaacaaggttaacaatccactttgctggataaatacaacaactcagaactgaaaatttcatatgtttgctctgtagatctgaactatgtaatgttaaaagtaaaactacactgcattcagtactacaaaactgcattctggatgatagtattactgtgtactattgatgaataccaaactaactttataaaaaaacatgacagattgattagtcttccaaccttactgaatttcactctgaagatatcacagtcatacagttatacagaaatataacaactaggccatatagcatatcctgaattgtcatacattcaattttatcagcataatcaccatattaaactaatgacaaattcaaatctcaatgtcaaccacttgtctcatccaactcaatattacataaaagttcaatatctcatacagcacaaacaaaagagccaattcatatgaactcacatcttaacatgttactgtaaaaaagtaataaaattacatacaagaatcacagtaattctagtattaactcattgtaaaaagattagttcagtaaacaaaatagtttagctcacacaatcatgcacaaattcaggaacacattcaagatatgttttaaactcaagactatctcagttcaatgtttctctcatcatcagataacaaaatgaagatttcagataatagatcattattgatttgttcaatgtctcaaaatagaatataatgaaactagttacagtgaacttgtattacaaatatatagagtgaacactacaatttcaattgaaaatacatgtaactacaaagaaacaatgtaaaattcatatgaaatcatgatctaatgcagtttaatctcaatttcaagatgatttcagatttttcgagcaaaaaacagggtatcaaatacttcaaaagtagtacatatgtaaaaaccaaaacaaatcatatctaattgaaatagaaagaaatagaaaagaaaaagtgccatcagatattataagaaaaagtgccatcagatagtttgttccataagtaaattttaactggaattacagtagcattacactctaattgaaatacttatttactgtaaccgaaggtcgacgccgcttcttcctcgacgccgtcgccgttcgttgatcttccgccgccgttttggtcgccggtgagttcgccgcgtcgccctctacgtcctggtgccctccgttcgcgccgccgcgccatcgttcgccggcgagcttgtgctcccgagccgccgccggtggtgacgtcaccgctgacgtcatcgtcgtcgtctctcgtggtccggccgtggatcggtcgatctcggccgtccgttttggataagatcgatctcggccgtccgttcccgtgaaccgtcgccgtgcgcccggtccaccgcgaaaccctagccgctgacgcaataaatccctttttccttttcaaaaataattcattattgcgtcataattcaattaaaatccatataagtgttttaatccgatttaatcttcaaaaattcataactaattcatcttagctcggatttagttggttcaagtctctaaatttttctaaatttgagatctacatgttaaaaatatccacatgtactgttcatgcttgtttttgtgctgttttggtgattttgctcttttctgcttagatt

SEQ ID NO: 10538 - DNA, 710 bp, Oryza sativa
gaagcccccaacttgagtgcgaagcgcgagaattagaccaactagctcggcttcctaactgatgatgcgccgaggtggtgggttaccgactgccactataatcgtccggaagtgttgccgcgatcatggccttcatcctgttgagagttggcgtcacgtagtctggggcctcaggcaggatggtgtcgatgagggtgattgccccgactgcattctgctgaggtgtgagaaacacgttggtgtcatctacaacagtctgaccaatgagttgtcgagtgcgacgtccacattgagccaaatctctccgccttcccttttctctctccgtctttgttcttcttcctctcttgtacggcgctcctgatccagacgctcacgttccaatatctgccactcctgctcctagcgttcttgttctaaccttgtccgttcttcgtctgccagtcgtgtgccctctgctcgtctgtctcattgttggtcataaagacgccgaagtacagcgaagtgtagtcatcgttgaggtcaccgtagtagtcgtcgtagtagtcattgtagcaagcgaagttatcgaagtcgaagtcattgttgtagttgacgatttctggtttcgcttgagatccgatgttaggggagctaagatagctggcaatttcgtccgtcgagcaagagctgagtggttggaggatgactccgacctccctggagctaga

SEQ ID NO: 10539 - DNA, 676 bp, Oryza sativa
ataagctgtctcaaagtcggcgacttcaaagcagacattatctgtatgaaagttttccccagtgccaaaggtaaccggcatagtgatttggccgagtggtgtagatgaaaacacaaggaagactccgtgaaagggtgcattcctcagccgtaactcgatcctcgagatctgcatttcgtcgagagtcttggcgaagaggatattgagcgctcttccgccatcaataagggttctcttgagcttacgttgcgaactactgggtctagtactgggggtaccgccccgggtggaccactcggttgggatgatccgagcgatcgaatcgattgcaacctcagaccattgtaggaattgtggtacttctggctggactgcgttgatctcccggtcggtcagcttctgcttcctcttggactcgtaggcaagtggccctccgaagatgtggttgagctccttccttgaatcctgcaaagtgccttgagctggctcggtgtcgtccttcttctatgttgacgtgtcagtttccccttaagtcggcttcttgaattgagcgacgtactgcttggcaaactgcttgtagacgaaacaatctttggcagcgtgcttggagttcgggtgaagtgaacatggcgcattcatgatcttgtcttaggtgttgacacgaattcgctgatgc

SEQ ID NO: 10540 - DNA, 932 bp, Oryza sativa
ctggtctttttccatacactccttcagatattttatcaaatttggaatagtccttaatcatagatcttttccaaactttaattattggtgtatcaagtaatactttttgtgaaccaaagttgagaaaatccaggtaattaacctatgaaacattgaatatagaaattaaatgaatagtcatttagtacaaaatataaattagtataaatggagggaaaaaaatttaccgctaaatggaataaacaaccaccaaaagttttcgatttctcaatcttgctaatgtgttccatcaaccagtcaaaaactaacttgcaccagtccaaactttcaattaagtccatgtcttcaaaggcacttaggtattttgtacttggaatcaaagaagagtttggacaaaggaagcaattcaaggaaacaatcataaagcagatgagaatttgatcatcgggaagttcttcatttttaattaacttttctccaaagaacttgacagaaggaatagaagttttcccaaaaatctgaagaatcttttgtttgccataatcaaattttgaatggattgtactaccaccaacagggaggcctagcacaacatggacagattgcttgttcaatggaataagtttttggcccaaaactatatcagaacagttcacatctacttgttttgtaatccagagagcaaaagaattgggaacaaaacacttgtcaaatagcagcatgctttgaaaacaataattttcaatgactgttttgtgatgtggacttaaagaatcaagaacttttgagaaatatttgactgagaatctagagaatgcatcagacttcaaatcagtgtcaacatttttgtcctgacaaaaagaaaataaaacaatttaatcaataaataaaaaccaaacatacatagatataaagggcattgcaaaaaacta

SEQ ID NO: 10541 - DNA, 2699 bp, Oryza sativa
  unsure (1)..(2699): unsure at all n locations
tcctgcgnccccaaaacgttcttcatgtaatgagtcaagaaagacaaacatttcatctttcagatgaacaatgaaaacaaaccagtggcgcttgtagaaaattggaaagaagagctgaaataattaaataaaacaaattataaatgtaaaaggaaatatgaaattaaatatgacaagtaatttacaaattcacaaaccatttcacatgattgaataggtctagcttttgatgcaccatcaaagcatttcctaactgatgagaaatcagttcttgatggatgctttagaagatcatcctatagcacaagtgtattcaataatttaaatattaaacatatagtaaaaattggttttcaattataaatataataaaacaaaaaataagaaacttactccaatagaagagaagaaataatgttttttggattttgaggggtgagataaatgaaacaaatatcggcagaacacagagacaacaaaattagaaacttcatgtccaaaattaaatgatcctccaaaagaactgaatttgcagtgaacaccatcaatttcaactgcatgtcgtctacattcagaatacaaataaattcaaattacaaatcatacattgaaaatgaagattatcagaaaaaaaaagtacaaaatagtacttactcttgatatctgcttgttgatagagtgcagacagcattataaatttgtctttcatattgtgagactgtgaagtttgatctttgaggagtataaggatctgtgcaatactttgtgggattgattacccttctaagatcatgatgaattggttttgttccagaagtacttggattgaaattcttcatgttgcataacaaaactctttctggactagcaaaggttttgaagttttgtttctgagaatccaacagaattctattcattttattgtacatcatgttggttttgtttccaatatcagcacatttcttagagaatttcttttcaccaataaaaacatcaggtgaatcctgaaatttaacaaataaattaaatagtacagttagaagcatattaaaaaaagaagatcaaaataactagaaataaaaaataataattattagcttataaccagaacagaaaaatgataaataaaagtaaggtacagggcatgaaatatttgaaatatcaatatgaaataacagttcagtaaataaactaatgatgttcaacagcaaacttacaaacttgagattataaactgaataaaaagaaatgaataagcagtgagaagaaaaaccttttggaataaaaattgaaagaatgtatgttattaactagaactgaaatacattgtaacctacaagaattacagcaaaactatggagaacaagaatgcaaaaatggaataagaaaaaattttaaacaccatttaatttcaaaaagggaacatcaatgaaaataaactacgagattattcatacctttatgatgtgacaaactttttcattttctttgttttcattgagagaagcattaggagaagttgaattttcaagtgtcaccatgtacatcttatcctaaaatttcaaaatttaacaaatgaaagtttagtttgtatatacagaagaaataaagaaagaaattaatgtcagaattaccggactgtctgaacagattattgggctttcaacagcagcagcaaaagtttgagacaactttcttggagtgatctgcaagatttgtataaatcaatataatgttctaaaaaagtattccttatgaaatttgaagttacttcacaagtaccttatttcttaaaacaggatttggggagtatgaatcaggaataacttgatatgaatctacaagatgagcaggtgtaatttcttttttgaaatcatcattttcatgatggaggtcatcatcagaatcctagattttaaaagacggttgatcatgaaaaacttgattgtttcgagctacagcaataacataagaattagaaacaaaaaatatggcaacaaaaagtaagaggaccatagtacagtgcactaaaatcacatgacaaaagaaatgaaatattacaataactcaatttttttgatgctagaacaattaaagatatacaagtaaaaacaaatgagattccgttaaaaaaaatttaccagtcaaggcagaatttttctctgtttcatctggtggattaataggaacatgaccttcaatgttaaataggcacaaacatcaataattcatatttaattttttaaaaaaacagattaacaaatttagaaaaaaaaataacctgttttgttcatctttgtcattatttcatcaatgttgatatgtttaatctgcacagataaaaaatgacagttaaaaactatcaacaattacagttctatatattcagattataatgattgaaataaaaatgaaaaaaaaacctcttctgaagaattcaaaatggtagacttattcacaggattaaattcttcatttggaattggcaacttatcatcatctagtactattttactgtttccctacaaaaaaataaaaggacaaaaaaatgcttaatgattcacatgactattagaataaaaaaaattgaaatgagaacagaaaccaatgtacctttggagatgagcgtgaaattgttatttttttgcacagcttgattaacatcatcattattttcttcaactggttcatgaactggt

SEQ ID NO: 10542 - DNA, 17111 bp, Oryza sativa
tgccatcctttgttatcctgtgcacttgcatatttgctgcgtggcttgctgagtatgtcatatactcaccttgcaatcattcatcagaggaagagttctacagtgaagctgatggtgtggaggattaggtgtagccctggtcaagctgcctgtggagtggagtcgtctgcgccgtttatcttattttttccgctgcttagatctttattgattgagaggaactatctacctctataatgacattttattcgcttattaattagagtaataattgtactctattatcaatttgttattgtgtgcctcggctgattcctggacgagggttcacacacatgtaagcgtttggaattttggatagaaattccgggcgtgacaagttggtatcagagctccttgaccctaggttatgccaaatggttacccatagaagccctctaaaaatattggaaaagtagaactgttctcctccccttctcttttaattaaaccaaactaatggcacatgcatttcctaatattttttttagtggttctcgttcaaaatttattctagcgttattagtactgtacatctattactgtactaatggctcattttaccaacaaaagttttacaatattgtttagtttaatcttgctgcaatgaaataaatttagcatgttgattttataactttcttttatttcttttgaaaccggttgttcaaaagtacaaaatttgtgaccttgtttccaactgtttcaacttatcctgcaagtttggcttaccttttactttgattttctaactttattcaaattaatccaaaaacttgtgctattaattggataaatgtcttaactccctcctttcacttgtctttagatgccgcgctacaagcctgagtacttgtttggtgttgagggatttgtccaggagttgcgtacgatgtcctttgccataggatttgggactgcccctttctatgcccaaattcctcatgatcgtcacgaagagaagtgccgagtcaaagtcaccttgaacagtaatagtgaagatattccctcagtgatgttcgaagccggaggaagaaactacatccatacatgtcaggaggtggcaaggatcgccataggagagctccttgatcgctacagtgatcagttggccgacactgagtatcgctaccatcctcgccaaccacagggaagtgaccgtggcagctaccttgagactgagggaattgagaatgatgctaccacaaggcatttggttgagatgctgtgggctatggatgaaacccgtgcggagactgtgttagcagcccaagatcgtgaagaccggaatcgtggtaagatttgcaagcttgaggacaaagtggatcgtttggagaaggaactagccgcattgaagggagaagcaccaccgcagaaggccaggattcgtcttaccgcaaggaagagagctctatttgtccctcgctaccaattggtgccaaaggtccgtgtggtggagaaagaagttaccccagccctagcggatcctccggtcgtcaatgtaagtgatgatgaaggagatgaatcaaagcgcacccattccaagattgagtggggagcaactcaagatgatgaagacgagccgaacgagccttcaatcaactccgatgcccggaagacctagaatgccttgtcaaaccgttgtcttagatcgttgtgttagtttgcttgtttaagtttggttgtgtgtgtctcgcatgtgatttacatcagtggtgggatgtaagtgcgtgcgtttgtttgctttcgagtgttaggtagttggtaagtttagtggtgtgagagtcttcagttttgtaataatgaaactcacttaagatcaataaaagttaaattaattctcggtcctaagtagttttccccggtttctcttcttatgctcctgcccatgccagatggtgctcactcgcagcaatgggaatggccccaacaacaacaataacaacaacaacaacaatggagagaatcccacacttgcctaagtcctggctcaacagacacaacttatgaacatgatgatgcagcaactccagaaccagcagaaccagggaaataaccatgcacctccccagaacaagttagcagaatttcttcgtgtgaggccgcctattttctctagtaccactaatcctgttgaagctggtgattggttgcacgccatagaaaagaagttggatttgcttcagtgcactgatcaggagaaggtctcatttgcatcacaccagctgcatggccctgcctctgaatggtgggatcactcccgccttaataggattactgctgaacctatcacttggcttgagttcaccgctgctttccggaagacgcatataccatcgggagtggtgtctctcaagaagaaggaattcaggtcgctcacccagggatctcgctctgttaccgagtatctgcacgagttcaatcgtctggctcgttatgctctggaagatgtacgcactgatgaagagcgccaggagaagttcttggaaggacttaatgatgagctttcttatccactcatgactggggattatcctgatttccagaagttagtagataaggctattcgccaggaggacaagtacaatcgcatggaacagaagaaacgccggattgctcaattcaagacacaacaggggaataatcagaggccgcgtcttactttaggaccccagtccatgccacagggaggttcttcgtctgttgttcgtccgcagcgtcagttcttcaacaacaatgctggcaacaacatccgcaatcaagctccacgccctgttgcagctccaacacagcaacagcctgccaagagggagcaaggcagcaagcccgtagtgtgtttcaactgtggagacccaggacattatgctgacaagtgtccgaagccccgacgcgtgaaggctgtccctgcccagagcaactctaccgcaccagcgccaaaggcccgtgtcaatcatgttgctgctacagaagctcaaggtgctccagatgtgattttgggtacgttccttgttaacttagtccctgcaacagtgctttttgattctggtgctacacattcattcttatctatgagttttgcgggaaatcatgtgatggaagtagaagatcttagacgtcctttgatggttaataccccaagtaatcaagcactctctttgcaacgtagcccctctgtcagaatagaaattctcagatcattatttctggccaatcttatcctgttagaatccaaagaccttgatgtcatcctagggatggactggttagccagatataagggtgtgatagactgtgctaacaggaaagtaactctcaccagtgatgatggtcgagttgtaacaattcatgcattgtcttctgagtctttaaggtcaagactgaaccaaataactttggaagagattcctatagtccgggagtatcctgatgtgttcccagacgatttacctggtatgcctcctaaaagagatatagagttcagaatagatttggtaccaggaacaactccgatccataagagaccttatagaatggcagccaatgagttggcagaagtcaaaaggcaagtagacgatttgcttcagaaaggatacatcagaccgagttcatctccatggggagctccagtaatttttgtggaaaagaaagaccatacccagaggatgtgtgtggactatcgtgcactaaatgatatgactatcaagaataagtatccgctgcccagaattgatgatttattcgatcagcttaaaggtgccaccgttttctccaagatagatcttcgatcagggtatcatcagttgagaatcaaagaggaagatatacctaagacagcttttaccactaggtatggattgtttgaatgtactgttatgtcttttggacttaccaatgcccccgctttcttcatgaacttgatgaataaggtgtttatggaatacctagacaagttcgtggtggtctttattgatgacattcttatctactcccgaaccaaagaagagcatatagaacatcttcgccttgcactagaaaagctacgagaacatcaactgtatgctaagtttagtaagtgtgaattttggttgtctgaagtgaagttccttggtcacgtcatctcagcaggaggagttgccgtcgatcctagtaatgtggaatccgtaaccaactggaaacaaccaaagacagtttcagagattcgcagtttcctaggcctcgcgggatattatcggaggtttatagaaaatttttccaagattgctaagcccatgacacgattgcttcagaaagatgtgaagtacaagtggtcagaagaatgtgagcagagttttcaagagttgaagaatcgcttaatatcagctcctattttgattttacctgatccaaagaagggtttccaagtgtattgcgatgcatccaaactggggttaggttgtgttctgatgcaagatgggaaggtggttgcctatgcatctcgtcagttacgtccgcatgagaagaactaccctactcatgatcttgaattagctgcagtagttcatgcgttgaaaatttggcatcattatcttttcggtactcgtacagaggtgtataccgatcacaagagtttaaagtatatctttactcagccggatttgaacatgagacaacggagatggttggaattaattaaggattatgacatgggaattcattatcacccgggaaaggctaatgttgtagcagacgctcttagcagaaaggatgacagttaccattggaattatgcgaggaatttgaaagattaaatttgggaattgtcagtagaggtttcgttgcagccttagaagcgaagcccactctaattgatcaagttagagaagcccaaattaatgatcctgatattcaagaaattaagaagaatatgagaagaggaaaagctatcggtttcttggaagatgagcaaggaactgtatggttgggtgagagaatctgcgtccccgacaacaaagatttaaaagatgcaattctgaaagaagcccatgatactttatactccattcaccctggtagtaccaaaatataccaggatctcaaggaaagattttggtgggcaagtatgaagcgtgaaattgcagaatacgtagcagtatgtgatgtttgtcagcgaatcaaggcagaacatcagaaacccgccggtttgttgcagcctttgaagattcctgaatggaaatgggaggaaatcggtatggatttcatcactggtttacccagaacgtcatcaggtcatgactctatttgggtgatagtcgacagacttaccaaagtggctcatttcatcccagtaaagacaacatattctggaagtcggttggcggaattgtatatggcaaggattgtgtgtttgcatggcgtccctaagaaaatagtgtctgatcaaggcagtcagtttacttcaaaattttggaagaagcttcaggaagagatgggttctaagctgaactttagtactgcttatcatccgcagacagacggacaaaccgaaagggtgaatcagattttggaagatatgttgagagcttgtgctttagacttcggtggaagttgggataagaatctaccttatgcggaattttcgtacaacaacagttatcaagctagtcttcagatggctccttacgaagcactgtatggtcggaagtgccgcactccgcttttgtgggatcaaacgggagaacgtcaggttttcgggacggatatcttgagggaagcagaagaaaaggtgaaaatcattcaagaaagattgcgtgtggcccagtctcgccataagagttatgccgacaatcgtcggagagatctaagttttgacgcaggagattatgtgtaccttcatgtcacgcctcttcgaggggttcatcgttttcataccaaaggaaaattggcaccgcgttttgtgggaccttataagattgtcagtagaagaggagaggttgcttatcagttggaattacctcaatttggcaggcgtccataatgtgttccatgtgtcgcaattgaaaaagtgtttaagggtacctaccgaagaagctaatcttgaacagatagaagtccaagaggatctgacctatgttgagaaaccaatccgtatcttggaaatagatgagagaagaaccaggaatcgagttatccgtttttgtaaagtccagtggagtaatcactcggaagaagaatcaacttgggaacgagaagatgaattgaagtcagctcatccgcatctgttcgccagttcttccgaatctcgaggacgagattctgtttaaggggggtaggtttgtcacatcctaaaaattcaaaatatataaattgttgtttaaatggaattttttagaaatgattttaaaaatctttgaagagaagatctaattttaattaataaattccaacataaaatggggccagataaaatttcattaaatactttgcttaattctataattcctagatttttctgggatttatttgagctaaggaagtatttttaataaatggaattgcatttcatgaataatttaaattgaaaaaggttttaaaaagtcttcttttggctttgggccgaaagtcggcccaaatcctctctctctctctcctcggcccaagccggcccagtccgcagccgcgcgcgcgccctcgctgtagctgacaggtgggtcccgcctgtcggagtcgtcgtcttcgtcgcgccgccgccgcccgaaaccctagcgccgcgccgccgccgtttccttccaaattcggccgatcctttcctttcccggtgaaatcaattgaggggaaatgtttcccgagatctcctctaccttttctcttttggaatcatcggctaaatcggcttggaaagtgttttattcgaggtcgaatcggatcggtctctttcctccgaaccccgaagtttccatagcgtcgccggtcatcgtgggccttcgccgccgcctcctagcccctttaaaaggacccccggagtcgccgctacccgtcgccaccctcgccttcgcctctcgttgccgatagagccctagccccgtgtagcctcgcgccgccgttgtcgccgccgctccagccgtgctccgccgtcgctccagtcgtcgccgtcgctcggggaggtcgccatcgtggtcgccgtcgcgtcgccgtcctcgtccgccccttcgccgtcgctgaagaccgccggagcatcgtcgccgtcgtcaagccgaaggtcgacgccgcttcttcctcgacgccgtcgccgtccgttgatcttccgccgccgttttggtcgctggtgagttcgccgcgtcgccctctacgtcctggtgccctccgttcgcgccgccgcgccatcgttcgccggcgagcttgtgctcccgagccgccgcaggtggtgacgtcaccgctgacgtcatcgtcgtcgtctctcgtggtccggccgtggatcggtcgatctcggccgtccgttttggataagatcgatctcggccgtccgttcccgtgaaccgtcgccgtgcgcccggtccaccgcgaaaccctagccgctgacgcaataaatccctttttccttttcaaaaataattcattattgcgtcataattcaattaaaatccatataagtgttttaatccgatttaatcttcaaaaattcataactaattcatcttagctcggatttagttggttcaagtctctaaatttttctaaatttgagatctacatgttaaaaatatccacatgtactgttcatgcttgtttttgtgctgttttggtgattttgctcttttctgcttagattccgtcgtttccggagagtccgttttcgcaggagaagagtttgaagagttccaaggtcagcaaggcaagtcacacagatcccaaacaaccctttgagcatgttgatcccgtttaaagctatcgtttctattcaactattgcatttattttcgaatgtcattgggtggaattaacctattgtttgttatagccctttttgttcttgattactttattccttgataccttgggttgttataacttgactagttgggctatatatatattggttcaactagatgtattagatataattgcttagccctgcttagaaacattagcacactattgggataacttaagatttactattatttaatgatggcttaatgatagttcacgatggtcaatcgtgattggttaattaattaatgtgccaactaaaacctgataatggtgggttgtgagcacatggttttgatggtcgtgctcatgacaattaaggaccggttcacgagtttcggttgtgaaacattaaccgtgccaaccacaagccagcatgggcaacggctttaccttttgtatagcatggttcattgcggagcaccagactgagaagtgacggagataagcccacgggggtcgctggggagtccatgccttgtttataagggggtgattatgatccaggaaaggtgcgctgtagtggattgtgttgtgcaaggggtattgtcacagctcctttccgaggtaccgtggtggtattgaggcacatggtgacatgatgtggggctgtgtcttgtgggtacattggtacacctctgatcagagtaaaactattcgaatagccgtgcccgcggttatgggcgggtctaacaatgtctttcgtgattagtctcacacctctcatcataataaaagatgctataactggtaataatttgattagctcctggtttggaatggtatattcctagtttggagatagaactgtgcagctgggatggttgttcagaatggttgggcctatacaacagggtatgttgtatagcgttggattaatattgtttaattattacttaactgttttattaaattctcaaatgtttgctaaatgctgcttttgcaaaatgaaaccctattatgccatcctttgttatcctgtgcacttgcatatttgctgcgtggcttgctgagtatgtcatatactcaccttgcaatcattcatcagaggaagagttctacagtgaagctgatggtgtggaggattaggtgtagccctggtcaagctgcctgtggagtggagtcgtctgcgccgtttatcttattttttccgctgcttagatctttattgattgagaggaactatctacctctgtaatgacattttattcgcttattaattagagtaataattgtactctattatcaatttgttattgtgtgcctcggctgattcctggacgagagttcacacacatgtaagcgtttggaattttggatagaaattccgggcgtgacagtaacgttcagatgtaatagacaaggcaaaccaacttctcaatccaaaccagtaagcgcagaggaaacagtggtttcggaaagaaatacaaatgaaaatgatgcaacagattgcaagtgtgctctggttatttcagagaggaatgagatttggaatatttcaagggtacaattagaccacaatcatcaactaagtccaagagatgaagtgagatttctcaaatcacacaaacacatgactacagaagaaaaaatgctcataaggaccttgaaggaatgtaatataccaacaaggcacatgattgtgattttatctgttctaagaggaggattgacttctttgccttatacgaagaaagatataagcaatgtgagaaccacaattaacaaggagacaagcagcaatgatatgatgaaaactttagaatttttcagaaggaaaaaagaaaaagatccacatttcttttatgagtttgatttggatgagagcaagaaagtgaaaaatctgttttggacagacgggagatcgagggagtggtatgagaaatatggtgatgttgtgagttttgacacaacatatttcaccaacagatacaacctcccgtttgctccctttgttggaatttctggacatggaaacacaattgtttttggttgtgcatttttgcatgatgagacttcagaaacatttaaatggctgttcagaacttttttgaaagctatgtcacaaaaagaaccaaaaacaatcattactgatcaggatggagcaatgagatcagcaattgctcaagtatttcaaaatgcaaagcacataaattgcttctttcatattgtaaagaaagctttcaatctatttggaaatttgttcaaagcaaaagaagggttgtatgatgagtatgaagacatcataaataactcagttacagaagaagaatttgagtatttatggcaagaaatgattgacagctttgaagttcagcatatcaattttctaaagcacatgtggtcaattagaaaaagatttattccagtgtatttcaagggtgatttctgtccatttataaaaagcacagctctcagtgaagggactaactcaaggtttaagaataatgttggtccacagtacagcattacaaacttcatgatagagtatgaaagagtaatggatacaattcaaaacttggaacagtttgatgatcacatttcaaggacaaagaaaccaagcaaactttggtcccattactacattgagtaccaagcaatgagaatgtataatcgcaaaatcttcatcaagtttcaagttgagttgaaaagaacaactagatttcaaataaatgaagtagagaagttcaaaacttatgaagttttttttggcattgaatcaaaatattcaagtaatcagaagaaggaagtaccttgttattgtggacttggaaaaggaggatttcaactgcatttgctcaaagtttgagaaagatggacttctatgctgccatgtattgaaagtaatgctccacctcaatgcaatgaagataccagaaaaatatattattgaaagatggacaaaaaaagagtacaaaggtcttgggggaaaaggcaatggaaatatacctttagcacagagctcaatcctgagattcaacattttgtcaaggaaaagtgcagaaatagcatcaaatggatcgaaaagcaatgaaactttccagtttgcagtggaagagatggacaaaattgctaaacaattggaattaatgtgttcaaataaagatgctgagcaggagatcaatgattcagatccaaatgcagaagacaatttgaactcacatgaaaaaggcaatcaacaatctgaggaaaatacagaagaaatattgttggatccagatattgcaaaatccaaaggcaggccagctcaaagatataagacaatcagggaagaaatacagcaaaaagaactatatcattgcagtcattgtcagaggacagatcacacatttccaacgtgccctctgaaacacgttgagtttgacttgccaaggaagaagagaagaaaggttaaaaatacaagagaacaggtaacaaaaattacaaatccatatgaattgaatttttttaaaaaagtaataaagaaagatattatttgttgcaggatggtgtagagcagaaaaagaaagatgtttcaaacaaaagaaaagatttgcaacaagatatatcacaggagaagcataattctggggctgaattagaaggcaaaaagaagagaaattcatcttcatcaaaaaggggtggcacaaaagaatagaaatggaaatgactgaaaatagagagaggtttacttgaatacaatggaaatagacatattccataagtttctgtaatattccagaacatgtactctggtgtcacaccccaatctgataccgccgtacaacggcacctgacaggagcgtgtcgtagggaaaacggcgtgaaccgtttcctacgaaaccgcgatctcggtaccagtcccaggacatagtgctggtacccacggtgacaaatatgaatcatagcaatccttaaaataaatagaggacttatttaccttaacttaggttgcagctcagaacaatccgagaatgcaaccgacgacacggacgaggaaacaccaacaacagcagcagcagcggaaccaacgaactaacacccaacaccacaggcgacggctgggaaccaggacgaaaccctaatcttctcttcactttatcttctcttcagggcggaggaactatatatatatatatttatatagagcaagggtgagtactttcgtactcagcaagtcacgggaacttaggtgtttgatgcaagcttggaggagaggcaaggttgttttacaaatcttttatttgaaggcattttgaaatcactaagtgatttatttctttctaagtttgggccgaagagagacttgcgtctcgattcgactttaagagatgcttttcaacaactcaattggtaatgtaccgacctcccgggtcagatcattacttctcggctcccagagccattccacttgattaatcggctcccagagcctttttcattttctcggactcccagagtccagctgcccagcagcacaacaatccgcttccactcgggaagcctagtctatgatgcccacagacatcccgaatcacacagattcgtttctgaccactcaggtcatccatctgccacataggctgattctggttacgattcccacaccacaacaacttttcacaaagcacaggcaaacaaatctacgcaacgggaaccacctcacatccgcccatgaccatgggcacggctgttcgaacagttagttaacctctgcagaggggtacactttacccacaagacacgaacttactccagacactggccggtgtcagaggttcgcgacaaagcctttcccaagccgacccagggatacctcatgccacatagaaggatcaaatcctcacataatcataggccattttaggcgttcacaaatcaaactccaaccacctcgatcggtaattcagcaagcttctcgttcttgcattaccaggaacccggtttggctccaaccgtcgaccccgccccggcgttcccaactattggcatgcgaggtttccctgaaccgactagttacttagccagggtgtcccattccaccttgtggttgcactttgattatgttcgatgagtttcccacaggaatcggtccttatatgcgaatacgggacagtgccacataggcacaacccccgcatcgcgagttttcacaattcatttttattttcaaacacaccgacaccacatgtcgggttttgaaggcttcacaaacccatttcccaagttttcgacaaacaacggtgtatgtgggatatttggtatacgcgctcagagagcacgaataccgaggtaccacaagggtggagcgacaaggaaacagggtagtacaacctacggaaattagtgcgattactgggtaggtccgtcggtttggcacgcaaaccgaggccaagcaagttaagtgtgtgattctaataatgcaagttgcaaacaaaataataatgacttttcaattataggggcaattgatcaaagggtgacttgccttgctcaaggtcttcacgaagcttcacgaatcttcgagaaaacccgcgatcgacgaaaatccgataaccgcaactatacgcaaacaactgaaaacctaaacaaaagaccaaaagaaagaccctatttagactaattagtagtgccattaaatagatctcaattttatgggaatattggaagttgaacggagtcaatcagagttgcgaattgggtgatatgaattttggaagtttaattggagtttctggaataggagaaatggtttatggaatttatagaaataatattctcaaaaatattattgatagtcactgtcacgcgggaccaaaggaaatggtttgtggaattttgggaataaggaattgatttatgggacaaaggaaggaaaaaaaaaggatttattaaatccctgaaaaagaaaagggtggagggatgtaatttagacttctttgggaggctcgggtacggcccaagggataagcacggcgcggccgagccattgggccgggcgcgggcgcgaggaggcggcccaacagagggggcgcgggggagagagagacggcccggtggaccgattccaccgcgcggggtcccgggtggggcccgcttgtcggtggcacggcccacggtgggatgggcgcacgcgaggtgcggcgcacgggtttcgggtgcgcatggcttaggagcggtgcaccggttggacggatggcggcgggcccacatgcagccgcacggctttccgtggaccgcgcgcacgggagggaagacggagggaggggacggctgaccggcttggcccggtcaaagccgaggtggcgccgacttggcgcctacgtggcagccacgcgggccggcgggaggaggaagaaggggaggccgagatggacggcggacggcggccgtgttcaccggagcaagcgcgacggatttggtcttcggggagcacaccggagtgacgagggcgtcgagaaggagcgagccaacggctcggattcgccggagggagttcgacggtggtggaattcgacagtggcggccggtggcgagagaaaggggaaatcaccgaggggcgacgaggactcaattaaaggcggcggaagcatctccggtgttcaaggaactcatttccggggtcggatgggtctgagcggcgccgtggaggtccggcgacgagaggcggcctccgggggtgggcggcaatggcggtggggccacgccgggtggcggcggtccttggggcggcgtctacgcgcgttcggcagggctaccgagctaccacgcaagctagcggggacgagggagagcgaggaaggggaacgggaggaggcactaccgagccgggcgggcagtgatgggcggtcgacggcgcggggcgagctctccggccttgggccggggaaggggaagaagaagggtggccggagtcctcttcggctcctcgcgcacacgccggcttcaccagcacgcgcgacggcgaagggaggcgaggtcggcagctgcaaggcggcaacaaaggcacggcggcggtggaagagagatgccgagagagaatgagatagggaggctcggcccgggctttatagatggaaaagaggcggtttgggagggggaaccgacattggcggtcaaggagagcgagctggcggtcatcgacgcgtgcagccaaggcggcgacaggtgatgacgccggcggtgtcgggcaaaaggaaaaaggtgggggaacagggagctctgctggtgttcacgggcggcagcggcggtttcgtgggcagtgcgaaggcggcgacggtgtggatgcgttgggcggcgaaggcggtggatcgagcgtcggaaaatcgaaccgcgggagcgggaggattagcgcgggctggcgcggtcaaggtgggggtggcgagccggcgctggcgtctgcgtctctgcctccgagcgctagcggccaaggagtggaggcatggcgtcgttgcttgggagggaaaaagagaagggaggacggtggaaagggggggctttaccatgccggtttgggaaaaaggaggtgggagagggagaggagagcgcgtgaggcagagagacgcgctgcctccacgtcttggacgcacgcgcgcacagggtgggggcgagcggcagggcggcatgggcggccgtgcggcgcaggcggccagggctgatgcggcggcgaccgggcggtctgccacgcgcgggcgagcgcgggaaagagcgaaggcggtggcggtttttgggcggcgacggcgggaatcggcgccaggaggggagagagcagagagagagcgaagacgggagagagaaagaatcgagagagcgagagagctctctctcggctcgcatgcgtgcaacgcacgtgcgagggggggtaagatgatgggctgggaggggagatgggctgggggagggaaatcggtccatccaaaaatacagggaggtaaagtagacttttacagagaaaactgatttggacagaattggagagattttagggtttggactcaaattcaaatttgatattcgaactcgagggtttagggatgtatcaagggggattcaaggagaagtcatggaaaggattcaaaaggaatacttgggtatttgttttcgggaacatagggtggagtcaaggaaaggattcgaggcgggatctgaatagttctggattcgtagaagtatttggcgaggatttagaggaaggatttgaatttcagaacttgatttcagagactcgaatcggaagagaaatttgaggtggaggattttgatttcgatgagagggatcaacgggatttgaaatgagatcttggcacgacttagactcgcacacaaagaacgaaaattttcgaaattaggattttgctgaattagttttttaacgcctcacgaaaagcggagcgttacatctggtttgtacttaaatgtttgtttcttatatcaactacattttatgaactactttgcattttatctaccacatgagtttatgtacagttgtagccctgcaaaagttgccaactgtcatatttgaacaaacaaaatttattccagaatcaatttccctacaaataaaaagagatataaaaatataaggactaaataaaaaacaaaattgtgaaaaaaataatgattctaaaaaaaatttacctgagcaaagtcaatcactagtttctttgttcctgtaccgagaacagaattgtctggatggaagaaaagacggttgacatattgaatcctaatgttttgaatgtctttttgagagaaatggtttgtcagctgaactcttgcaccccatagttccatgtattttagagtaaaaactccacaatcaaaactaggaaaaagaaaaaggacataagtaaccacagttacttatcataaaatataaaaaaaacaaaaaaaattaaaaaaagctaatgcagttatggtcatactatttactctataaatttactaatgaaatctattgcagttctagtccatgttgtactaagaaacaggctcttatcccatctagtaattctgaatgaaacaattgacaaacaggaactaaattttttgaatgataatcataacaaacaaactaaaattgtgcattaacagcaaaacaaacaggttatgcaacaattagaaaa

SEQ ID NO: 10543 - DNA, 568 bp, Oryza sativa
tatagataaaaagaaaaactaattgcacagtttgcatgtaaatcgcaagacgaatcgtttgaccctaattagttcatgattagccataagtgccacagtaacctacatgtgctaatgacggcttaattaggctcaaaagattcgtctcgtggtttccaggcgagttatgaaattatttttttcattcgtgtccgaaaagcacttccgacatccggtcaaacgtccgatgtgacacccaaaaattttcatttcaccaactaaacaggccctattattattgtatttcaggtggtttgatccagttgaatcacgggaggccacaacctcttcagtatgtggtgaacgctgcattccttgcttctttgtacggtgactatcttgaggctgcagatacccctggctggtattgtgggccccatttctacccaattgaaactctgcgcaattttgcaagaactcaagtaggtttgcagagtttaaaatgttggaatcttgtaattccagcaggttttaactcctgatactaattcactacttatttcagatcgaatacatcttaggaaaaaat

SEQ ID NO: 10544 - DNA, 12997 bp, Oryza sativa
ggaacttccagcgtatctcctgccacggcatcgacagatgtcgtgcccatgggcgggagccgggaggcgatgcctagcggccccgtcagcgatcccgctgggggtcgtagtctgccagaggccgtcctcacctgggaggagctccaagtcgagatggggcgccttctcgaagctggtgctcgtggcatcggccgcgagatctcggaggcgaggtcggaaacggcggcggcgaacgcgcgtgccgagagattggttcgcgaactggctgaggcccgcgaggacctcacgaagatgagggagctggtggccggcaacgagcgtcaacgcaaggggctcgaggaccgaatgtcggaactcgggaacaatctcttcgagatccgtggctcgctgcgcgtcacctatactggcctccaccagctcgctgaggagtgcggcatcaagtccacaatctcggcgaaccccaacgagttctagttgacttcctctcttgcggaactggcgacggcgatgggggaaatcccctccaagcatgcggccaggatcgcggaggagacgtcgaacggcatctacaccggggcgtgtcacgtcctcgcgtgtgtaaggttgtcgcgtcctgaactcgatctgcacgagatcttggatcagggggcggcaagcgacacacgtaaggaggtgatggaagaagtcggtgacctgggggagtctgtcctccccctctttgaagagtaggatttcttgtatttgttgcatgatttgtaaatcttgaactctggctaccttcgtgtgtacaattaccatccttgttcaatgttgatctcgggagtttttttgtcgattgtagagatgctaatgacgaggatgtccagcagcgggggcagcctaagtcactggcgataattccagtactcgagtttgaaccacatgtctcacctgatgtcgaggatcaaactcttgatgcggagctcgagatggcaacgactacctcaagtgagtagcctttttacctctgtgttgtcttaggggtatccagcttgtcttagtggtcgtcacgtttagtagatctcgaggatgcccttgcaacccaagatcgtcgtatccaatactggaagacgaaatttgaagtggcggaactcgagagaaccatgctagtcgtgaagaaggagcaggccgtggaaacgctccgaggccgcgaggtgtggtttgcgtcgtacttaaaaagttgctgcacctcaatggccagagtatgcagggaacttcgagtagtccgcgccgatcctggggaatcggcggccgggtatatctggtggctcaacggggcttgtgcccaactcgatggcatcggcaagtgtatcgacgaggccttgaagcaagagtgtcatcgagtgagccgatacaccggaggacatgtgctggcttgcctacgagatcaccgcccgcgcctggacctcgaattcctccacgaaggttttgctcgttcccggaggactccggcggagatagaccatcttgcgaggtcgatgtcgccgttggctgagaaggtcttccagtctatggactggcattggccctcttggtagtactcgtgccctgtcataggtatcttaggaaaaatgtaatgtagtgggagatctatgtaaaaactgtaagaattattttgtgaataaagaaatattccttaaacaaatgtatcttactctggatgttgtgtgtaagagtgtgttctcagttaacgactttggccatttgagtcgtacactctccctagcctccagccttgtcatcggaggaattttctcgggtgataaggctcttggacccttgacctgccttggttgaataagctctgatcctagccaccagccgtgaggttggaaagttgatttccgatttcacggcttggttaatacgcacggcgagaactcttacacaaccagatcttacatggtcttttgtctctacaggatctgacaaggccttatcggctctgggcgtccccagccgaagatcccttaggttcctcggaggccttgttgagacggcgtaaagggacataaggacaggtttcaacgctaggtgtcatcagagtgagggatcatcgggcgaaaacaccttgattgtgatatggggcctagaaataggctttattgatactgtaagggtgcttacaggtacagcggtattgactcatacatagaatttacgtagttggtcaatgttccaagagtttgctagttcgcgaccgtcgccgtctgcgattttgaatgcgcttggccgcaagacttgtgtgatcgtgtaaggtccttcccattttggtgagagtttgtttcgccctgcttgggtttgaactcgtcggaggacatagtcgccgatcgaaagtatgcgtgcttggatgcgcgtctcatggtaacagcgaagggcttgttgatagctagctgcttgaacggcaactcgctcacgatgctcctcgagaaggtttacatcgatgtctcgctgttcctcctggttctcgtcggaatacttctgtactcgtgtactttgatgtcgtagctcgccggggagcatggccttagagccgtacaggaggaagaagggtgtttccttattggatgttgtcggtgtggtgcgtacggcccatagtactgatgggagttcttcaacccactttttgtcgtgtgacatgagtctgtcgtagacgcgggttttcatcccttgtagtactatgccgtttgccctttcgacttgtccgttgctttgagggtgagagaccgaggcgaaacatattttgactcccaaaccgatgcagtaatcttggaagtcagcgctgatgaattgagagccgttgtcggttatgatgcggtgcggtagtccgtatctgcagaatatccctctgatgaatttgatggcgttgttggccttgatttccccagtgggtactgcttcgatccatttggtgaatttgtcgatcgccacaagtaggaatctgtagccgccctgtcctcgtgggaatggcccaagtatatctagcccccagcacgagaacggccaagtcagagggatagtctagagcgcttgcgcgggtagctttgtgtgtttactgtggaattgacaggcttcacatcgctggaccatgtcgcatgcatcattaaggccggttggccagaaaaagccttgtcgaaaagctttgccgaccaatgtccgaccggcggcgtgtgacccacatatgccttcatgtatgtcgaggaggagttgtctgccgtcgtcggtagagacgcatttgagaagtaccccgtttggcgcttttttgtataaatcgttaccgaccatacagtagatctttgctttacaggttattttctcggcctctgtatcgtcctcgggcaactcctcgctgctgatgaatttgataaatgggatgcgccagtcgtttgtggtttcgatgtcagcaatagcgcgttctgcctcggtgacctccgagctgatgtcgggggtgttcgggccaacttcgccgctaacttcttttaccgatggttttgtcaggatgtcgagaaaggtgccgggctcgagcggttctcgtctggacgcgcgtcgtgctaggtcgtctggctcgacgttgtccttgcgatagacgtgtcggacctcgatcccatcgaacctcttctctagcttcctgacttctgcgagatatttggataactcggggttagagcatttgtagtctttgtgcacctggtttgcgactagctcggagtcccctttgacgattagtcgcttggccccaagtgcggctgtagctcgtatcccggcgagtagtccttcgtattctgcagtgttattggttgccctgaagttgaggtggattgcgtgcttgaattgatcgccgaagggagatgtcaagataaatcctgcccctgctccttggctgttgagtgcgccatcgaacgccattgtccatgtctcattgtcgccttggttgtctgatttgttatctggcatagtccaatcggcaacgaagtcggcgagtacctgggatttgatggctgttcgcggcacaaagtggacatcaaattggcttagctcgactacccatttcgcaatgcggccgacaacgtctttgtttctcacgacttcaccaagggggaaggaggagacaactgtgactctgtgggcttgaaagtagtggcgtagtttccttgatgtcatgatgactgtgtaaagcagtttttggatctgtgggtatcttgtctttgcgtcatggagagcttcgctgacgtaataaactggtcgctgtactttctctctcgacgacaatgacggtgctaacggaatatggcgtggcggcaatatagaggaataattcttcattaggttggggagcaacaagtacaggagggtttgataggtagcgcttgagtgcaataaatgcctcttcggcttcctgtgtccatacaaatttgtcttgtttcttcaacaaagcgaagaaaggttgtcctcgttctcccatcctagtgacgaatctgcttaatgctgccatgcatccggttagcttttgtacctccttgagtcttgtgggcgacttcatgttctcgattgctttgatcttctcgggatttgcctctattcctctgccagagacaaggaatccgagtagcttgcccgacggtacaccaaacgtgcacttctcaggattgagcatgaggcgatatcgtcggaggttgtcgaacgtttcccgcagatcgtcaatcaatgagtcgtttgtcttggttttgacaacgatgtcgtcaacgtaagcctcgacattgttgccaagctggttgctaagtgtgccctcgacattgttgaggtcggtgaagtcgacacacattctccattttccgttggccttccgcaccataactggattggctagccactctggatgaagtacttctctgatgaagccagctttgagaagtttgtcgagctcttctcgtatggcttgtttccggtctggtgcaaatctccgcggtctttgctttactggcttggcatcgggtcgcaccatgagtttgtgctcaatcacctccctagggacccccggcatgtcggacggctgccaagcgaacacgtcggcattatcgcggaggaaggtgatgagcgcgagttcctatttctcgtttagtgtcgccccgattttgacagtcttgttggggttagcactagagagtggaatgatcttgatggcgccgtccggctttggcgtcttatttggcttgctcactttcttgggtggctcagtcatggcgggtgggctgggcatttgctcgaccatgtcgaggctccgcttgtcgcactgcaccgccagctttgtattcccctgaatagtgattgttcccttcggtcccggcatcttgagcacttgatacgcgtagtgagatgcggccatgaacttcgcaagtgcagttctcccgatgatggcgttgtaagctgtatcgaattcagcaacatcgaaggtgatctgctctgttcggaagttgttggcttggccgaaagtcataggcaacgtaatcttgcccaaaggtctggacaatgattggggagtaattccatggacgggttgatcggttggtgtcaactcactttgcggaattcccattgcgtccagagtgctggcgaagagaagattgatcgagctgccaccgtcgatgagaactcgcgctaccttgatgttccgaatagtgggttcgaccacgatcggatatcgtcttgggataacggaggttttggggtggtcttcctctgagaactctattttctgctcagaccacttcatcttgggtgcagccccctgccacgttgaacagacttcacgttccactttcttgtattctcgcttggaggaatacgttgtggagccgccaaagatgtgtgagacgtggaggtcggagtctggatacgcagaatccgattcgtgaggaggcgtctcttcgttcttctcgacaacacgtactcgcttgcctttttcaaacgccatgtgcttctcgagtgactttttgaaaacaaggcaatcctccagagaatgtatgtccattttgtgtatggggcaccataatttctttgtgtcgctgccttgtgggtctgggcgcttgggagggttcgcgtattctactgcgaggacttccgcttgagctttccttttcccatttttgcgatttttcttcttgcttgactcagatgcatctgcggctggtttcttctctcccccggtcttcggcttgtcgttcttgcgtcttagcgcatcatccacatgggcgcatcgctcaacgatctcgaataacctccaagtagttgtgatgcgtcttgtcgccaactcctgggtagtgtagcgatctctgacaccggatttgaaggcgtgaattacagaagcgtcggtgatttcgggaattgtgtttctacactcgttgaagcgccgaacgtattccctcaatgattcccccgagttctgtgttaacgcgtgtaagtcatcttcgatcgcgtggcgcttgtatgttccttggaaattggtgacgaattgttgccacaggtctgcccccgaagagattgagtagggaggaagatgcatcagccatgaacgtgcagaaccctttaacgcggttggtaaatagttagctaacgcattgtcgtctgctccggcagcatagagcactgtcgagtagacttgaaggaattcttctgggtcggtgctcccatcatacttttcaatagctctgggtcggaatctctcaggccatcggacatcacgtagggaacgaccgaaagccctacacccagcgttggggacggtgggttgtcggcggtcgtgtgaccttcgtggatgtctgtctgacgatgaagaggatgcggatcatgacgatgacgatgggtcgcttggttccggcgtacgattacgaggatgacgacctggatctcgggaatcctgtcgttgtctcccgctgttgtctcggcgccgatctccgtcgtcgtcgttgttgcggcgacggccatgaccagtattgtctggcccccgtcgttcgcgatcgttgtagtctcggtcctcgtttgggcggtttcctcgatcatggcgccgtgaagagacatgacgccgagaacgatttgcgtcgtctcgtgtgcgtcgtgcttctcggcgaccgttgatttggtctcgaagatcgccagtgccacgaggtggaggggtagcctatcgaggtaattccctccgctccggatcttcaccattggcgtcgtcaattggtggctaatcttggtgtgctgcggtagcggcttcttcaaacgcgttgctgaggttggtcaccgattcccgtagtcgttctgtccaacgctcgaggtcgtcgttcagaacgggattgtaaggagtttcccttagtataacttgaacagccctgatgtgctgggctagagtagtcgattgattcgccgcttctgcgttggcttgcgctgacgtgccaacatcatcgatagccaatacctcccgtggcgcacttgttgtcgatgacccatagtcttcgaggagatgcaagaccgatggttcgtgaggatcgatatcgattaccccaacaaatcgatctgaggctggagccgctccttgttccttgccgttatccctgacaaggacgtatgacttaggagacgaagttttcatggcgccgaggaggactttgcaactcaagaggtcgtgattctttgtcttgtgaataggacaatagacatctcgagttagagaagtacgctgaattccacgttctttgcaggcgcgaatttcaacgtggacgttgagaaaaacccagcaatcttgaagggtgtgtttcttggttttgtggataggacaccaagacctggtggcttcggaagtcatctttgtcggcccgtgatttatgtcggaaggacaaggtttggccgtatcagaatccttcccgagcttggatgtagtcggtaatccgttctccgtttcgacgggtggatttttcgacatggagtcgccttggttcgtagccactgcgttctcgtttccagtcattggaggaccggttgagatcggcatcgtggtgtaaaccgggaagatgatttcgccgacttgagtccataccagcattgttgaagcagggagtgcttggctgaagctggtgttgacgttgttgtcgatgaagctggatgacatagtagtagaaccttgagtaccaagttcccctacctggcgcgccactgtcgacgggtgatacccatagaccggatatagagggtattggggtacgttggtacaaggatctacgtagtacgacatcgagcaatcaaaagacaagaattatactggtttaggccccttgataggtaatagccctaatccagttgatgtgggattatatggtgaaaaacacaggttacaaaaggaacgatggaacttgtcggatccggcgagatcgtagtcgagtggattcgactagctctcgatgacttggctcctcgcagactccggcttcataggctgtgcgggttgttttggctctgagattcgatgttctatgccctccccggggggtcccttttatatcgcaagtctggagctctccgagtagaactcgaatatatcagacccaatacaatacgtagatgacctagttctgtccgagaaggactcttcccatctgtagatttcgtgaaaagtttccttagaacatacaggaaatatccgcgtacgcgtgggtatgccatgtcgatacgtaacgtatatcgaagggtagagggtatgcctgacccgtaaccctgacatgcacggacagagaggtggaggaggatggacgtagcggggagggggagggatcgaccgtcgaatgtcgttgggagggaagagccggatcgagaagggggagggagatgtgagaaaaagagagaacgacggaggaaacaagaataggaaagaaagaaagaacgatctaatccatttggttgaccttatccggactgggttttttactatgaaaaaaccgacaggtcttttttaaagaaaaacatgaaaatcgaataagtcaaacaaccggtgaggccataaattttgcaaaagcaccagtcatctttaaaattttagagcacagtctaatttttgtgatttcttctcctctgtatagtatatccaaagaactgaagggaccaaaataaaaaaaaacaacaagcttgatctaaatgagcttaccttaccctgattattgtaaagtatcaatacttttttgctaaaatacggacaatccgtccgggcgacgtggatgcaccatgagcgaatacttatttaaatttagccgataggtacgtctatatttatatctttatatctatatctatacctatatacctaactaaaaaatacgtaaggatgccgggaatattttcatccgtcatcatcatcatccgcatgtataggtgatttttatttacaagaaacagactctaagactggaactctaaagcttgctatagggcttaattctgaggtcgatagaatgtggtttttctctaattcttgggaaaacggaaatagaaagagataaggataaaaacccctcaattaattttagattatctccatagatgcggacagattttatggaggaggcggtttcccatggtgttgggaagttgtgggactcgatggaggtagggaatgacagtgtaacacttggacccacgcgacagtgagatgaggagcagggggacactgattagactgtggttgcaccaaccggatgtgcgcttgcaggccaaggtggaagggaccttaatgggccagctcggctgtggtctaaagaaaaaaatgggcttaaaatggcccatggagaaagtagggttttatttagattttcatttaaataaatgttgaaatgatgtttgtattattaaaactaggaaggtggcgcgtcgcgcgggcatttattttgttgaaagataagattatagtttattttgttgaaattttataggatttggcaactttgagagagttttgaggaagtttaattggcatatgtcgtatgatttgtttgagacacttatataaggataatattaaccacgttttctccctaaattcttttcgtcagctttgcttttataactttgtaacctagtagttagctttatactatatcgtagctaagtaatacatagaagctattatttatacttgtattcatcaactataaagaatggtaggcttattttctttaataaaacatgtctactaaattaagtgttaaagtaaaattaggactttttaattggatataggttattgttttctattaatggatgaattgtgtaatccactaaatgcattggtttatataatcttatatgattggtgcagttcgagatgcggcacaggaatccaagaattgagaattttttacggtggattaattttttttggattgtaatatttgtacgttaaaattcagcagctatcagtgagatggagtaacctgtcagttttgtatttttttcagaactgatgaattaaacattggtgctaattacatctaaattgtaaaaagtacgtttagttataataagaatgattaaaagaagcaatattaaacacttacctgataattgctgatcttcgttctttctacctcataatgttttcctatctgtaaactcaaagtagtagtccgagaaacatttttttttgctttgacctatttcattattgtatcgtgataaaaaaaagattgagactatttttcagtacacagtacttatcatgttccataacttcgaaatttttaaaaatgtataatgagtttatgttaatttttggcctaaagtggtttgccaattgctttaggattaaggcatgtattgagttatcatgaagaaaatagtatttacatagtagaacaatatattaaatgatatgttcgcaacaatcatacctctgcattagtagaatcatacgcgtataccatagaactcatcagccgattaaccgcatcccattgcctaatcactcttactttaattgtccacctatcatttttcttgttaacgcagtaattaaattgcaaggcgccatgttatctgcaaatgcgtatatgcaatataatgtatacatttatgttatttaatagatgcaatatagtgtagccctaattaattaatgaaggatagcattattgtgttgttctgtaggtgcacgattaccttcttttgccaaagacgatgaccagcctgaattgactaatgtcacaaaggtgtcgcacacctcttatgccaagatgagtcgccgagccgtgcatcgtggagattaaaataccatctggtcatggtgttcctgaaggagataaataatctgagattctcttgtacttaggagtaactaatcttgcctgcctcatcgatttaaaatttgctaatctgctgaccggtgtatatatgtatatgtagagaaaatctgagattacgttgatgtagggtaactaatcttgcccgctttattgattcaaagtaggaaactaatcttgagacaaatacgctccatgttatgatcacggcaaatacatgtactacacgtgtgggtcctcgactcctatgcgtaggttctcattgtgccatgtggcatgttgagagcgttttgaggaaaccacgtggcagttcgagagcatttgtagaaagttttatgggcttttagtatataatagataatagattagcaatggagctctaataattccaaaacaatttcacatagtgtaattaatcatggagaatttaataaaaattaaatccagccatattttatttgggaaatttctcatgttttcttcccgttgcaacgcacgggcattttttttttctagtaagtatgtatatatgtatgtatgtatatgtgtgtgtatatatatatatatatatatatatatatatatatatatacacacatacaccaaatctattctacgtccctcccttagaataactattctatacccccctcccatgggccaatcccacctcccacactcttcctagggcccaaatcccccctcccacctcagtcaaaggctggtcaaagcccctcccgctggtcaaacccgcccattgactccctccctcgcccaccactttattgtcctcgtctcacaggaattccgcagtaacagaacagtcatcgtgcagtaacaggacaactttctcgcagtaacgacatcaaaaaatagtcatgatggatctagttttgttaagcactttttacgaatattatggtgtagatggattagaaaaataatatataacgtgagagatattgctctctaaagattgagatttactatgcattactactatagtaccactgttactatgcatgttctctgttactgcaaattccaccatgctctctaaaaaaacattactactgtagtaccactgttactatgcatgttctctgttactgcaaattccaccatgctctctaaagaaacattactactgtagtaccactgttactatgcatgttctctgttactgcaaattccgcaatgttgttactgccaaaagtgcagtaacaacctataaattttgcagtaatcatgttactccccttttatgataatgttactgccgaatcataataacgaggtatggttcttgtagtaacataactgatttgttctcacacaatttgaacatacaaagcatgcaaacaatattttctattcacataatgtcacatgatgaattggttaggagagcttgccatgaactatgagatcatgggttcaactcttgatttcaccaatttatttttaatttttataaaaaaataaaatgataggagagagagagatgagagggatagaacaaatgaagaaaaagaaaaaaaaatgtataggaggtgggcaccgggagtagagagatcgggaggggaaggcgtaaaaaaacaaaaaaaaacaagaagggagagagagattgg

SEQ ID NO: 10545 - DNA, 4237 bp, Oryza sativa
gacctaaacaagtgatctgcaagtttaggtactaggatgacatagtcgaacaagtttgaggatctgaacggtcgatttgcgagtttagggaccaggatgacacagcgatacaagtttagggaccggtgataaactttactcttgtcaaatcatgacgcaattaggcttaaaaggttcatctcgcaaattacccgcaaactgtgtaattagttttttttctatatttaatactccatatatgtgtccaaacatttaatgtaacagggtgtaaaattttgccagggatcaaatagcctttgtgtagtagtgtggttcgtgcatatatatatattgatcacacatatatagccgaatgcatatgagccacgtatggttaggccctatttagttcccacgcaaaaacttttcaccctgtcacatcgaatgtttggacacatgcatggaatattaaatatagaaaaaaaaactaattatacagattgcgtgtaaattgcgagacgaatcttttaagcctgattgctccatgatttggcaatgtggtgctacagtaaacatttgctaatgacggattaattaggcttaataaattcgtttcgcagtttacaggcgcgcggaatttataatttgttttgttttgagtctacgtttaatactttaaatgtgtgtccacatattcgatgtgacacgtcaaaaattttcatccctggaactaattaaacatggccttagccagatagatacatatacactagtacgtgcatattttgcatggcccatgcatcttatgcaaatcaacaaactagcttcttagctaagtagtaatcttgcttgcttggtgtaaaatgataaaataccatcaaattaaacaaatggcccacaccaaatgaagttccaagcacgaaatgatcaacgaaatcgacttggtcgcctcattaatattattagaagccttcgcactcgcgtcgtgctgggcgtggctgatgcgcgattagccgcgcggggctacgaccacgcggtcagttcacccaactgccaactctagtatctctcctctcctcttcatctgtatatagtatatatatctttatctattaaatgtttttatcgtacgtcgttcctgattgtgtctgtatccgtaatatggccaatgcacaaaaatatcatagatcgattcaaaatcctaatcgggcaaatatattcgtaaggcttccgtagaggattttcgtccgtcgcccagcgtgcacctcctctccaaatcccaaatcatcacaatccaacccaaaaacaaaattcaaattagaatcataacaaaatatcaactcaagggatgatgagaggagaggcaggagcgagcgggaggccattgctgctcctcgctggagctctacctcgccgcctcgctgtcattgaggtcccgacctcaggacagatcctgagccaccgcgctgccgctgcgtcagggagtagtgacccgccgcgtcgccagggagccgttgactcgccggatatggtgaggagcggggcggcggcggcaccttgacctgacgaggaggaatggggccgacggtgcgaggagggagagcgtcagtgagggagagggagcagcgagatgctggtgggggagcaactctccgtggccttggcgcaagcagcggcacctcgacgagctctgtgcgcgcacctggaactcatccgtgccgaagcaaccgtgccctcatccaccagctcacggcagctcccctgccacctcaagacccctctcccacactacctctagctgtggccgcagccgcctctgcaccccaccacggagaaagccctcctggttagcgctggcagcaaagtgaccgcggaggagtggccacggtggagcacatcctcgcctttcccggccatggtggctgctgtcattggcgagtctctcaagaggaggaggaggtgcgcactgtcgacaggtgatacccgtagactagatatagagggtattggggtacgttggtacaaggatctacgtagtacgacatcgagcaatcaaaagacaagaattatactggttcaggccccttgataggtaatagccctaatccagttgatatgggattatatggtggaaaacacaggttacaaaaggaatgatggaacttttcggatccagcgagatcgtagtcgagtggattcgactagctctcgatgacttggctcctcgcagactccggcttcgtaggctatgcgggttgtgttggctctgagattcgatgtcctatgccctccccggggggtcccttttatatcgcaagtctggagctctccgagcagaactcgaatatatcagacccaatacgatacgtagatgacccagttctgtcctagaaggactcttcctatctgtagatttcgtgaaaagtttccttagaacatgcaggaaatatccgcgtacgcgtgggtatgccatgtcgatacgtaacgtatatcgaagggtagagggtatgcctgactcgtaaccctgacagtagcccccgacttctgctcaaaatgaactcgtacgaccattcacgacttcgggtgtcaagaacgttgtcattccaggtgcgaggaccgtggagatgaagtatagtcgagcacaccgtttgaagcccaacggtcacgagtgaattttgaactgaagtccaaaaaactgccgcgcgtaacggacccagaaatttccggcggggatctctctctgttccttggaattcgcaccgtcggtagtgcgtctatttaaagggattttgggtgcgcattttgaagtccgcaaactccgtcaaacacacaccggctgttagcgctcctcgccttctccgctaccgcaaagaaccctagcttcgccaacttaggtccgttttccggcgatcttcaagcagcaatggatcttggcaagtcagcttccaccagcgcgaccttgaagaagcttcaggaggatggcgcccttcctggccgtgaaaacgcggagaggggagcaggaggtactaatcctcagcccatcttaggtcgcatggttacgattgaagattatgttctctgcggttttctccctccaccttccgaattccttctgctggttttgaattcctatggtctttctcttttgcatttgaaccccaattccatcactttccttagtgtctttgttcatctttgcgaggcctacattggggtagagccctttcttgatctcttccgtttctattatgagttgcgctggatggaacccaatagggtgtctggttgcgtcgggttccgacttcgtgatggcttgaagtcgcgttatgtccgcttctagtgtccctcttcccgcacaaatggcggaacatgtggttttatcttgaaatcaaggactcaaatccggtcctcgttgttcccgaggatcaaccggacaagattccggtctggaccgccaagccccccttgaccccctctcttcaatcgtttatcgacatcatcgatgatctccgagaacggagcttatcggggtatgaagtcgttgcagacttcgtcggtaggcgaatccagccgctccaggctcgggcccatctagcatataattattccgggcctaaagacgcgacccgagtttctcctcggggtatctttctcgcattcattttgacgtgcttgtactcatgttcctctcgacttacgaaaagttggttccctcttgacaggtctgagcagcgaagccgtggagcggcgcgtcgatcaagtgatgatcagcggtccgaccacggcgagcgacatccctgcgcccctttgtgaaaggggggcgacggaacgtgatgaagcgatcaatgtgagtttgctcgataagcgtcctgcattctctgttcgaaatcagcttatgacttgatttagcgtaggcccttcctttgactgatgtcgtcggaccgctcgcagatcatcaggtggcgacatctctaaaggagaaggtcgtcaaggaggcgtctgtcgctgcgaccaccactagtggtggcaaagttccgaccaaggcgaggaaattctcgtctgtgctcggacatcgtcgcaaggcattgactccctcggtaatttcatcttgtcgttagactatgtagcaaggaaggtttcttctcactccacattgattgtcttgcaggcttcagacgcgtctcctccacctccacgacgacagcgtattgtgacgaacagcgagaagtaagtaaataagttttcgggttctcgtgtt

SEQ ID NO: 10546 - DNA, 526 bp, Oryza sativa
cagcggcggcataataggccagccgtgtaggcgaggacaccagtcggcggcgacggagtgaataggccagccgtgtaggcggaggcaccactcggcggcgacgaaggcaggccggcggtgaagtcgtagacgcccaacagcggcggcataataggccagccgtgtaggcggaggcaccaatcggcggcgacggaggcaggccggcggtgaagtcgtagacgcccaacagcggcggcataataggccagccgtgtaggcgaggacaccagtcggcggcgacggaggcaggccggcggtgtagatgacgatgcccatcaacggtggtgtgaccaaccgaccgtataggcggggacaccagtcggcggcgacggaggcaggccggcggtgtagataacgatgcccatcaacggtggtgtgaccaaccgaccgtataggcgaggacaccagtcggcggcgacggagtgaataggccagccgtgtaggcgaaggcaccacttcgcggcgacggaggcagccgcggtgaagt

SEQ ID NO: 10547 - DNA, 541 bp, Oryza sativa
ctccgtcgccgccgactggtgtcctcgcctacacggctggcctattatgcccccgctgttgggcgtctacgacttcaccgccggcctgcctccgtcgccgccgactggtgtcctcgcctacacggctggcttattatgccgccgctgttgggcgtctacgacttcaccgccggcctgcctccgtcgccgccgattggtgcctccgcctacacggctggcctattatgccgccgctgttgggcgtctacgacttcaccgccggcctgcctccgtcgccgccgagtggtgcctccgcctacacggctggcctattatgccgccgctgttgggcgtctacaacttcaccgccggcctgcctccgtcgccgccgagtggtccctccgccacacggctggcctattatgccgccgctgttgggcgtctacgacttcaccgccggcttgcctccgtcgccgccgagtggtgcctccgcctacacggctggcctattatgccgccgttgttggatgtctacatcctcaccgttggctcacattcgctg

SEQ ID NO: 10548 - DNA, 34616 bp, Oryza sativa
cccccccccccgcgcgcacccccatatatatagagagagagagagagattactgtgctttaataaggcaaaacagagaacaaatttccaaaggggaggggagaaaaaaatacaacaaaggggaatttacaagggggttaaaataaactgtgtatccatgattgccaaattggtttatctgcttcttttactctatgcaaatgcaaagtaaattcatacttgaagtgtgatttccatttaccaaaatgcacttacacatcgttaaagatgagatcatttcttatgctctataaagaaagggtgggagaagctactttttgctgtagatatcatattcatgaagttcaaacttatgttccagtttatgacaacgaagtgccagcactgttgagcacaggggcaagtgaaaaagggatgcaaagaatcatctgtggttaatgtgttgcatgtaacacatctgattcccccttgggtgttgaagtgttctcttggtagcagatcctttgtgtttaacctatccattaataataaccaaacaaaactttcaatttgagtgtgcatctgcttttccagataagggtgatgggaacttctggttgaatatgagcgaagaacagatcataaactctttttgattgatattgatttgaattccaatgatatgtccactgatccaagagattaccgaaattcaattcatgtaaagtattgctcaggtgctgccattgttgaactgcttgagtagtttttttttttttttggggggggggggggttgaaaagcttactccagattaaccagttctttgaaaccctcgaaagaaatatcttcattctttgcaagtgagaacagaatgatcaattcttcttgcaagattctgccattccagttgtcttttcagaatagagctgtctccaatggccaatagcaacagatgtaatggctctgaaaattggtatattagcctaaacacatccttccaccagaaaaaaccctttcctatgtgtgcatggggtggcatgttggagtgtgaataatatttgttccagattaggtctaccctgggcaactccattttgttgaaatattttgtagttccagatttatgacttctagtccccttttttttctttggttgacaaactagatcccaagctgctaatgaatgcaccttagcattagggtcatttgatttcttccaaagataatgccttctagttcgatcaatatgctgaattaccttttttgataatttgagagtgcacatgtagtaagttggaagagaggagagagaactttgtatacgtatgaatacaaagtttgtatacatatgtatataaagtttatatatatatgtatacatagtttgtatacatgcctaatagaagaaccgaaaataaaaaccaggaaaaaaagaaaaaaaaagaaaaaacgaaaaaaccggaaaaaaacaaaaactgttcgcgtattagcttttccggtgccgccgtgcgccgcaattccgcaaacacttgcaccgtcgtttatccctctctctcaaacaccccttaagaaaacaaactcatcattagggtgtctatattctcgctctcacggatcattggactgtgggatatatatggtcctctcaccagctgccacatgcaagcaagttcttcaggtcgtactctctctcctcatcaatccaatctcattaactcatcacaagcatgcatatttgtttttagagtaaatatcagaaaactataactttagtgacaaaactatcagtttgctgcaacattagcggcatgtttcagtttactgcaacaaaagcgtgggaaattatcacaaaactataacgtttacgttatatactgctacaattgtcacctatatgtattgttgcagcatctctactctctactacttaaaaaattcatagtggtgatggtgaagccaacgtagacacgcgatccaatatacaaacgtacttcgacacgttcagagcaaaaaaaaaacggggcacgctccttctccgcaccaccgtggcgcaattcctacggatcgcattccgcaataagcgccaccccaatccaaaacctcgccccccttcaccccacacccgcgttgttccacgcctccaccaccggtgcccccatcgccggcatcacctcgcgccgcgccccatccttatcgtcatgacacgccttcaccgccggcgcttccatcgccgttgtctccttcccgtcacaccctcctcgccgcgacatgtctccaccaccggcgcccccatcgtcgtcgtctcctccccgactcccggtctccaactctccatcacgtcggcgcgccctcgactgatccccgccgccggaatccctgcctcggcacgcaatcgaccgatccccgcggcgccctcaaccgattcccgccgccggaagccctcccatcgcgcctcacggtctccatcacgccggctcgccctcgacagatcctagccgccgcccgctgcccctccccggaattgaatggcacagaacaaaaacacgagccctctgcggcgatggattgggagcaggtagtgccgtagtggcaaggctggcggcgttggtgcccggcgacagccacggtagacggaacgctacttgatctgacaagagtggcgtgaccaggccatcgccgccgcttatgcatgccaccccgcctcctgtcacccctactgtgaacctgcgatcaagcctccgccggcgggcacccaaggctgtcgcctacagtgcgacttcgccatccctgcctgcgcatgccctaagccgctgcttacagcgcgacttcactgccgccgcctgcacgagccccgccgacgcccgacctgcaatacaacctccgttcccaaggccaggagcagggggcagcaccgaaggtagacggcaccatcaggtacattgctttgtgcccatgctcctggacgatccttttctttaggcaataatttctgatcatcctgttgcagctaccctgttagaggctagagtattctgtgccaacgtcctgtcatccttcttgcgtgcccttgacaagcagggcagaagattcaacatctgaaccccaaaaggagtccacggtttgtgtgtcttatcacgaaattcttgatgcttatttctgagagattgaaggactagggtttaattcggttcattgatgtgttctctgtgcacaaattatctatgaccttcatgtgtttgatgaaatgcttgaccatatacagtttctgttcatgatgccaacgccgcctcccatccctgccatatgagatcaatctacctgcaagctatttctttccttttaggaagaagtaatgtggctactctctcggctctcggagatcttctgcctagcaacatatgcgttgaaaaaaggatggtgatcaggaaagaggcatttttttctaactgaaagcgcttcgcttcgaccaatattgttactaaacatggtaggatgattcttgtttttggttatgttagtttatataatatggttttcagtatatatgtctatattcccttttggatgaaaacgattttaatgaaatctatcatggaattatattctcatttgtgaattgtgatatgaaccaaatgtagctatggatcacattggcatcctaggtctcctgattatgggcaacaaggaaattgtgggcaataagtttactatcctgattacaacaggatttgcattgtgattgcactaaaaaacaataataaattatcgtgttgaaatgcacaggtaccctgaaataattttaggcaggcaaggtaccagggtaatgtctggccatgctacaaaagcaaacagtcaagtctgatatgtatggtctatcatgaaatggatgccactgtcttaactaagattttagtaatacttattgcatcaaagctcagttataggcatccaaactgtagcttttctcttgcagctgctatttaaaaattttcttttacatttagctacagctaattattttttttcctttcctggcaagcagctagagttcaagctccaggagaaggtcacatttaggcaagttctacagtctttcaggtaattgatcatttgatttccttgcatatgagactatacaaatttattgtgtgtttgactgtatgtggtgccactaccataggggacggtagtgacatggtgatatatttatcaattctataacagaactgttgcatggtgttatatttacaattgctataacttttgtccatctgtattttaagagctatttcaatcaagtacaatgtagttttgaccatttaactgatttatgaactgtgggaatcgaaggttcagagaatataatatttatttgcttgaggctttcatgtatgcatctccaactgacaacatgtgatgtgggatatgatattgtgccttactttcaatttacaatacaagtaaatactttatccattcaaatgcagcttgaatatatcaatagtttttttcagcatgcatatatatatatttccattgcatttttgtgtaattgaattgtatacaaagaaaatgtttgttgttcagtatgagttaacctttttaatatgataggttgtgtgcaatggtcaatgatgtgcaaattgcaatgctgcagaatgagagctgagccacacagtccatgtgccatgcttttcttatccactttgtaagcatgtgctcctttaaaaaaaattatatgattcagcttgattaacatttaatttgttatttacctaaaaattaattcattctaatatgatatttttgcagagtttcatgcaaccatgctgtttccaacccctgctgaaatgctgaacataaggatgaataatctaattttatgaggaaaaacatctctggaagtgcctgctttggttagtcatagttactcttactccatgggtattttcaattttttggagaaatgatatataggaaatgaaggaaaccagaaataatcttattattaaccttcattcgattgcagatacctgatacaagatgtactagggagttacagaacaggtaggaattgtaagaatgtcatgtgcatactagggagttactgttgcaaaattaattgaggttaactattgacttattatcaagcatacatgcattaaaaacataatcaagcatatatgcattaaaaacatattatctttctcttccatggaccatggtgtatggtactatggttccaaggtttaacaggttaccaatatgtgttctttgccactgctggatatcaggatcaaattaagtaggtatttattctactatatggtggtggagggtaattcttctaggtcaacgggtacttttctcattttctgaaaacaacacgatgatcatatttagtgataagagtattatgatttgacacattgatgctacattcttattctttctttgtgcaaacctggctcaaaagaacatattttagatgagtaggaagcttgtgttcttcgatggtctgaaaggttagcggctacaaatggcttgattaagttttttaatcccctcttgcttaattgtattctttacttagaaactttaactcaattgactcaagcaatggatgtacttttcttcagtttacctcaatcaatttatgttagcgtgccttgtacgtgcacgcttttaatcaataaattttcgctgacttgaagaactctgtagagcagcgagcagcagaggtaggatgttttgatagcaggtgctcaactaaaacccgaattgaatccatcttttggctttaaactgatgttcagatctggcattttggtgcacaacatgtagttggggattttttgacatttcttaagtgttttttcattgaacttgatcaaccaaagaaactgtattacatcaatattcatgacctgttagtctgaagctaaagcagaatcagattcagcaaatgcggatgtacaactatccaataagattgatcgagcataatcttgcaagattatgagataatgcatgtacaactaaataaagatacaggcttttctatactgaactggattttatggatcatcacccatggtcctctgtactcaaatcctttttttcttttttttaatggcatacaccccatggtaaatgaaaattgtattttctttctttctttttacctaaattcatacaatctggataatatattttatatgatcccttcttatacctgtggcttagctatttgtatttgtaaaccaacgatatacaatagaaataagccggtgcgatttgatgttaacgtattaattttttttccattttcaacgcacgggcacccaactagtataacgtaaaagttgcagttttgtgataatttttcacgctattgttgcagtaaactaaaacatatcgctaatgttgtagcaaactaatagttttgttactaaagttgcagttttctgaaatttactcttgtttttaagcactcaggcagtacagcataattgttgctatgctgtgcgtgcgccgatctggccacattcatcttgcttgaatcactaatctaatcatcgtagtttgtttttggtgttccagctttccagctttcttttctctctttttttactattaccaagaaagagggaagggctcaaggatgttctgagcgggctgctcagagcaacagcaggtggcaggcaaccagtgcatcgcaggagataggcgcacagtgttagaaagagtttgttacatgtgataatgcgcatgagataataagatagaattagagatagatttctgtttttgagtcttatctcctcctttgtatgcgccactttgggagcttttcccaaacatatattaacacgtacagcgacctctaacgaggtgagaacacttctgccaattcacatatatatggtatcacagccaaacacccacgcataagatcacatctaccacaatggcgagttcctccaattccaccaccaatccgctctctggccaagctgttctggagaagctcacaaggaataatttcatgctatggaaaacacagatccttcctatgatccgtggtgcccgcatgcatggaggggtacctcaccggtgcgaaacgcgcaccgtcaacggaagtcgacgtcaaggagggcgacaaagtcgtcacaaagatcaaccctgcctacgaggagtgggttgttgccaatcaacagatgcttgggttcctccttgcatctgtatcgaaggatatcctcactcaggtcgtcaatctggagacggtggcggagacatggagtgcaatcatgacaatgctctcctcacaatcccgtgcgcgtgcgttgaacacacgtcttgcgctgtccatgacccacaaggacaatctaagtgtaacggagtacattggcaagatgaagacgctggctgacaagatgtcatctgccgacaaacctctcgacgatgaggagatgatgtcttacatcctcactgggctggacaatgattacgagcccgtcgtctcttcccttgtcggcaaggcggaggcaattccagttgttgagatctatactcagcttcccagttttgagagccgagccaagctacgacaacaggcgaacggatcctccgtcaacagcgcaaggcatggaggtaagggagacggcttcaccgacaacagccccttcggcaacaccaactccttccgcgctcgtggcaacagcggaggctatggtgatcgcggtggccgggggagaggaaacggaggcgcgcacttctccaacaaaccatgcccgacttgttagctgcgcagcaagattggacacgttgtagcagactgttggtataggtatgatgaaaatttcattccaaattcaaaaacagcagctgcggcttcctatggtgtcgatgcaaattggtatatggacaccggagctaccgatcacatcacgggagagttggacaagctgacgacgcatgagaagtacaacggcaaagaacaaattcatacggcaagctatgcaggtatggacattaagcatgttggtcactctattattcatacccctatgtgtaatattcaattgagaaatatcctccatgttcctaaagctaaaatgaaccatgtctctgctcattgcttagccgttgataaccatgcctttgttgaagttcactctcattctattgctattaaggatcaggtcacgaagaatcttcttcttagagggccatgccgcaatggactgtacctgttgccaacatcttcattctctacatccaagcaagttcttggagccatcaagcccacaatttcaaggtggcataatcgcttgggtcacccatctttagctattgttcaaaaggttgttagtaataataatctcccatgtttaggagatgttaatgagtcaggagtatgtaatgtctgtcaacaggccaagagtcatccgaccctatccaaagtcatctatcctttagagctttgtgttttcagatgtgtggggacttgctcctaagtctgttgggggcagaaaatattatgtcagtttcatagatgatttcagcaaatttacttgggtttatttacttaagaataagtctgaagtctttcttaagttccaagagatgttccaacaatgggttgagtgcctttttaatcgtaagattatttctatgcaaactgacaagggaggagagtatgaaaaattgcattccttcttcacaaagattggcatctctcatcatgtttcatgttcctatgcacatcaacagaatggttttccagaacacaaacatagacacattatagaggttgggttaattagctctccttgctcatgcctctatgcctcttaaattttgggatgaggctttcttagctgccgcttatctcataaaccgcatacccaacaacgtcattcagtatactactcctctagaacgtctccttgatcaaaagcctaattattcagctttaagaacctttggttgtgcttgccggcccaatctccgtccctataataagcataagcttcaattttgctcaaagcaatgtgctttcctcgggtatagcaatattcacaaaggtttcaaatgtcttgatatatcaactggcaaggtctatatttctagagatgttgtctttgatgacctttgcaaagttgcatgaaaatgttggagcaaggttgagatctgaaatccttttgcttcctccttccttatatccaaatgttgcaattaatggggttgaatataacgatcactggcttaatgctcctgatcattctaatgggtcttctgagcatatgacagatcaacaggaacaatccaaagaaggtgctgaaaatactggatagaataaccaagttactgcagaaaatcttgaagaagatgcagcagatccagatttcacagaagatcccggagacaacatctctgatggctcaaatcccgagggtgatacccctgcctcacttgcgcactcgcctgcgctctcattcaacaatgacgaggatgtcaatggttcgcttactcaacagcagggggatcaatcgtcggctatcacgtccccaattcctagcaatcatggcgatggcagtgaaggatcctttgtgcctacttcggatccgactgtggctcagcctacatggccaactactcatctccattgaggtataagaaaacaaaaggtatactctgaggaaacttttaaggtatggtctgttgacaactacaggagaaccccaaaatctagatgaagctttgtctaacaaaagttggaaaaatgctatggatgctgagtttactgcattgttggaaaataaaacttggcatttagtcccacctagtcatggcaagaatgttatagattgcaagtgggtatacaaaattaaaagaaaatcaaatggtagtttggacagatataaagctcgtctagtagcaaaggggtttaaacagaggtatgtgattgactatgaggacacttttagcctagtagttaaagcaactactatcagatctgttttgtctattgttgttttctaggggatggtgtcttcgtcagcttgatgtgcaaaatgccttcttcatggatatcttgaagaggaggtgtatatgaaacaaccccctggttatgaaaataagagtaagcctcgttatatttgcaaactagacaaagctctttatgggttaaagcaagctcctcgagcttggtactcaagactgagtactaagttagttaatcttggttgtcaagcatctaaagctgatatgccactgttcttttataacaaaggaagtgttacaatatttgttcttatctatgttgatgatataattgtagcagtgactgcattgctggcagacttgaggcaagaatttgcactcaaggacttgggagatcttcattattttctgggtatagaggtcagtacaacaggtgatggtatggtgatgttgtaccaacataccccaaaatcatcaagatacggtctatgggtatcacctgccgacgaatttataaaaaacaatgtcatagcacttggccgactgcattgtaaaatttgcgctaaacaatgcttaacttaaaatcgcattgtaccaactctcgtaaataaaaggttgtgtaacaacagaaaaggaggattttaaaggtattgggccctgtccatgagcatattgtgaaagcaaatatgcttaagtccctaaagacacatggcatgtcgcacccgaatataggctgcgaacgctaatggacttcgggctgtgaacgctaatgagcatcggttcaaaactcactgataccttttaaaaaaataacgtgagatagtgtatcgtcttctccgccgcttcatcttcctcgaaaattccttttcgtgcacctgttcatcagtcgccgccaccgaagctagggttcgccctccacacttgttcagccaccaaatcgcttccaaatctcatcacacacaagtgccttccatccccttccattttccatcctcaataccccataagaaaacttaatcagagctttccccatctgtaactccccgattttcgttcgggaataaaaatcaatcaacaaatcatttctagaaattatattaaaatttaaagcaatttcaccaagtgaaattataaagggaattaaaaatttattttaaaaatcatggccaggatattttgtaatattctttgtgccctaatgacctctctgaatttttccgtgaattttcggagctcaagtaatatttttaaagtcacaaagttcattaactcaattaaaataaaaagaaaaccaaataaaaactctccctcccctccctttttgggctcggcccagttttccctcccatcgggccgggcctcccttctctctctcccttagcccgctagcgaagtctgctttgcccctcctctccccgagccgccgataggtgggccccacctgtcgggctctccttcaacctccagcccgagctagcaaccgccatggccgcccgagcagcccacgtcgccgccgcctccggcatcacgcgccctctcccgtgtggcccggacaatgccgcgccctcccctccacctcacagcccacgtcgcgtaccccgctccgtgaaaaccgccaccgccaacctccccacgatgccacccacgtcgctagccgttgtcgtccaaattcgccctggctcggctccctctcgccccctggagctataaaaacattccccacacctccctctctctttttccccaatttccccaagctgttgcgccctctagccgctcccttgccgcgagcctgagctccgccgcccgtcggcgtcctccaaccacgtgccgccgccgcccctgtcctcgccacactgcgtcgtcgccaccaccggcttggccgtgcctcgccgcaccccgggctccgctcctttcccccgtccattgtcggagcaccactaccaccaccacacctgagccgcctcaccttcaccgcctccagccgcacctcgtcaccgtcctagccgtcggcacgccacgcgacaacctccaccggcttccccgctgcaagggaaagccaggccgccgcctcatttctcccattcgtcaccggaaccacctccccaccgcaaacccgaggtcgccgccctttttgccgcctccggccgcggtttggcgctactcccgatcacctctcgccacacaaccgcctctcacagtgtcgccgcgtcctgttgtaccccggttgccgctccaagccattggaaacccgccggagctccattcccctcacgcgccggtgagttccatcgcctctcccctccccggctagcgattcccgccgcctcaagccatatctccccctcctaacccctcctccacttttggcaagtctcgagcgagcccggccacccctccgcgttcgccggtcatcgccggagctccgccgcgccgtcccgtggtcccgcggacgccgccgccccccgaccgctcgccgtcgtgccctcttggctgccgcccctcgttgaccaccccatcctctccctctatctccccttcgctggctgcccagtatcgcgccgccatcgctggtggttgtccggccgggccgtcgttatcgctcccgccgcgcatagctccctcgccgccaccggctggctgcttccccttggtctcggccatggccgatctgggccgtcggatcggcctcagcctccatccgggccatccgcgtggcatcccatcttggccttgcgtcggtgcccgcgcggcgccacgtgggcgccacctccgcccgttgtctgccgtggccgccacgtggctgccgcgtgctcgcgagcagcgtgcttgtggactcggtccaccatgcacccgtctcccttgagtcaccgacaggtggcgcccgcttgccgacgccacctatccctcggatgacatcacaattcatttaaaattgtgcaataattcgagtaataattatagaaattcatttaaatggctcaaaacttctaaaacataactaattcatacgaaatccaaattgggccattcaacttgcaaaattcatccaaaattgagatctacatgtttgtttacttttcatgtactgtttacttggtttttattagtgttttttctcgttttgcatgccagcgtgtagatctcactatttcggaagatcgcgttcgcgaggatcagtgttcggaagattattttgaagaagcaaggaaagtcacacattacccttgagaattttgagcctactttacaaatgttttaccatttacaaataaatatgcatgttttgctgattacatgggattagggtttacctatctgattgctagtgccatattatttgatatctgtcctttgtcaaccttgggtgataaatcgactagcttgtatttctatgatgacctagctggaactatatgcttagccatgcttaagcatctgatgatgggataattacattattacaccccttagtatcatgacgagctacgcgctcgagacatccggccatgtttcattggtcgtaactattcaactaaaatgcgacagaatggtaggctatgggtgcatggttttgctagtcgcacccatggcaattaaggactggttcgcgggatgcactggaagacttacagcgcttgccacaagcgggaatgggtaactacctgacttgaagtatagctttcctctggctgactcatctaggcaagggtgggcatgatggagcgggatgggccctgtgacagcctttgtcacttccggattcacctaggaacgagaggggactgcccgctgcctgttgaggagtgggggtgaaacctgaggtgttgtgtgcttggtcagagggggttatatgaagggtcttgtcacaatcactcgacatggtgacgtgtctggccaggcgcggtgacatgccggtggattgtgtcttgtctgtacagttgtgcacctctggccagagtaaaacttttcgaatagtcgtgcctgcgattatgggtgatcaaccagaatcaccgtgatttgtctcacacttaatgaatcgactcaatgcactgattagttcaggtgggaatggttgggcctgttcaacatggtgtagcgttgatcagtggagatttaatgttactttaattacgcaactgttttattgttttgctcaataaaatgatttgtaaccgtctttatgcaaatagccacaagccatccttgtatccccttgcacgtctgcatcattggtgtggcttgctgagtatggtggttgtactcagccttgctattgttccccccttttcagaagtgtagtgcttctgatctgaagacgaagatagaggaccaaggctcagacccctgttgagttttgcctatggagtggagctgaaaccccactaggatcgccttttccactgctatcattctctttcggtgtgatgactaagcgcctcttctgtaagtattttacgctttatttacgtttggaactgtttattacttgtcgttttgtgtaccctggctgattcctagacagggatttaatacacaaaatagtctggaaatttgggctaaatttctgggcgtgacaaagtggtatctgagctaactcgactgtggttcaccactcatggcaggtgagagagaaatcccctttgaccaatggacgagttgtaagggagagagttgtgtgatgcttcacttatatctatgccacaactggtaaacaaacatgttaattctgtaattgatcgactatgtattgagtttaaacatgttattcacattgctagcgagaatgaagagcttagattgctatcttctttaaatactagagggctatattcaatttgatgatctttgtccactcaattgtttagagaagaaattatttgcaagatttgaactgccatgtcctcctcaagtagtttttcatgttattggcactcatgataataaaggagagtataatgtgcatagggtatatatttgttcaaatttgaatataccacattttcatgatgcgatgtattgtctagaggaccgcatgcacataaataattctctgtctagtttctctagttgtttaaatgagttataggttggtttgtaagaagggtagtgttgtggtttttcgagtgtcaaaatttcagaattcaaccatatggtcatcaagtctaccacaacttgtgataaataaagataagtttaacatgctcaatgatatggtgaaaccgagcacggtttcgaatttagaaggggaggatgacgaggatatcactagctcagatatgatcatgcataccttatgtatttatcaactaaaggtgcatgctttctatgtgagatttatgtgctacatatttgaacaaacattactgcacgatgagtttgtatcttctcgtttgcaaaaatactagcatgggtgaaggaaaggatcgtgggctcacaaagtgtttgggtaatcaaagaaattgatcggggaccaaacaaagatcttacccaagtctactcttacctcaccatgtcacttttggttaatagaaggcaagaaataaagttctacatgttttggatacggattcgggcctcctgacagcataaacttcaaacggacctagcctctgattgagaaggaatctcaaggtccatgagtacttgttggaaagcttatggagtttacttccatatggttttggtcccacatcaaaatttctatcaatctatcatgaatctgcaaaacaagccatatacctcatccaatccaagtctgatttagacattggaccttttaattgtgtcgtggacatagggtggcacccttaggataaccctaagatgtccctaaacatatttattcagtagccatcataatttagagttggattttgcttagattatttctgctactacaggtttgccgctagtttggttggtggaaccccattcaagtgcttaaattttcatatgcaattgagttgcagtttaccttgttcttggcttcttgcttatgttcttcgattcgcatgcagaaattagccttctcagtgatgtcaaccggacagtgtactgttgattaccagaggagacgtggtattgcgattgcagggttcggatcgtgttgatcggaaaccggatcatgtgtgtcaagttttcgctaaatcaagagttatcgatatctatcggaagatcgggacctagttcctcatcaggacggagtggggtcgccggagaggggatcgatgggcgatggcgttcaaaaaatgatatagcggagaagcatggagcatgattggaggcatgattagggttagggttgggagtggcgtgagagagttagggagggttgggggaggtgcgcgggtgtgtgcttggagacaggagaggtgggagtgatatgggacgttgaatttgagagagacgattctaaccgttctataatgtactccctccgtttcagattataagacattttgactttagtcaaagtcaaactgttttaagtttgactaagtttatagaaaaaataataacatttttaactcaacacaaatttattatgaaaatatattcaattattgatttaatgaaactaatttggtattatgaatattattatatttgtatataaacttagttaaatttaaagtaatttaattttaaccaaagtcaaaacgtgttataacctgaaacggagggaacggagggagtatgaagtatgaaaaatgaagaagtaatactgtgttgatgtcctatagaacagatgattatatttgaaaaacagagggagtaattaattgctagttagctaattactctagctctgagctactccactatagagaaaatggtgatcagtacaggctcgcgatctgcgagctacagaagacgagcacctcgtcgagctccgccctgctctcgtcgccgaacaggctctccttcccgtccggccgcctcgcgtacgacagcccgagccgcgaccgcgcgccgcggaggtcgccggcgccggcgctggagtcgggccccgtgaacacccccatcacggcggtcagcggcggcccgatgagcagcccgtcggcgccgaacttgtggatattatgggtaccccatacccatacggcatggttatccgactagttataggggataacttatatctatgtaatatgtaacagatcatgacttgggtgttacgtttccttgtatattacggaacggcctaaagtcctgatttaggaaaccgataccgtattggttaaagtttctatcttgtaatcctgccccccaccctatataaggtgggcaggaggccctctagggggcatgagacaacctgatcgtcagatctatactacaccggcggattcaaatccccaaacaggagtagggtattacctctcatcgagagggcctgaacctgtctaaatcctttgtctctgcatccatccacttttaggtctcgtgcgctacctccttttattattgccgaattcatgtttcgacagttggcgcgccaggtaggggttgcgtcgagtttcctatcaacgagcgcgatggaatcaatttcatgagtcgccgacttcgctttcgctttgggagttttcacttcctttgcgtcgaccacttcttcaagctcctcttctctgacttgatccaaatcagtcagggggaaactcaatctgatttttatcattatttatcatattgatttttaatctcagattaatttcttgctattttttgttgttgttcgcatataactacgcggcactattgaggcgattgatgctggtcatggactcgaggcgtctcagctttccggtcgatcggccgcgagtccactccgccggcttgtcctcgccaccgccattgctgatagcaacaacgacttcaccgccggcctgcctccgtcgccgccgactggtgtcatcgcctatacggttggtcggtcacaccaccgttcatgggcgtccatgtcttcaccgaccggctggccttcgccgccgccgactggtgtttccgcctgcacggctggcctattatgccgccgctgttgggcgtctacgacttcaccgccggcctgcctccgtcgccgccgagtggtgcctccgcctacacggctggcctattcactccgtcgccgccgactggtgtcctcgcctatacggtcggttggtcacaccaccgttgatgggcatcgttatctacaccgccggcctgcctccgtcgccgccgactggtgtccccgcctatacggtcggttggtcacaccaccgttgatgggcatcgtcatctacaccgccggcctgcctccgtcgccgccgactggtgtcctcgcctacacggctggcctattatgccgccgctgttgggcgtctacgacttcaccgccggcctgcctccgtcgccgccgattggtgcctccgcctacacggctggcctattatgccgccgctgttgggcgtctacgacttcaccgccggcctgcctccgtcgccgccgagtggtgcctccgcctacacggctggcctattatgccgccgctgttgggcgtctacaacttcaccgccggcctgcctccgtcgccgccgagtggtccctccgcctacacggctggcctattatgccgccgctgttgggcgtctacgacttcaccgccggcttgcctccgtcgccgccgagtggtgcctccgcctacacggctggcctattatgccgccgttgttggatgtctacatcctcaccgttggctcaccttcgctgccgtcgactggtgtttccgcttacacggctgacctattatgccgccattagtaggcatcttcgctttcaccgtcgaccgccttcgtcgccgccgactggtgtcttcattgttattgatggacgactttgttcccacattggccacttccgccatcaccaaggggaatattacaaagctaagtcatcatttattttattctttatatgatatttttccttttcctctgcctcactacaccaattggtcttccattgagtagtgagtcgggggctacagatgttatatcatattttttataatatttatcttgattgcttgcgacataatctgagtacaaaagtacctatcgagttatggagttctatcttcctatgctttccgtttggtttgccaatggatggttgcctttgggccgattcctagcacccgggggctcgttggatggaccgagtaacgcaaggtgctaagtattattcggaataaatcaaaagcatagagataagataatttattttctgctcttaataattgcaaaagtacccgagtagtaaactccgatccgtgaaactttgttccattaatgacgaactcatgtcactcatatgcatgtttgggaagtgcttaggccgactcccagtgcttggtggctatgactagtcgggcagagtgtttaaacgtaatgagtcatctgctcggggaaatcaaaattgacaagaggagaaatacatatttataaatattttaaaatacttgattttttctcgagtattatatttatatcagatactactcatcctatatgtttgttctgcaggatccagatccagatatgcataaaagggattcatggctttaagcttatctcttacgctccaggaatggatcagtcagaacatcaccaccggctcgcctcgaccgccgccgactggtgtttccgcctacacggctggcctattatgccgccgttgttgggcgcctacgtcttcaccgaccggcttgccttcgtcgccgccgaccgatgtcctcgcctgcacggctggcctttatgccgccgttgttgggcgtctacgtcttcaccgaccggcttgccttcgtcgccgccgaccgatgtcctcgcctgcacggctggcctttatgccgccgttgttgggcgtctacgtcttcaccgaccggcttgccttcgtcgccgccgactggtgttcccgcctgcacggctggcctttatgccgccgtagttgggcgtctacgtcttcaccgaccggcttgccttcgccgccgccgactggtgtttccgcttgcacggctggcctttatgccgccgtagttgggcgtctacgtcttcaccgaccggcttgccttcgtcgccgccgactggtgtcctcgcctgcacggctggcctattatgccgccgttgttgggcgcctacgtcttcaccgaccggcttgcctttgtcgccgccgaccgatgtcctcgcctgcacggctggcctttatgccgccgttgttgggcgtctacgtcttcaccgatcggcttgccttcgccgccgccgactggtgtttccgcctgcacggctggcctttatgccgccgttgttgggcgtctacgtcttcaccgaccggccgccgcatccgccgctgactggtgtcaccgcctgcacggctggcctgttataacgccaactgatgctatcttcttcacggctggctacatcgctgtcactactaataggcatcagtatcttcaacacaagctgcctacgtttgccatggctgccgactggtttcttcacttccatggctgcatgattctgccagtgttgattggccttaccatcttcatcgccggtcgtctcgtctgctgctgactagtgccctcgcctctacatctggtttatacagctaccactactgatggacatcatcgtcttccgccgccgactcgtgttatgccgccgccgactagtgcttttatcttcacaactgcgcgtcttcactaccggttcacttcatcacggcaacacaactttgtcatcatggtggagcgacttcatctttattatcttcggaaccagcaaactctattgctgctacttcacaagttttgctacatcaccaaccatgacgttgttgtgaatctcgacatctcgacatgcgatgccgtgttattttactacaacaagtggctctccaatattcaggatttctacttggacatcttcaacacatatcttcaatcaagcaatgactactcgacgacaagaagctataattctcgactctatgttcagttgtttcccaactaaccaaagagtcgggggctacacaaatataaggctcaaaatttgacaaattttatgtcaagctgaagcaatcaattaatcagccaacaagtcaactctgggagtcatcaattttgtcttcgcttcagagcagtaggtcaagattaaatttacatgtctgggagtttggagtcatcaaccaatcaactcatatcagattcaatgagttgaacaacagcatatactttcctccaagtgaagcatctacaacagtttgatggattattgtcactgacatcatcaccagcacatctgcttcatcagctctgacattccgccgttgctaatggatgactaagactttgccaacttgctattccgccttcacggttgacctactatgcaaacgctgatgagcgtcttcgtcattatcatcggctattacaccgctattgactggatcaccgacatcgtcatcttcatcaacatcctgtcaaacctctttatcatagcttactctactgctattgataggcaacttcgtcatcatgtttgatcatctctgttgatgcttatcatcattgctgtcggttacgtttgtcgtcgccgactaatttcctcatcttcatgattggtggatttcgtcatcgcctttgatctgcctcgtctgtcaccgactgattattttgctgccatagctacacaactttatcgctgagcgccttcatattcattgctggctgatctgactgctgccgactggtttcttcgcctccacggctgtgcaacttcatcacttttgattggtatcactatcttcactaccaccaatatttttgccacctctgttgggcaatattatctctatattggtcgtcttgtctctatgccaactgcgtcagctaccatcaatgaacaattgtgactacgtgctcaggggcttactagctcaaatacaagtattatatcttcaatttggacttgctccggatacatgcaacatgaattcatgatcatgggtctattttatatgctcaaagactggactatttattattccccgtaagggttatcaactgaatacttgcgccagtcgggattcaattgttacatctattttggagtatcccataagggataaccactcagatcagaagctattcatatgagctacgcttggtctatattacccggaagatttattactcgggagcatgttatatgcgtcatcctttaaagggtgtcgaaggcatatgttttggcctaggcctaatatgtctgcagcccatattttcaggtgtggcctgtcacgttcttttagggacttaggcactttttgcttaggccaaagtgcgcgtgatcaagtgcccaataccttaaaatccttttataccgcagttacttaactttttaggagttgatacaatgcatcttaaaaggtgtcaaacagtaaagctttatatagctgtcccgctgacttttttatatataattcaaggtgctgtttgagtttttaagcaattgattggatacaatatcattgcttttcgccacgtaagtgtgcatttttattgaccaatattatggcttaggctgattatatattgtggtctttttctaggcggttggtaaatcctttatgagtttatttactcggattttacaccacatatgccatatatttccaggtgtggtgaaaccatgtgtcttctagggacttaaacacatctgttaaagcagtgtgcgcatggcgtatgcccaatactttggaaatttctttattcacaatatacaagcttctttatagctattttgctatatcactcatcatattttacaaagcagttggtatatcactcggatcatgttatttggaggattcacaccgcatatgctatatattgatatcaagtcacttggttgattacgattatcaaaaccactcggttggttggattatttattccttgactatatgcttggtttgttcaattaaccacattgtcgggggctacacctattaggtgcatctagtcggtgcacctgactttatttttcagccctccacagtcttcagatttggtaaaagtactcgggagaccatgacaaagatgattgaagcactcggctttggagtaatctggttcgagagaagattatcttttcgactgcgaaggtctcaggggctactgtggatattatgggtaccccatacccatacggcatggttatccgactagttataggggataacttatatctatgtaatatgtaacagatcatgacttgggtgttacgtttccttgtatattacggaacggcctaaagtcctgatttaggaaaccgataccgtattggttaaagtttctatcttgtaatcctgccccccaccctatataaggtgggcaggaggccctctagggggcatgagacaacctgatcgtcagatctatactacaccggcggattcaaatccccaaacaggagtagggtattacctctcatcgagagggcctgaacctgtctaaatcctttgtctctgcatccatccacttttaggtctcgtgcgctacctccttttattattgccgaattcatgtttcgacagaactgcggcccgccccgcgcgtagtcgaacagcgccgccccgctcccgcccaccttcggcagcaccaccaccgccgcctccttcgccgctgcgtccgtgtccgtctccggccaatagaagaggaaggcgtcgagcgtgtcgtagtagtcgtctgtgctccggtacccctccgggctgaacccgccgaacctgaccccgccgccggtgcggccgacgactacgcaggggcccttgaagtcgcaccggcgatggaagtccgtcgcgctgaagccgtccacggtggccttgtagcagcatttcagctcgcgacctgcactgcacacgggaattaattaaccaggaattagttactgatcagtaatcgagcaagaactaaatcatcatcaagaacaagatgatttgggttttgcctctgaggtgggtgttggcgacgagggacatggggaacggcggcgcgacgtcgtggtactggaactccggcggcggcgcgcttctgccgccccagctgaagaggctgcgcggggtgacgaatcccgccgccggccggcagctgcgggtggtcgaaggagccaccgtcgacctgccgctcgccatgaacgccgccatggtgatcgctctctgctcggtgtcatgggctcatggctacgctgtcgcgcgcacgcgaaccttatctgcttcggtggcggctgacatggagggggtttgatgacacgtgtcgcagcttgattcgctctgtttatcgcgggctctgctctctggggcccaattgcccaagagctgcaaaaaatgggtgttcatacgtgtaaatttttatgcatatatgtaatttttgcggtatcggagtgatgaggactggcaacaaaaatatgaattacacagcattttgtacaaggcaaaagtgtgttagccataacaattcttgcaaataatttttttttcggtgtcaactagtatatacatttgggtgattcatctaaaacgagtgtgttagccataacattctagaacgagtgaattcacataattttcccctaaaaaagaattcacattttttttctcaaaaaaatgattcatctaaaattggtacacatgaattatattttttttcaaggaagaccgaagacagagtagattgtacattgttttgctcaccttagtttagtaggagtacatactttcgctttaccccagggtatactataatttccactttgcactaggttgcatcacataattaaaaacaaaactcataaaatatgagcacaacttatgaaaccttttgaatttagatcatgttttacgaggttccattaatttattatgatttttttagagatatgattatataagtcactctttagccagtgtcaggtgcaatttattctctcctgaactttgttcagtgatgaaatactccttcacaggcctattgggccataattccatatcagacgccagcccagaacaccaaatgagcccaatgaacccattttcaggcccattttcatacttggcccaactgcaacatctagaaaaaaacattatttttttttaaaaaaaacttaaaccctaccaaagcaccaaacctcgtgacctcgccggaagccgcgccgccccagccgccgccatgccaccgaaggccaagaagaagcagtccgcggcgtcgccgcagccgtcccctcgcacccctgcatcccgcggccgcgaaggtggaagcgtcgccgcgggcggcggcgacggaggaggaactctcgacctcccgtccgtcgccgcggcggcggcggcgcggcacccggcgctcgtgccccgtggcggcgaggggtgcttctccgggaccgtcgcggaagtggcccccaggggcaggagccgcggcggggaggcgaggctctggctctccgagcccgccatggtcggcgccgcgctgcggcctgggtgcctcgtctccgtaagctcatgcttgatgctcctcctcctccttgagatttttggaatgcttcgtgtgcccaacttgctttttaagctaaggaagctatgattgttctgtaaatgtgatccttctgtagctaaagatgctgcgattttaggaatgtggctcgatttggcataggttagtcgatggtgagctgctgagcttacctttgatttgtgtgagtccatttcactgttgcttattgctgcaatgtttgctttgatgctgtatagcttgtcgcagttgagaagttgaatttatctcttggtgctgaaaatcatcgttttgtttactagcttcagcaaatctttttaatgaatcactagtgatcccagttcgtttcccatcagcttgagcattgtcactaaacagccatgtccagatatgtgttatcgtgtcgagttatgttactctcatcgtagaacaaaacttccgtgtttatacttcatgcaatgatgcaaaaaccgtttagtatgctagtctaaatgtcctttttggtacataagctgaaactgatctccttatttctaggtatctctcatttcttcaaataggggtcgatcagatggttcaccacttgatagtttatttgaggagtgcaacgagttctttgatcttgatgtggataatgatctcatgcctaatgaagctggtcgaaactttgtgattgccaaagttttcccctcacgtgaggtatgtgtgccttgtacttataaagcaatggttagaatgcttaataactgataaagtttttaatcttgtcccagcgaaaaagtttttaatcttgttgttttcttaggtccaaaagaatggtatcaagctgtcttgggaccttgcttgctccctgggaaatccttcagtaggttgttccttgttttttagccccctatatacatctcaggccccaaaggaaactgatagtgttgacattttacgggtgataaaatgcagcaatctttaccttagttttgtcccagctaaagttggatcttccagcgagattgaatctgagtctgtacaccatcctataagaaatggaatggttatagaatcacctaagagaaattcttcagttctgtcaggcaggaatgagtcctatgatattgcatcccacagtggcccttcattgtgtttggatccagctactgcaagatcatcattagcagatgagaaaattaatgagttgctgcagacttgtgcatcacgctggctcagtggtaggcacctactgaaagcaaactatgttcccctcctgatgtgtgggaaattgtctatgtttattgttatgggagcagaagtagatggttctgctcctgatgtggtgcatgataaagataagttaccgtctaatgaagagatttctggtaaatttggggaagcgcctgtttcattccttgttgacagaaccacgaaagtgcatctttctggtccagtctgctcagaggagattgcctttgttaagccaggcccatcagcacacaattcctttcgtactgatgcaagaaacggagatttcaatcacggtccaagacttggtgggctatccaaagaatcaaaagaaataaaagaaatcatttcattttcaatcaaagaccaaattggcttgcaaaggtatactgtgaaatattgattcatcgctcacgtctaaccataaaaaagaaagttatttccatcactaatatgttgactggtttcagggtcaaagataacctctggtacagaggtatccttctttctggtccacctggaacagggaaaacctctcttgctacttcttgtgcctatgatgaaggagtcaatctttttacaatcaacggaccagagatcattagtcagtattatggtgaaagtgagcaggcactttatgatgttttcagttcagctaagcaagctgcccctgctgtggttagactctctaatgctttcctacatttttttcatcatgtcaactatgctttaaaattaagaaaatttgcctctttcatagttttggtttttcacttatatgttgtgaaactgaaaaaatataataattctttgtggtaacttttggaatctatctttacaatggtatctcctatactcggatagttagcaaggtattgaatataaagcatctttactaccttctgataatttgctgaatacatttaaattttgaattctaggttcctgagttgtaagatgttctttgcagctcatatgttttaagttacattttgttctcttaaaaatttatgccgccaaactggccagtttacattgatatattgaaatctatgtttcatatttcctctgtttataatgtaaaaactccaagccaccacataaagccacattgtcaccattttttcacactgttcgatggctctttgatactttagatcatcacctattttttctaatacaaacaaataattttctttatgttggattcggcacttctcgatgagaatgatgacttccagtccaacatattttacagtgcacccatcaatgtccacatcaatgtgctaggtatcatctagatatgattatggcagtggtttactagacatatactatggataacaagtattgagtgccctgattagttttcttcaaactacatgttaccattgtaaaagaatcaaggattgattacctataatatttttttcttttagatatttattgatgaattggatgcaattgctccagaaaggaaggatgggagtgaggaattatccattagaattgttgtcactctgttaaaactgattgatgctatgagccctagagaccgtgttctcgtgattgctgcaacaaatcgacccgatagtattgatccggcattgaaacgcccggaaaggttggaccgaaaaattgagataggtacaaatatctgatgctattcttgtactcaagttaatgttatgggtgtaatctactttacttgcttgttgtctgttcagttattgacaccaagaactatttaaattctgagatttgttgagtacatggatggatcattatatgttgaataatcataacgtttaaaccaaaaaaaatttctaaacaatggattatctttgaagaaacatggtatcatccctaccctatagattattttatcattttctccacgtgcttataggtgatatcaaatgtgatatgagaacaatcaattctaatggtgcaatagcatggttgtccagttgataaattgcttaccttaagtcatctgttgattttttttcccctgaaatggcttgcttgcaggagtaccatctccagtacaaaggctggacatacttcaacaccttctagttggagttcagcattctctcagttgtgagcaacttgagtcccttgcttccgctactcatggttttgtgggtgctgatcttgctgccctctgcaatgaggctgcgttaagtgctcttcgccgttatatcagcctaaagaagagttctcaacaactagggtattatgacaataatgcagaaaagcctgatattagagagattaatgatcctttggggtatcaagtaaactcaatagcatcctctctctcaaagttaacaatgtcagtggatgatgtcctgtgcaccagtaggagcaatgacacagaaaacaatggatctagtggcaagaaagatgacttgctcttgttagtgaccactgaggactttgagaaggctaaaattaaagtgaggccgagtgcaatgcgtgaggtatcatattcaccctcccgatctacccaatttagtctgatgacaatctcttctataataatttgctatttttcctttctcataacagtttgctgcttaagcaatgttgttgttctctctcatcttttcttctctttttttttgtttgtgtcaatcttttcattcatgaactccaatttagtctagaagttgcatattcgttgaaaattgatacaaagctttgtcaaatagttcagttgattgtatgttccttttgtgtttcattactcaatgtgcttcataaatgcattattatcctatgggaaataaaaaactagtgtttttttttttaatctgtagctgatcgtcatattttgatatctatgatttcctttacaggtatcacttgaacttccaaagatacgatgggaagatgttggcggccaagtgagaatcaaggagcagttaatagaagccatcgagttgccacagaaaaacccgaaagcattcgaaaacatgggggtcagcccccctagaggattgctaatgattggaccacctggttgcagtaagacattgatggcccgggctgtagcttccgaggcaaaactaaacttccttgcagttaagggtcctgaacttttcagcaaatgggttggggactccgagaaggcagtgagatcactatttgcaaaagccagagataatgcaccagcaatattatttttcgatgaaatagatgggcttgcagtaactcgaggccgtgaaaatgatagcgtatcagttggtgatagggttctcagtcaattgctagtggaaatggatggtgagttttaatacctcattgtgttatccattattttagtcctgcaattagctcagcagttattttaattggattatttcgttgttaagagtacaatacaatttggtgttttaagcttgtgattgtggattatgaataattttaattggtaactgtattcatttgaagaatatcatggttgttccctgcaaaaaaaaaaaaaggactgcttctgaatatgaacattggctaacaattgcatgccaaaaatcctctctttggctattcctgtcaatgtcattagcttctcttcgtattcatgtttttgtcatgtacaacctctaaaagatcctattgatgttttggttagagcatgcataacttattatggttgctacaggtttggagcaaagaattggtgttactgttattgcagccacaaatcgccctgacaaaattgattgtgcacttctgagaccaggttatttgtccggttattcacattttgtctggcttacatacattggttgggttacttatatagtacttggtctgactttatgaacaatgtatgcgctaggtcgtttcgataggctgcttgatgtgcaaccaccagatgaggctgatcgtgtggatattttccggatccatacacgcaacatgccatgtagtcatgacgtcaatctaaatgagcttgctagacttacagaaggttacactggcgctgacataaagcttgtctgcagggaagctgctattgccgccttagatgtaagctatttgttctttcccccattgttgcacatgactattggattgtacttagatgtttgtgattcactgataaacaattattttctccaggagaacattgatattccagaagtagaaattagacatttcaagtctgcaattagcagaataaagccatctgatgttaaattttaccaagaactggcggcacagtacagcagattcgttgatcctatgtcgcagagtaaacaatgatacttggcagtggacggtaaggcacatatttgaacctgccactttgtagcccattagatatttgtgtgtaaatagagaagctaagcttttgttagttaccagttacgcagaaaaaagaattaggcaacatcacatttccccattgcttcagagcacctatactgtttgtagcatttttactcttgagaaacttggccagtgctagcaattgagttgttttcttttttttttctttttctttccctttcccaactgcattcttgtccagcattttgtgtagctggaaaattttctcagaggaggctacttctgtaagtccatgaaattcatgtccagttgtccaatgggactctgaaccggcagtgatgactcggtcactgccggtttcaattgaactgacagtgataatccaacaagtctagatttgtttttagagcagtaggaaagttgctagtgccagaactttcgatgaacggtattggaaattgctataggaatttcagaagttgcacgcttatcaagtacagtacagaatcatttacattttgtaccgaatttgttttctatgatgttgagctgcaatccgagtgatttgttgttgggtttacatttccgatagccctacaaaccgtagtacctggtggggggttgggggagggggggggttgcaaaaattgacaattcaatggaaaaccaaaatttcaagtacttgagtttagtagtggaaactgatcagctttttggatttttcgatcgaaatcaccagaatttcaacggggaaagacgtgcgaaatgaatgtttactgggaaactgacctatgtgagcgtgaaacccggtgatactttttgtttgctgaaaattacaaaatactagtagagaaaccttgaaaaaaaatagtgaggtgaggtgtagtctatgaaaaattgtaagtaacctaataaaaatttgcatgacctttcatatacactacatgcaacataatatatattcatatattcaggaaggcaatagccccaaaaagaatatatcactcacaattcaatgtgcatcaccaatcatacgaggaataagttcaccggaggtcactcaacttaacagcgagattttttgaggtcgcttaaccacaaaaccaaaaatatgtacccctaaactcacacaaactgtgcactcaaggtcctatggtaatatatatgggcggtttcactgacgtggcattctacttagcaaaaaaaagaattaaaagaagtacatgagatccacatgtcagctgcacatctttttttcttctcttttcttctcctccttttctcttttctctcttctctcctcttcttcagtcaggaaggccggcgggcggagcggaatgaaaattcatctaatccatgttaatgcatatgaatgtatttaagaaccaaaaacaagccacataaattcaaaagacagagggacacacatttcattgcccataattcaaactttgagttttacaaattttgggtctattaccaaagaagatcgatggtaagataaattaaaaattaataataaaagttaaaaataaacaatggtacatgcaaagttaaattattgataccagacgtgcaaatgtgcaggcactaaagaatacatagtagagcaaacaatttgatatcttgacacacacttcgggctccaacctgaaaaaaaaaactcaacttttatcaaatatcttaggcagaatttgacttcggctacatgttagtcccagcagctgaaccatcatcttgtggtgaagtttgttttttcttgcatatgaagaacaaacccccaacgaagagttgtatggggatgagcaggaggaagacattcttggatgtttcccaatcccgaacgctgcctgctgcgtaggctaccaggagggcaagcatgtccaacactatgaccgtgtgcatcggccaaaagaccttttcgccacccgttttgggcgacaacatcctttggagtagcagcacgatgacagtgatagaagccatgaaggaagtggagttgctgtagaagaaagtattgtatcgtcgcatgttaatgtcatagaggaccggattgcccgcagagtgtccatcgccttcgtccctccataggccgccgggtggttttaggcctgtcaggtaggtgatagacgcggctagtatccctaccagcatcaggtacttgatcacatcttcttcttgcatcgaaagctttggcgaggagaacccattggttcccgttggtggtggtggtggttgtcgttgttgttgttgttgtgtattcttctttaattctctgaaatggttgattgccagacagattacacctacaaaaaccccaagaaccaatcccagtacaatgatgaaggtccgtagatatatggagcttccagcagcgtaggcacccagaaccccaaacatgcctgctaccatgcagataatgagggcatagctccgaatgcctggccgatatagatttttgttcataagaagaacaattagagccacagacgccatgaagcttgccgcgttgcagtagaagaatgccttgtagcggcaagggtccttgtttaggagcacggggaagcccgcatggtagccaaacttctcatcgttctcccagaaaccacctggcggggttaggccagcttggtaggtgagtgtcgcagccaagaccgtaaaaagaagcagcacctcacgatgctcctccaactgatcatcaccgccatttttagtctccaatgtgaagaagacaatgtgaatcactacatagacaaggacagcaccagccatggcgatgatgtaaatggaggtgctcgtgtccctgcaacacccgacagcgtacgctcctatgaggccgaacaggtccagtatcatggtcgcctccagtacagcatggtatctcctcaccaatcttttattctgcgacagtgccatgatgaccagggacgccacaaaagctgcagagttaaaatagaagaagaccttgaaccgcctgggatgcgttgtgaggagtattggatctccaaccctatgacccttcccgctctctccccagacaccaccaggtggatctattcctgcttggtaagcaatggtcgctgctagagtagcaagcaactgaatgtactcacaaatcttatccacctctttgtcttgtttgctgtcactggtaattgcaccaatagataattatattgcagccaagggtaattgttttgaccataaaaaaaggcacttgcatatttgctcaaattaaactagggtcttaaattctcagttggcatgaaaatgtttttttcttacagcacaagaataatctactataagaaaacttaatgacggacacaataggtaggcaaagggggctcgcgtacccctactccctaggagagcatgccacgggaaccccaatgcgcctccatcgatcctaggggcttgcttcatgggcttccacgtaaatagcatattagaataagtttagtagtaagctacaaaccacctat

SEQ ID NO: 10549 - DNA, 10317 bp, Oryza sativa
cctccacccctctttatatggcacagtgtgacgggggcccaccagccattgggctgggcgcccccgatcagggcgcgggtcaaggcccccttgagccgttgggctcaaggggagggagatccatctaacatcagtgtcaccatgtctatcttgcttttgcagcttgcatctcgtcattttttatgtatttgtatctccattatcatcatatccatgcccttcagattatatgtatggacttaagtaccctgagattagaaaaccagaaatcacaggcacatgtcaagtggaccagagcaaatttatttatttttttacgatactcattcttgtacaactttaaagtgaagttttgagatgtgttttagcaatcaaaaagccatattgtttcacttggaccatttggttgcgttgagttgaaaagattgtggaaggtctctcttgtgcttttgatgtgtacaaaagtattaatgaacatgaagattcttattttttctccttccggttctctttctgccattgcagcccaagggtagcgttttgtggatatggggtgtgtttggttgctcgtatccccctagcctggtccgtctctctcatcctggctgagtttgacctggctaagaggatacatatgcagctgtttagttgtttgcattagtctatctaggttggttgtttgcattagtctatctaggttggtatgagatcttgtttggttactcgtatgagaaatacggtttggaagggatcttttttggttggttgcactgatcgagtgtggttacctctttatttagctgggtaagattacctttacaatatatatataattatattgggtttttagttaacaattaaatattctcttacatatgcaaatgataatattagaagtgcaaaatcattgtcttctctatataaaataaaataagtcatcaactttacgagtttgtgataaaaaaaagaaaaaaaagtagatttttattaaggtagaccgcggtgtactaatctaccattagtagatactacagcgacttctttattacgaaagaaaaaagaaagcgaaaaaacgagagaggaaaaaggaaaggggatcggcgttgcgtcgtcgccttcagcaactctccgctcgccgccgccgatgcgcgcctgtcgctcccctccgcccgccgccggtgcgcccatcttcctgtcgctcccctccccctgctgctcgtcactcctcccatctccccgcgcttcttccctttgcccgtcgctcgctgcatcagatctggatcggaggctggtgacagaaggtgggagacgacggtggccggcgattgaaggtcgggggacggcgggaagaagaggagggatgcagcagcaagacggatccgcctaggggctcgtcgttgtggcccccgtcgagcttcgtcgcctttgagctgttcgctgctgcttcgccatgtccgtagcttcgttgctcgctgggagaatgaggagggggagaggggcagggtggtgaccccatcgcctgcccttgcaggcgcgggtgcggcgctgcacgcgcgggtgcatggcgttgcatcgcgcgggcctggctgagcagcgaagctcaaatcgagcgctcctgctcagcctggctcacggggcttttttgcatccactcggccaggctgggagctacgtgcaggcaaccaaacgaccacatagtgcatccacgcattcgagccaaggactatgcaggcaaccaaacacacctagcatccctcaccctgctgacaacaaagtcaacataagagttcagactacaggtaatttaaaatattatattatcctgatgtttttaatactgtaagatggactgaagttgttggtttcagacctttttttatcttgaatgcatattagattaatttgtgcaacttaatcaactaattaaattatgtttcctctcaaagtttgtcttttggcatttaatattgtttagattgtcacctaacatatattttcaaaatggtaaatagtcccattatcttgtatattttttcccacttgtggtatagataggtcttacatctaaatagaatgttatgggcatgtttctgttgaaagataattcgactaccaaaatggttagtaacttctaacatcgatattcatgtttgaaccaaaagttaaattcaaatagatgtatctcaaagaaatacttgtaccattatggtcgacttgatctcattgccttcttgatattttatggtttcactgcttttgtccctgaagaaagtgtgcgttctcttctgacgcgtttttatgttggcaggggatccagccattgatgtattcaaggatggtttacaggacttgatagtcatgtgccaacatgttagagggacttttgacaatgcagtggtagattttagatcaaaggtacctgctcagcaaatggacatagattcaaagtagaaatgaaatttccgtatgccctctgctccattgttttccatcagaactttgtgtaaccagttcattattggaacgttgattaggtgtgattcttggctataaggcgattttactagaaatctgctttgactgagttgtggaaagtcagtgctctgcttttcaatttttggaaaatcagtctatgtactaaaactagcctgacaatgtgaacagtaaaatgtttccgtggttgttgcttaaatacttgttccaaaatgcattatcatccattcatgtttcaggtaggaacatagagaattaagagaactttgctttcgttatgttctgctgtgaattatcctcaaacaggcattgcacctaatgataaaatgacacagcagttgacaggatttcacaaggaaattgcaaacattctcacatcatggtttggaacactgaacaacgctaatacttcatttgcactagcttattgaataacaatgttacaacacatacggtttctcaaggatgtggcacaatttcaaaacatctgtatgtaccagatgctgactagtgctccacattccattgataaaggcaagactaatccaaatatcgctaacataatgcatgatcacagggaacaggacggtaacaaattagaaccctagcatttcgaaaatggtacaacgatgcgataataaaagcatcaaactacaaagaaaaaccctaaacacctccgactggtcgagcatcaacaatggaagtgagctgaggatgaccgccaggtgcatattccaaaagaataaagatcagatccacagttattagcctttccagtgttattattcaccatagatgggggtacacgattccaggtgcgcctgctcctttcttgatgcagatgacagccacaaagagttatctaggagttgtggcaactttgtgtggaactcacaagattgacgaggactgagtacgaagaggcccagagttggggtctttgtgtttcagagacagattagcaaactgtgaatccaggtctctgctgttacttcgactagggtagtagtaggttgcggctgcttctgttgctgctgctgctgctggtacaatgatctgagacgaccaatttcccgctcaaacatctcctgttgaactgaaaaatcagaggaaaaaatctttagagcacttaataatttgttgtcagcataacttttggtttatttttagcatcagtaaataaattgatatacggtattccgttggactgaaaggcagtgatgatgctaaaataatcctatagttcatcattagggcagaatttttctagtttaggaacatatgaggcttagtttctatcttgtgataagaaaagaagctttaacaatatgttcaggcccttatataatacaatcactggcataccgattatgcaactatccaaacatttataggacttcaaatactcatgtaccagcagtcagaagtcagatattgtatgtttctgccaagttcataagttatagaagtggatatggaattacttgacctttgcacatcttggccaagggtagcatcattcttactaaaggagctaagtagtaggctgtttggttctatatttgaaatcttcggttaaatggtttgtcaactgagtttatactccatgtatagaccaaaaaaacattctacaaatagtttggctaaaagctcaactataggtatttttgtcatgattagtacatcttaaaacttgagaattaaatttcatttcttcctaactgcgaaactttgacacatgctaaaatgatttttactagcacttaagtgcagacaagaacaacaaagtaggtacaccaaatcaaaatggagcatacttacagcgtttaattagttgctcttgagctagactttccagcctttgctttaaggctttgttttccaagtcaagcataatattctgttggctaagaaactccatttcagcagacacatctatcccttctgactgtattgttcaaaaaaaaaatcagtgtcaaatatagaattggagtgttgaagagatagcaggggaaaaaaaggttgtagcaacctcacctgtaatgcctgaacttttctctcaagctctgcaatatattgaagcttccgaacgcgggacctttgagcatattgcctgcaacaaacatggggaaaaatcttcaaaacatatagcatgagaagtatttaatcacgccatatgaggaaacatttaattacgtatgttgtaagtttggagactttgatgggctgtctaagatttacgttgaaggtttgaccatatccaaaatacaatccacagtctatgcacatgcatacacagaaatgaatgcattgttcgtgccatcctgtcccatgaatcatacgcacaaactgcgcacgagtgcaactatacaaaataattgacatccaccaaatgcactgttcactttcatgtgacgcatactgcattctcaaggcttactggttgatagatgaactccacaacaaagcctccaaaagcatattcagattgcatattctaagtgaaggcctgatccttcttgtatgtgttaaagcaaacattatttgatctcttcagattatcatcatcaaatttcacatgtgatatcctacaatatgaacacacttttgaaagcgataatgtgaatgcgacagtatttgaactcactgtttagcgcgcttggtgtccgcctcggattgtgcatgcttcggcggcacgccctccttcctctcaggcccaaccttctgatcatgccccgattcgtccgaggatctcctgtccataccatgatcatgatccctcaacacgctcggcgacccatggtgcccaccaaccttctccttcgccggcatcggtggaccgccgctttgcctgtaattcaccaaattgttcatgccctgctcccatggccggccctggtgcctaccaaacgagcttggcttcgcatagtactcctgcacaccaccccacggcgcggcctgccctcctcctcctcctcctcccatcccttcaaagccattggcgtaagcgccggcggcggcgcctccgtcgaacatcgcaaacgagtcactcgacgaccggcggtggccggcccggccgtgctgccgcaccggcgtctcgggctcgttgagcaggtcgtcgagccacgacggctgctcctcgatgaagctctccgacgacgtgcgctggtggtgcccgtggccgtgcccgtgcctgtggtgcggcgcaccctgcggccgcgcgatcgggccgtggtcgccggcgtacggccccgccgccgccgccgccgtcgggaacgggctgcgcggcggcagcagcgcctgcttgggcagcttcgcgttcgccatcatcatccgctccgacccaaccaatctgaaacaacaaacacctctcctccataagactctaaacccaacatcaactcgagatttgagcgaattcaagcaccgagcaaccacgaactcgcatcgaatcgaagcaggctactcccccaacccaccccccagatctcagcgaccagttcgctcaaagcaaacccccgaattcgagccaaagattcgatccaccccccgagcggaaaaatcaaggcgaaacagcacacggacacagtcaagatccaccaaagcacaagcagcaacacccaaattaacctcagaaacgcggctcccaaaccccgaatcacaacgaaaacagcgcaaaccgagcacggatcaagaaccacagaaccccagccaacgccaagaattgcagcgacaaacaccaaaaaccccccacgagatacccaccaattcggccgccccgaccgccgcaacgaaccccagctacgagtttccgactccccggactcttctccggtggtagccaagctaatctatggaggagctcgagctcgaaggctacgaagaagaagaagaggatagagtagtggagaggaggagaagaagaagaatggagaaatcgtggagagaagggagaatcgaaataaatagtgtccttaaataaaaattacttggatttaaattactagattttaggaggagagatttttcggggcggcgaatttttgggcgaagcgtggccgttggatctgatgatccgacggcacgtgaaggtgatgaggatttattttattttattttatttttcaatgcgatgatatttgggtgggggtggccaacagcccaacactgggacactagtgactcgtgaaatgctaagcgtactactgtagtgtacatgaggagaaattcgggttatccgttgatatgtttacgttggcaattcgcgccaaaaaaaaataacttcttattttcggccgtaaggaatatttaaaatattactataatttaggtgttgtgagtttagtaagtaatagaaagtacaattataattaatattgtctcatccatttcggttatcttgtatgtattaaattacgtctatgtaacaggtataggtacgaccgtttgttcactgagctttgggcagttgacaaatgtaatatttttgccatggtgcctgctatgaaacctagcatataaagccccatgacattgacaatagccaattttcttctctttttcatacctttatgctttcatgcatataaattgttctccttagtgcctaagctattaacattagttgtttcttagatttctactgctaaaaccataatattgaccacaataaaatatattttttatagactatggttggcttattttagtttaccacttacgcctgcaatatttttagagccttattgctctatatatataattattttttatttacaaatatatcgtttcgcattttcctcttatcagccaacgatggggccaaaagtcacaaagattcatctttaccaaaaactctagatcagggggagtggataaagggcgagaaggaaaatatccaagaggtacatagatagcaaatgcagttggtgcatgtggcaaaacaccagctatatgaatggcctttctttatgcagcccatattgggtagtgggggcgagtgagcgagcgagcagagcagaaaacaactaatgccaacagcaggacagctcagggatggatcatccagctgcgaccacaccaccatttgttggctctgtcgtgctgttttgtttttaattaattgattataattaaaccccatctttattctcccccctccttgatctctagcttgttaattctttctcccttgtgaccatctctttggctgacctgattgggtgaaagaaccaaaaagaaaagatcatgcattttttttttggtagggagatcatgcatgttggcaacaaaaaggaggagacataaccctaaaaaaaatgatcccatgattgatgaatgagtatgatgtgcatgcaacgaataattgtatgtggtatagtggcatttctattttattttctttagaatgaattggtgaagataatgtaatagctatccattcatcttatttatgaaatgtcaaatgttatcttgtactatgtggaagaataatatggcatatacataaattgtttacagaaaagaattagctcaattgtatttcttttcagatactcaatagtggatgtggattgggtggaggtatattggcaatagctgtgttgcttggaaggtttggtttggttttcattgtttgctactttgatctttttctctatttttttttcatttcttggctctaaatatttacattatttatgagattggaattatgagggggaaaatgatttttggtaacattattggatcaccttttgctgcccctacactcttgccttttggggtgaccttagctgtgggcaactgaggtaacagccggcagatcatggttgcatacgcaccaagtttattagttgtaaaaagatgacagttacattaccaaatccaaactatacctcttaaactctgccactgaagatttgtgcttgacaacgatgcacttatgtttttcctacctgctattagcttcaggtttttaatgctgccctatgatatggttgtctagttgtaaacctaatcaactgtattcctaggctagctaactgccacatcctcggggaaaagaaaaaaagaaaaaaaaaagaaagagttcattatatgtttgaaatatgttcttaacttttggaccgagtacattataatataggggtaagtatgtgttctttaaaggttatatttatataactttgtgtgcagatgttcatgaaagtctataagagaatgataacgacacacattttaatttatcacacaatttatattttcacgaataactacttcaaatagagttatatatctaaatgcgatgataatttatacgtttagttttatatactggctcattgttgacagggttcattaaaaaaaaatcagatttcgttgcaaaagagatgtgtgacatgtagagcttatcctgcttgagtccagcctgctgctatcatcgacgtgaggacaagttagctagccgttcggttggatgtcacggttggagtatgttggctcatcagtgtcacagtgcaataatctcataacaatatggcaaaatttgctacatgatatttagggatgaaaacggatcgaatacggtcggaaactagctctatcatattcttttttattttttttaattgaaatcggaatcggaaacccgcatatgaaaacggaatcgaatattatcgaatacaaatacgaagcgaatacgaagcgaaacgaatacggtgacgaatattaatcggaatataaaaacctctcactactaaataaacgatttttatgtacgagaccctacgatttttgcaaatagactacaacttgtcgcgtctggaaaaatcaagtagcattttcacatacggctccttaatacacccctatggaaaaattgatttttccatgcgggctcttcagcatatggaccacttaagagtccgtatggaaaaatcgatttttccatactggcgtcttaagaagccatatgcgaaaataaaatttaaaactagtttatctcactcatatgaactctaaattggataattatttttcctaaatgtttctaaaatcatactctatcatgttattaagttcttactgctattattttaaccattttttcttgtgaatttgttttatcaattaaaaatttgaattttaaaacttcaaataatattttgaagcagtaaataatttcagctgaaaaggttatgaatataaaagttgtagaaatcatcaagacatacaacttttattttgatcatttcttcatctgacaaaatggtagtaatattatttacaaaatttatatatctctactatagtttataaaaccaaatgagagatatgaaattttgtgtacaatgttactatcactttgtcggatgaagaaatgacaaaaatagaagttatagatcttgatgaattatacaactttgttgttgatgactttttcagttgaaatcatttagtatttgaaaatgttgtttgaagttatcatattttcaaattcaaattcaaactgttcaaacaaagtcatatagaaaaatgaccaaaataaaagttgttgatcttgataagttatacaactttgtttttgagaattattccattggaaatcatttactacccgaaaaattatttgaatatcttatattttaaaattcaaattttatatagttcaaacaaactcggatggagaaatgaccaaaataaaatttgtagatcttaatgagttggacaactctgtttttgcccaatttttcatatttggtcatttagccttcaaataattcaattcgacatttatttttgccaaagaagggctgcaggaat

SEQ ID NO: 10550 - DNA, 2524 bp, Oryza sativa
atacctcctcttcaatcctgaatctggtactgtgtctataatcatttctccatcaatcaaagtcatctcatgtagtcccttggattggaaaagaaataaggttaactttttgcaaaacgaaatgcagtacgaccttttctccagaacaataatgggatcttacttcattaagattcctatggggaaagcgcatttgaactcttctgaagcaaaaattccgatcaatcaagaaacagccatccctcattataagcatcatatatcgggttccatcagctttccatgtagcaaagtagtatcgctgtctgagtagttgcaaattctcactgcggagcgtaaaaaggaatttagaacaagaacatagttagagtgggaatcaaatgaatactaaataaggaccatttgaaacaaaatagtttcatacgagaaaaaggacgctacaaaaaaaaacctctaaatcaaaaccgggcatttctttcctcccctgaaagaacaataattttcttcagcatagcaggcgcgatctcatagtttcaaggcttaactgataaaaaaagagtcgcatttaagttttaatatgtgtacataaaaaaatttgggacaagttacatgaaaagatctgaagaaattaatgacataaaagaaaggctttctgcaatcagaaatctgttgttcatatgtgaaatggagctttctaagagaaggggttgggtgcatatttccaacccatcaagtgcacaaattttacctaccaaccttatattagaggcagagatttaaatttttcataaactactttctacagttttgctttctgcaaagccccaaagaacatcagaaatcaaaacgcacagataacatgtaagagataatggacttaacacagatactaataagttactagtattacaaacaatgcatgaagtccagattactgttagccacctgttaagagagacaggatgtgatccaggaaactgtgcatgccctctcacctgtaacaaaacaaatgctattatagcagcgtgtaagaaacacaagttgtggttggcaacatatgcagaaactattaaagttacagaacataagtaccagttgaaaatagcacaagcattataacagctaaaaaggagactagatgaacagacaacataatttgtatgtgcacatatggatgttcaattgaccatataaaatttatacttacagggggcatttccagcaagcgataacatacgacacgcagagcatcttgctgatcatatggtacagcatctcctagcacatcatcattagtgataactttatcttccacctcattctgcaagatacaagggctcaaaagcaagaaaatagctttgaatattccaagcaagtttgcttcatgacaattaaaaaaaacaatatgagccaggagatatagtaaattacatccaaagtaaagtccaaaaatccaatcaaataataaagtaggtcgtatgaactcaaaactctacctttatgtccataaatgaaaaacctttcgagaattacaaggaatcaggcacttaattctctaccaaattacttggaagtaatttcagatttgaatatctgaaaatgcttacatgtactggtgcaagatcaccattctcatcatcatcatcttgcttggcttcaccatttaaatcaagatcggatgaccttttccattctggtgttgaagggcatgttatcatatgctcaggaacctcatgataaaatgaatacagtgcttcaatgtagtccctcttatatataccaggcggtctcctttttgcaaatatgtttatcgcctagaatgaaaatgaggtcaagaagaacagtagaactaagtcaaacaaacaacattgagaatctagttggcatacctcagcgacgcaggatacttgtgttcgcataaggtaatggataatcatgaaaccagtacgattatgaccatgggtacagtgaacaagaatatatttaggattctttgactgcttctgtcggtcaagaaacatcatcacctgaaataacagaaaaaaatcattccataaatatacattgaatgctgtctgtacatatggttgctaactacatacatctgaatctattgttctatggtacaaaataataaagaaaatcattggttgcagatgaggaaataagtcattaaaaataatgtaacagaaaatatatatataatggtttatatacttcaacgcgtatatcattgaatttggtgagcccaaattgttgttgcagaaaaacctagatcatttaaccactatacaccattcccatgaactgatgatccaaagaaatatgcatacaggtaacaggatctttgataatgaaagatgccaaagtgcaaacaccttttaagttacaaagtaggtataaactaccgtgcgaagaaataagtactccctctgatgcaaactgtaattcgttatatgtattgaccagtggcggagccaccttaaaactgtggggttgcatcatacaccttgatcatgtgaaa

SEQ ID NO: 10551 - DNA, 5298 bp, Oryza sativa
gttacatgcaaagccaaaatctgcagttcataaccatttaataactaacttgtcatggcacctttaacatgtgcagaccaaaacatcataataggtatatattgacacattgcacaacttaatcaatatcacatgaagttaaaaacatgtagctcctaattaaaaggtaaaactactttttaggccttggttcagttaatcccttcccaagaggattggaggggattaattccacatctttcaaatctcaatcccctccaatcacttcctcatggggattaactgaacatgcccttagagaataagctcaaacacttgaggaacaaaaagaaaacagctcacaagaaacaaattgcaaacacaatgggataggaaaacaaatgaaatactttaaaaatgtgaaagaattaagcaacagactcctacttggacaaataaacaccagaatcaaatatactgctgatacaaaacatgtagccaaatataggtgttacctcatagacaaaccaattaacagattcattatcaggtacagcatctcttcccttgcatggaatctaaaacagaaatgtgttaacataggaaaggcccttttgatttcaaggatgcagataagcttaagttctctcaccttgacatgcttaataccttgccttgtccattctgcaggtgagtaatatcgagtagtatttgtcaaatcaatcaccaaacctatctgaaaagggataggaaaaaatcggtatagttctgttagcaaaagggggctgactaggaatgtacgcatacgagataatccgtaccatgccaataatatgaacatttcgaacaagaggaggagcagtaagtgcacatgtttcacaaaagaatttcagaattgcaatcttttatttatacaataatatcaattgaaaacagcatcatcttcgcaattaacaaaagggaaataagtacgtagtacaactacaaactataaaaataatcaacaagtcaatacttacttcacgaccagcttttctttgtttattaactacttgtttggaagaatatcttttcccaggaggcaccaagtcattgaatgtttcatcaagaggaaccttggaaggtatgattttgtctattggctcaccaaatgctggacaattcatccaacctgaagtaacatagacaaaagcaagaatagtcaaaatccattttgcgcatgctcatagctagaaattgccatataaagttgataacagttagaaacattttccaacatttcataccatcaggtgcctcttttattcgacctctaccagctctgttataaggtgcataatcgttcctaatctgctgagaatgtaatcttgagccttcatcttgttgctctctctttaattttttgcgtctctcttcacgctcctgcaacaatggcaagattaacataaaaaggtggcatgcaagtttgcatgcttgccattaagaaaaactgaaacagacaatcaccactttccaatcctcaaaatagattatctgaagcatgaccaaaacaaaaggcagaaaatttggatgctatgcaaacaaaggaagcgacataccagtaaaactaggaaaaggaacatatgtaaaccaacattaacaacttccaagttgtttcccatcatctaacgatattaactaagagaacttgctgaagataaaatgtacagtttgcatttcagtaataaataatcagctatcattaggaaccttctagatggaaccaaaaggtaaatgcaggatgagtgtcatgtagtacccttcgcattgtagcaacagcagactcaacatgctcctcctgtgcaaaatcaacctcgacctgttgttcataaggctgttcatcttcctcaggcaatggtgaggcatttaaatccattgagaaggtcattcaacatccactacttcatatatcctcaataacgttttgagatttgcacctaagaacaagtatatacttagatgatcacacatggagaaacaaatattatcaaaatctcaaaatcattaaaagtgagcggaaggcattaacacgattattgaaaagacagcacaagtttcaacctatacaagcttaaggaaagaggactgagggacagcttcattgacaagcattccacacccccaaagaaacaaaccacatcctttataatacaaactactgacgaaaatcttgcatcacataggcactaataacagtgttggttgcaaagttgcaaacagtgtagcctagtatctattcctgtataaagcatgcgatgtcctatgcactgcagattttaaaaagaacaactcttacagctatgctaccagcttgaacatgaaaacagcacaacagtaaatatttcatattgtgacacctacaattcaacaaataacaggaagttgacaatgaacatgcatggccataaagcccacaagaacatgtttgtaaatttcaaacgagattgagtgtcagttcagatgcccctgacttaaaaccttacacaatactagactcaaatttaagatgaaggataggcacacaagatatgaacaatggaaacgaaatcataaagactacgcatactaatgattaccattttaccagtatttcaaatcctgccagtatatgtagaagtatataaatttataaccaaggggggaaatctagttcacaggaaaattagtgctagcatcactaaaccctcagttcaggcatcaagtcagcgcaaagtttgaaaagaacaaaaatggtgacataccaagactgaaaatttggaagggagactcaatcaatagtaagataaccaataatggcaaactttctgtggacaataattttattttttcccttcattttattgtaacaattcatcttatattaactttcttatatagaacagacccaaacttgaaactgaaaatctctgtatggtggaagattacttgacaaacacttgcacaacttcaagatttttggatattacaggtcttgtggcttgcaccagctatgcctctggtaaataaataaacgagaacattcttcattttccatcaaatgctatcatttttccttaattcctgataaatggctcatctcttatacactatcgaatgaaattctgcgtcccttatttgccatcgacgtaatcatactttaaaatcccatcactgaggttcattaatttcaaaccttctttcgaccttagtcactaaaatacaaaaatggcaattttgcccctagtcaacatgtcattgtcccaggctcactattcaacatgctctttctatctatcttttgctttttcttctctgccccccccctttggttccatcagtcgttgcttgctcacaccgaggtaggtaacaccggcagcacatggcgcaggcaagaaggcgaaaccagctactcctctggctcacctaaaaaacctccactacctgacacctgataacagcaggtttctggcatgttttcgtagacgcatgaaatcaggtcagccccaaccttttagtatatatttttcacgcacttcgcttctcagcttatctaattcatcgttgcttcaagcgaattaataataataacttatcatgctcatcaagactcatcatttagacatggaatagcagagcagataggtatccaagtgtgaatagccagttaaggcagagataggaatctgggcacagctggaatggagaccaacctccattctgcattctctgccaccctcaaggtgctcgacctcagccccaacccacatctactgggtgaatccagtgaatggactatcatacaagacaagtacatatgggtatgggcagccctgcatggctgcatcccaagatatagagagggcgggggggctgaactagtggcatataagggataagccaactctcagtggcgaataaggaaacatggtaatattgattgtcacttaaaaagaatttttctcgcaaatataaggtggttttacaataattttgtgattttgagggtccattgttacataaaacagtatcacctccatacaaggtaagttctgtggcagactgcaatatcagactgagaaactgcccatttatttgcatgggtttcagtgacatgtggggccataagcataaactgacatgtggggccataagcataaagtccccacaacacatgaatggccctagaattgctaattctagaaattttaaggggttacatacaaaatcttcaaattcacctgccacccacaaatgaattacagtattattatccaaccgtatggcttatagaaatagatgaagaagataaaaggaggtgatctagcagcatatttcagcatggttgcctatgaagatgacattatatgcctaatcgactaactatgctataaacttgtaagttttgcttttgcttttctctcttataatatccgttgcaacgcatttgacttggctagcaactctaaagttattatttgacttgttaattgcacaccagacattaaaatatctgcattctttcctcacccattttgcaactattaagtaatgtactgaagagatatgcaaatattcaagtccatggcaccgaaaaagtgcatttttcctagcaccttgcaactttaagttatcaactgaagagaaattcaaatgttgaagtccatgaaaccaagatagcaacaataaatgttcattttggggcatttaatttccccagcacaatagcagcataaagaggtaacataattcatgcagtgacagacgacatggtactttcaaggagaaaaaagggtgcatgtaggtttcttgcagctatattaccacctaaaaatgacggaggttcatacctccacagaattaatgtcaagaatggagtgaccaagcgaaaatgggaaaaaaatgtcctggtgtcatctgaaaacccgccccaagccacaagcccacgacacaaaagatgaaattcgagctaaaaaaaaaacaaggacagctcacaccaccgctactaccagttacagcaatagctaaacagctagctagggttctcccaaaaacggggtgaaacgccggccaaaccgcttgctagggggattaccgcgagcacaccaacacacgaaccccccatcccgagaccatacacgcacgtcgcccggcccgtacgacccgtgccgccgcggcccccaattcccacttcccagcccgcgccccccgccacgcacgcgcgcagggggtgaaaccagaccgccgtgggagcgagcgcgagccaaggaccgcagcgaattgggggaggaggaagggggaggg

SEQ ID NO: 10552 - DNA, 1004 bp, Oryza sativa
tgaggggcggcgagggggggagcggcaggttggtgacggggcaggtgaggtggccgccgtcgagccagcgctggatgctgcggcgctcgaaggtgtggccggaggggaggatgacggggtcggtcatgacctccagcgagattgggcagcggaagtcgtccggccaggtcgagccctgctccggcgacacctccatgcgcgttcttggcgtgcgagccgatctgcggcgaggaatggaaagcgtgtgggactcgtgaggaagacgaagaggaggagagtggggaaagtccacttcttccggtggacaggaaacgggatttgctgtggggcggtgagagagggtggggagaccacccggtgggcttaagtaacccactaatctaccctacccccaccccaccccaccccatacggccatacctagaaggcaggtcgattaccgacgtcgtgagtctacatgtggtgtgtccatccaccttaggttgggaagcatgccggctgctggcatcgtgagtctatgtgtggtgagtccaccttaggttaggaggcatgacggttgccggcgtcgtgagtttacctgtagtaagtcgggatgagggaggatgaagcgttaaggttgtgttggaagcggtgggggtagtttcagaagggtttgtttcaatgttgtagtatctgtctgtgttcttgttgctgtcttgtgttttacgagggaatgcgcgtgtcgatcttgtgaaggctggaggatatatcatttttggatttaactaatgctttttggtggtggtgttttttttttggggttcgtttcgacgtcatggtatctatctgttgcagtcttgagctttcatcgtgtgatgaattaaaggatagcgatgttgcttatgtttatcgttgttatgtctatccgctgcagtcttttgtctgagtaacgtgtggcttatttggatttagcagacgatccttgataatgtttgcttttgtctatcttatgatccatacatgct

SEQ ID NO: 10553 - DNA, 606 bp, Oryza sativa
  unsure (1)..(606): unsure at all n locations
tcccacatgccagccgataatcttctcccacctatctcccctttcttcccgtctcaacccaaacctccagggcagtcagcaacaggtggggagaagagtggcgactgacggctgcgtcatggacctacacggcaaagagcgcgaagaagcgaagtaggaagggctcccgacacgtcgtcccctcgggttacaccaccacatcgttgcgtggcagctcgccgcgcatctgcgccgcgtccgcatcatggttgcatatcagccacaccgtcgggattggcgggaggatctccaagagttgggagatggagtacgttgcgacgcctgagcatactcgcgagcaccactgactgcatgagtgcccgtgcatgcaagcgaagaggacgccagacgctgaatcgcgggaaaggtgtgtggtggcccgtgaccaacanggagaatggtggtgggtggtgggcggcggcggtagataaaagcccgacgacggcgcttggcgatgggtggggagaaggctatcaacgaacaaaaagcttggcgatggcgacccgtggggaaaagggcgcatgcatcgaagacaatgctaccgcaacgtggagtagatggaagttg

SEQ ID NO: 10554 - DNA, 8799 bp, Oryza sativa
tagtaaacgagaaaaaaaatatgtcatgcatataccaacgaaattatgggtttttatcttatttcactttccacaagattaaacaaatacatttactctaaaccaagctaagtcataattagttttatatcgcattaggttatgtcgcaggttccctttgtaagacttcttataactttggatcatgttttgcaaaattctatttgaattttcaattaaacatgaaaattgtatagtatgttgatgtatctcgatagaaagtaatatgttcttagtccatccatctcagaatatagcaacctaggatcggattagacgcatcctagtactacgaatctgaacatagggcatgtctagattcgtagtagcaagatacatcccatccgatcctaggttgctatattttggaacggaaggagtactttacacctaatgcacattgaaagtatgctataaattcggctctgttcttaggctgagtttgaggagaagggcattgagaagattaggaagatacgtaaaacggtctgagctattagtgtatgattaattgagtattaattatttaaaattttaaaaatagattaatatgattttttaaaacaacttccctatagaattttttttaaaaaaacacaccgtttagtagttcggaaagcgtgcgcgccgaaaacgagagaaatctttctctctatcacctactgcgaacgctgccttagttctgttctcttttcgtaattgcaagaaaaataagtaaaaatttaccataatttttctttaaaaattggctctaaaattaaaatgaatttgggttataataatttgtaagaaaccattaagtgcttgttggaataatgtaaaatgataactttgaattctattccatttattttttccacctcatttcatccattcactaccttcatatatttccctataccaatctaacatctgatatgatcatatcacatgatccaaacatagttccaacttccaagaccatatagatcacccaattatcaaaagaatcattagattaattagctgccgtccaaagcgatttggcaaagaaacagagagtatacaattttgctatatatttgtcgataaattttctctcaaaaatttaacagatgtaattacagtacaatcgcagtgtaattacactgtaacttgcatgtaattacactgtaactataatgtaacttgtatgtaactttcaaaaatctctccgtaacatgttatttcggtaaaatagagatcgtgggaacaaatcctttcacatatatatgtgctgtgattttttttcttcctcaccagaataaatcttgtaatagatctaacgatttaaaattatgtgaaacttacatacaagttacactatagttacatgtaagttacagtgtaattacatacaagttacaacgtaattacactatgattatactataattacatctgtcaattttttaaaagaaaatttgtcgataaatatataggtggtcccgagagtatatatatcctcgagacatgagctcctgtcagctcccaatgctgccggtggggccacctcactttgcctcatgtcaaattaccaaactacccctgtccgttccggcagttgttgacttctcctccatcttccgacatctcgctccatctcactgacgggtgggccccacagatgtgctgccccacgcgtcagtcacagagatgtataactgtttattggagaatgggccgtgccggcaactccgggaactgtcccatcgatccgattcgccaaattcaactgctactcgtacgaattcttggtacagatcccacgtaacaattttacacactattaggactaatttacgagacgaatcttttaagattaattgctctaagatttgacaatatggtgctacagtaaatatttactaataatagattaattaggcttaataaattcgtctagctgtttacctgatggattatgtaattagttttttattagcgaccgaaccccccatgcaacaccctatataatgcctaatgtgacacgccaaaattttacaccttatataaaaaacaccctcttacacgaatttaggggtgttaatttctctgcagaaacagtacggctatttggtacggattcaacctaaatttgtgtggttggtttaaggtcgtccatcaggacaatatatcgaattattgatcgagtagtaggttttcttctcttcttgtttttttctcctctgaaacacgtttggttggtaacaatatgctggaaagtccgaggtagcagatgggatactgaccaaacaacacctgcctcgatcacttcctccatcttttgtcaagaactgcatcgtgcttctctctccccgtttcaaaatataagcatttttaagtatagtgtcaaatcaatcaattttaacttttactattaataaaaaaatcaatcatgtaaaattaatattactagatttacattaaacaaactatcatatgtatacaactctttttatttaaaacatcttatttttataaatattgttagtcaaattaacatctcaaatattatatagaagtccaaaatacctatatattttgggacagagtgagtattgtactaggtatgtgtgtaggtctatagatcaaatattttgctctgcgaaattatgataaattgttgggtttatttgtaggacaggtgatagaaactagtcattccgcctactaattaactcattttaacagatctaaatttctcaactcaaacttaatttatactaaaactcttataaatgcttatgttctggaactataagtgggttatttgtcttacttatttcgagcttatttatttatggtgtgggtgtggtacatataatgatattttcaattcggtagcatgagttagtcagtctcgtactgtcaatttctttttcttcagaaaaaaataatgcacggccaaattctatgccacatcttccctcgggcaaaaaaatcttaagaaacttctatttttagataatagaaatgagttgcattctccggcatctgcccatggacacacagccaacaagattcagaaacttccataccacaactaaggcatgaaggatttaaaatttaagagggtgaaagtttataatttataacttaaatatgggttgtcttttcttttctaataataaaaatggtatacatctccagcctctaccattggacacagcctgaagctttgccaaccaacaaaacaccctagttaatcaaaaggacttagctagtaaacttgaccttatcaacaaataaggaggaggtagatctagacagaagaaggatcaacaaattccctataaatagcttagatcaatgagtatatatatggtcaccaaagagtgttagcttgtatgtaatctcaattaattaaccaataaagatatgggaggagtatatgtgttgggagcaaggtcacatggtgattgcaagtactcagatgtatgtagtgaccgtgctcacatggccatgcgtgaattgtgtaagccacgcaactgacttgcttcaacatatatacatataaaccaactatatatataactatatgttctcacatgtatctatggttcctagctagtacactttaattatatccataatatgcttgccacatgtgcttacatgcaaattctccaattcgcaatgtgtacataagataagatcttgaaaattatttaattgattgatttttttgccaataatgtttgattgattatctccatcaattaaagtggccgaaataggtgacctgtgagtgtgttcaaatgtacaaggaccatgcatgcctttgcctatatgaagtagtagactgactataagaaaagaatattaatcatcaaattttcatatcgttctttaatttcaaactgatttcccaatttgtgtgcatgtcgttctttcaattcagaaattaattatttcgatccttgtctgccggcagcccagcaccactagctagcaatatatagttagtggctagattaattagtgctttgatatcttttgatgatctgtttgaacaaaaaatatttataatccattggaatttgttgggaaacgatctcgttgcagtttattatcacaaaagctagcatgcgtgcatgcagtggtgcttctagacaagtagttaaactttcacatgaattgtgcagcaaaactgggaattgcaggtttatttcgttgtctgatgatatgatgcgatcacggggaaatgatgaaaattagctagcatcatcagatgcaattctgacgctgacgcttaacgagaaaaaatagattttattagcattcactgctgcactgtagccatgcgtgagcagaatggaatctatgggtgtactactcgatcacacattttgtgtgtaatccgttgcttaatcatgctctgtatttgcttttgtcacgaaacattaattcacaaaacatttttctcacgaacacgcaatgggattgcacgtcaatatataaacagagtttttattacacaacccaaccagccagacagtcgttacggggaccaggaaaaaaaaagaaagaagcagaaaaaactgctagagtaaaaaactacaaaagaaaaggtgttgctcctatatatagaacggaggatggcggtggagccccattacacttccaacaaaccctcaaaaacagcagtgccggcgaaagaccacaaacgaaagagagtaatcgaaaaccctgaagtttcgctccttctacaactgtcaaagagatcaagaggatagggagtcgaaacacacggtcgaggaggataaagttggcatggacccaattgcagcccaactagacagcccaaaatactttggagcacgggctagatttgttgtcctcaagaatgtgtgcataataataacatggagttaattaaggggtttcattttctcataatcccttcatccgtgattactttccagttgcagcgtacgtaggtattgttcacatactcattaatattgtgattagaaaattcatcttgttcaaatataattaataacaatgtaagctcaataaacctcaaagtacaggggtaactgcgaaagagcatgtaaactagtggttacaaaagtcttagtagcatcttaagtcctgagttcgactccttgggagtaattttttcagaatttaacgactttgtgatttcagtggtaggcgacagataagcgagacacctatggtgacttcgtcaatctctaggatggatttgcaacccgaaataacttcagagtctaactataggtagagatgccaaatcgatgaaaaatgaagaaatcggcgaaggattaaaaaattgatctagaaatgcagagaagagattaagaatctctgatatactgatacaatgattaaaatttcaggctatgtgggtattaagtaggttatgcatctgagtcattttcgcgggaattctagtaccgtgggttgtttaattagcttgcagcggaatcacatgcatcctattttttttatcaaaattcatacacacttgtgccaattttttcatatagtatacatatatatatatatatatatatatatatatatatatatatatcttgaaatctcgaggcaaataagcttgctcaagcaaatatatatacttggacaaatcgctactccctccgtcccaaaataaatatagttttgcattgttcatgtccaacgcttgaccactcgtcttatttaaaatttttttatgattagtattttttgttattattagatgataaaacatgaatattactttatatgtgactattttttatttttaaaaataagatggatagtcaaacattggataaagaaacccacggatgcgcttattcttggagaggggtagtattataatttaattatcaccactatatatacatatatatacattgacaatcattttgtacatgacatttttacacaccatatgtccatttatatcaagatattcgattacaagacatgttcatgcatcaattgtgatgttaattatgacgtatatacactatatacaacagatgcaattccatattgtatctttcaacacacacaagtatattaattacatacaagtagctagagatcgatcaccattatttcctggattcatatatataaatccttagtcctgcagtaagtagaaaataatagtctatatatatgtttgatacagttcgccgtcgctctacttttcgtcatcatcgccggccacccgacgccgccgcgttcagaagaggaacgccgccggcgcaaacgccggcatggacaccgccgtctcgatgtgcctgggctcatacacacacacaatccatggatcatcagaagcttgcaaatcatcaatggcgagatagagagagagagaaatctggagagagattgcatgtaataacgtagctagctacctgtattcatcgctgtgtgcgcgaggaataaccctgtcggcttcgcggtcggcgaaccgtccgtctctggcgtcgacgggacgacgtagtttgactcttacggcgtcgtcggcgccggcggcgctgtactcctcgtagatgtcaccaactaaggggctccgctgcgtcgaaccgccaaggaacctggccctcctccgccgcctcctggcggcggcgcctctgtcgccggcggtctccgccgacagcgcggcggtcggcgcgtcgtcgattggtccagcacggcagccgcagggcacgaacgacaggagcctcatcagcttcctgcgcaccctcccctcaatcttgccctccctctcactctctctagaagctctctactctcttaagctttctctctctagctagctaggctttctctctctagaaagagagagagatgtatgctcctatttacaggaatgcccgagtggccagaggctagctacctggacctggagtgtgtgacatgtaaggggtgggagatttatagggtttgcggatgtggcgaatgactgaaatgtcccggggtcggggtctagttcaagggtataccttcagaaagcgagatgggacgaatgccatgcacggaagggagattgtttttctttttggaggaaactgtgtgtaaaaaagcttagttgtcgatgttgatatctagctaggtgttttcttcatttgcgtggtgcatgtatgcgcacctcgtcaagtggctgatggttaggcgtagaggaagtggtgtatcacgtctttgtaccaagcatatagtacaaatgtgtgtgcattattgtggagattgtaggttcgaatatatatgttagcattgtttctacgaacgtatgtgtgtagaaagcaccagggtttctctgttactctcctttctccaaaatactactaccgtcctaaaatataaacttttgacttgtccagatttatagctaaaaatacttatattttaagacggagagagtagttatctttctaggatttaaaatgtgttttaaaatatttattactatatagtactacttgtctcatcaaacgtcaacatttaaatttctttacgttctaccccagccactttgaataagacgaatcatcaaatgttacatggaaatcaacaacatcacgtcttttgggatggaggtagtaacaaattattcatgagaatttttttcttccacgattgaaattcatttcttcctaatccagcctagatggcatactaacattttctgagagccccttccaaaagccagacctaacaaagaacagcatgatatctatatagaacgatcattttttttaaggataatcatgtgcatgcaatgcaatgtccggttgtttttagtcaccgttagacacatttattatagcaaacatttattagaagataataaacggatactggattattattagttgacagaggcagcagagagaatcgcaagcaacaaaggcgtcgctagcatcacacgttgcgcgacgcgatggcttccctgcgtcgccgggcatctcaccgtcatgtctagtctgcatctacttacccgtgagagcaacccctgtggcaaccattcatggcaagctcaggcctcaagccctccaagactcctcccaatgatcgtatcgtcgtcgacctccatcacctgattggtgctgaagaccgacgaccgatgaatcggatcctgatcatgtggatgatcagaatccgattccttcatcctcgcatttgttacaaaggagggttttccacgtaaatcttcgtggtcaggttaatcgcgacgacaaggactgtagatggagctctacctcaggaactgtagatgcttcggtgtacaagtggtcagatattatgctgccacgagcgatcctgatcatgtggatgatcaaaatccgattcctccatcctcgcattagttatagaggaggattttccacgtaaatctccgtagtcaggttaatctcgacaaggacgatagatggagctccgcctcaggaactatagatgctcagcttgggtgtacaagtggtgagatattgtgctgccacgagcgcgcaatggcgaggcgtcgccgtcggtggtgttaacgatggcggtcgccgcccgacgccgcgacggcggccatgggaacgcgtgaggaggcgccgcccaaagaggggaagcatccattgttacaggtgggcaaatcagcaatggtaagaagaagaggcagtcatgaacagtgtagctgcatcagctggcaccaccaaaaacaactcatgatccaggcaataactccgaaaataatgcacaactgaa

SEQ ID NO: 10555 - DNA, 1105 bp, Oryza sativa
atggagtgcgaaagatgtgttcttgggatcctttttctgattattcccttcccgccctgttcttcgtggaggggtgtgtgttcttgaattcagcaatgcgcgactgcgcgtgttcttaggttgtactatgatatatatcggttcttgaattcgcttgtggacgaattcgtcggattgttagtggagcactcacttctgcaccaaaaattgtgcagaagttactttttttttcttgtccatgatggagtctgttagactgcatcggaatggggtacttctggaatttgtttgtgattatatcgattctttgctcactagtaaaatgcaaccttttttgttttgttctaattttgcctgctgcttactgctgcaccaaaagcaaaaggaacggcctttgagtcctgacaagatgtgcttcccattgttgttgtttgtttcatacgcatggtgaaggtatacacttgtttgtgtgacattgtctgtttgttgcttttggatggttcttcatgatgttatcaatcttgtctgaacatccttctgcgatagctgggtggttttgcaaaacagaagtatatatatgttcttttttttcactctatttgtattcatgaattttgcattttgtaggtactactccatgtatggccatgttgcaaagctagcagaggagatcgagaaaggtgcttcttcagttgaaggagttgaggtcaagctatggcaggttgtaccatgaaagtgattttgtgctttacctagagttatgattacccgcatgttttgtttaacatgttgataaaattatcatatgactaggtcccagagactctttctgatgatgtgctcaccaagatgggtgctccttcaaagaaagatgttcccataatcacacccgcagagcttgccgaggctgatggtgtcatctttgggttcccaactagatttggaatgatggctgctcaattcaaagcattcatggatgctaccggtgggctgtggaggacacagcagctcgcaggcaagcccgcgggaattttctactctactggttcccagggtggtggccaagaaactactccgtaagacgcttccaaattatgctgaaatt

SEQ ID NO: 10556 - DNA, 11770 bp, Oryza sativa
aaaccaccaccacaatcccgttttctcgacgaacatccgtactacccgaaccacccggagaaagaaaaaaaaatgctgaaaaaggaaaaggttggggagctcacactatgtagatcttggcggccatatcgaagcagaattctggagattggaatcggtggaaagaagggagctgggattgcgatgtgggaggaaggagggaggacttggggcatttatagctgtggggagaggtcttcgccatgtccatttgggtctaaattaaatctcatttaattcattttttgaggcaaaaagtcatttaattctacccgtataaaaaaactcatttaattccttctctttttttcaccgatgtattttgggttatcaattaggagtactccctcctttcaaaaaatattattaagataagatttagtcaaacttttatgatttattatcgattttgtatcagaataaatctacgtatatatattttaactctacatttaaattttttttgatgtttgggattctaaaagctctatcaaattttgccctaatcgatatttatgatcaaatgaaattacttttactccaaaaaatactttatattgttaaaattgtctttgtttttttaattcccttgtgtttgatataactgtaataaaattacacgatctttaaaaaaaatactctagacgtcgtgtaatatggtaatattgtattttgtagcacgaaaaatgtccatatgtgatttgatcatctgaagaaacaaatggttttttttctcctttttgcaaggattttccaagcaataatatgcaatactatatggcagtactcctacgcaattgtgcacataactttagcttgtctttccaacccagaaaaaaaaactttagcttgtctctaaatacctttataatactatttaccaccgtttgtcacgtttgccatgttgaacaattttatatcaagatcaaaaaaaaagagaaaaagaatcttcattgagatttacgacaagtaaataaagattacgatgacacaccagatgccaaacatttggaaaaaaagttgcattaaaaagcataaaacacgagatgcttggaatataagagcaattggagaaaacttttggaatgaataatcatgttgaaagggaatcatgttacatgataaatagctcaatggtgtgatatgctatgcatttgtctaatgttttacgaagtataaactttttaaagtttagtcaaaggatacaaaatgtgaaaattctcaaaataaaatttaggttaaatacttgctagcaactgtagtaactgatgtgtatagctgttcatttaaactactatgacaaactaataaaatcgtagtagtacaacagtatccataacaattggttgtagtttcttttaaagtaaatatcagaatgaattctattatcaaagaaaataaacatgtaacctgcagcattgcacggatgtaagacattgtcaatatttgtcccttaccgcgcaagggaaaatgaattgcgcctcccttgtacccagattctacaaaataacaatagatatcactacttatttagcaacgaaatgcaaacataaattaaaattgtggtattctgatggttgaagcatgatcgatgggcaagggagaaggatgtgcatgcatgtcaaaacttacataaatttagattttagttggcaacgaccaattaaacagagaaactgaactttgtagctactccctccgtttcacaatgtaagtcatcctaatattttccacattcatattgatcataatatatctagacatatatatccatttagattcattaatatatatatatgaatgtgagaaatgttagaatgttatattgtgaaacggaggaagtagtcagcaaagtcagcatggaactacggccggctggccggcggcgagctgccgcaatccgtgaatccgtgatggccatttcagtcttcagaagacgaatacaaaggcatggagactacacaccggctgcctacttgactttgtcagttacatgagacaaatgtgtatatggagtagtccctgatccgtaagagctacgtataagcatcacctgacttttatttgctaactatgatgccacgtaagtgctacgtacatgttacgtggaacggggactgagtcagcaagcaaacagaggttgatccagacaaagctttaggttaagtcctcttttctatcaatgtaagacatttttttagagaggcaaagggcaagtgctatgatagatgtgactaccacctccaaatttattcatatcattcactcataatctaggaaaagggtatgtggttgcagtgacttgagtaacatcttaaggttctaagttcaaatctccataggagcgaatttcatgttgggttatttgagctccaccctcaagttcccatggtacaagtaccgacagtggaggctcgagccctccaccctcatgatagatctgctcctaccataaaaatgacatgtatcaaataaatagaaggtgtgagacttcgaactcaaaccggctagcccaccaccttatggagctagcccaaaaaccctagaggtttctcgcaacagatccgctcctatcatcaagccatatatgagcacacattagtcgaagctgttatcaaatactgttgatgggcttgatttgaaccggttttagaaggtatgggacgctttatacccgattagttaagggatgtgataaaatccccatggttgaggggcctaaactagactttttccttgttatagataggagtagctctagtcttttccggtccaaatatctggtggtaggacttctaattaggcccaaataatttggtgagcccacttcccatttatatttttatacgtgatatattgttgggtgggaacagatgatttttttttcattttctaagattcttttgagaaaagttagaaatagtcatccgtataacttgttattccactttcctttatatttgccaccaagcactattcatatttaaactttgatcattcatcttattttaaaaataaaattctaaacacgtgaatagatatcatattatcaaagtgtctcatacttaaaaattcattataatataatcattgaaaaattattggtggtccaagttgcaacagcaacagtcaacagtgatatactctctccgtcttataaaaaataaatatagctagtacgggatgtggtacattctagtactgtctcgtagtattaggatatgccccagtagatccgttgttttataggacgaggaagtataaattaacggatgtactaccaggctgataccactaccctaacctggtaatgccaatgtcccccaacactgtcatgaacaatgtgtcataaatcacaagtggatgagtttcctctgcagcaacgctttctgacgttgatcaaagacatgtggactcgcgggatatgcggtccacatgtcagacacttaaaatcagagggtggtactacaaaggatctatttctctcataaatagcttgcaacgtcatggtttttttccatgcggtagaattttccaacggagccattgtatttgttattgaaaaaggttcaggtttagatatgagttggaaagggaaaaatttttttattttacttttatctaagataaggttcggaacaaataattacctgaaatgctcttagtgcattccagatatattacattgcaaaaaaaaaaacgtggtacacatttaagtatgtaaaagagaaatgcagtgcacaattttcaatagcagtacaaatgatgcaattgaatgattaatttacacttgtcatttctgaaaaacaaagcagttgtacgaagtagtagcaaataattcaattgacatcttatgataaaagtagatacatcgctacattgaaaatacatacccccgttctcaaataaaagcatttttagactatccagattaatattattgaggagaaagatttctttttaatcacatcattagttaaattttgaattactcaaattccctttctaagtttctaattggttaaaaacacttggatttttgcgcataaattctaatttatagaaatatatatttttttgaaagtacaagagtgcactacatcacactcctcctgaatgggagagagagagagatgtgattgcttgcattgttagtaggaggtgtgcatcttccttctctgaacatccagcccgacacaaatcgcattagcagtaaattttggcacggagaaaaatcagagcttgtgaagttgagtgaaagaaacactacaattaaaaggcacacgtggacaataatactatacatcagcctcacctaatcacagttggttgacgtttttatcgatcatcactgctttactaatcaactagctgatgactagtcaacaatcagctagcagtcccgtgtcctaagtagattctgttcaatgtctctttgcgcaagttaagagaagaacatttgactacgactgaaaagaaacctgctctgcaaaactatctagaacagtttgtatttatatgggaagatattagtaatttaaccttgaaagtgcttgcattgttgaacacctactaaaggatgcgagaatcaggggcggagctagacaagagtggaggggggtgcaccactatagtagcaatttttttttctcaaactacttcctccgtttcacaatgtaagtcattctagcattttccatattcatattgatgtttagattcataacatcaatatgaatgtggaaaatgctagaataacttacattgtgaaacggagggagtatattattgtaaattataatgttttcgtgtattatcaccatcaacggttcaacataagtaacaatggagtcaggttaataatacggagtagaatacttccttttattttagtcaagaatatttagtgtctaggataatacgttcagtcaaaattgtaagttctgaccatcaaatttcttaaatacttaactaaaaaataaaataaatggtagatttgtctccaaaagtataatcatccttgagctttatcatgcctcatctgctgactttcttttgcattgctagtattaacgagaggtttttttaaagaaattctccataaatgcacatctcatttttagtcatgcaacaatatttagataaaataaaagacaataactatacatactatcctaccatggttacattgcatcacagtatgtatatatattttctctccaacgaaaactattatcacgcaattcaaaactacctatctttcacatgagttcttccaatgaatcaaattaacttgtaaagaattatataaggggacgaaaggatagaggagattgcaaactgcaacgtaactcatgctgtggttatgggccgttcgtgtgcctcctgtggtctgttttctgatgtagggggttcactaagctgggagaaggggggtgcccatgcggtaagtaagggtattaagcactaatttttcttttttcgctagccgagtgcccaggaactccctaggatgtacttagcttcgccctggcgagaatgtgctttttggctgagattttgagggcgttcacagagcacctatatggtgttcaacctcaacaccaaaaaatgaatattcatcgcaacaccctccatctgcgcagcctcctcaagaccacatagccaacttgagccacgggttcctcatcagggtttgcaggtgaggccaacactcgtgctccgcaccatcagagaagagagagggaggagagatacctcgtcggccatcccgcgctctacatcgctgagtttgttgatcaggggaggagggtcgccgggcgctcgccgactcaatggggaaggcggcagggctggagaagctcgccgagcatgctccaccggtgaggaaagacgccttgtttcctccgcccaacgccgccggagaaaggagagcatcatcagagaggggaaaggccgccgacggggagagaggagcggcgccactgcggggcaggtcgcggcccccggcttcacgcggttgctcccgccgtctctccctcctgcgtcaaatccgtgccacgaagcgcttgcccttccttgctcccgccaccagaggttgtcgccgaggtgaggaggtgttggatggatgggcagcgtggaggggattaggtggggagagagattttatattactttcttgattttggatgttaactgcaaattttggaataccatgttaattgaaaaaacataaaagagactaaaatacaaaatgtctgtaagtcccaccatagaaatttttttaaaccacatcttgcatcctttgaagttgctaagcctacatggcagctgaggtctagcaaattgcttggacgcattgccattgcccttagcgaccggtgaaacgatacgaatgattaattgagatctttttcactacctaagttgttttgtaatggacagttcgattgtcactggtatgtgggacccccacgaaacaaatcaacaactgatgaccccacaaattgatcattgagcttgcataacccagacaaatgatagagagaagggggcgtagccccacgaggatggctccaaaagtctccaattgcaatccaatccaatccattgcatggcaaaattcgacacgtggcagtgattaagcaagaacagatcaagatccaaacacattgtgatcgaagtttgccggctagtatacacagtcccaagcttttatcatggaggagatgtgttcttggccaaccacctacaacctccaatttggcagcattccacttggctacaaaaaggttgtgatcatccatgcatgcattcagcatgacaaaggttaattaaattaaaagatggatagcatagcactattagtattagttagtttcaggtcaaactatctgtttggtgagtgactaagaatatggtaaaatgagttaagtgtggctcctcttgtgcttcttttcctactaattcaatgctgtgaatgcttgcaaagaaacagttgaggaaagaattagacacctacctaaaataactgaggcatgaccactaaggtttaagcttttgactcagaactggacactctaaaacaagaagaagacaatacatttcacaaaaccacgtatatttttacaaaaacgatcaaaactataggtttaaaacatcacatcataaaactataggtttagcgttgaacttatcccgaaactaattcaatctaaaatgttaaaaatacagttttaacgataaatttatttaaaattatattttgagaggttaaaacctacagtatcattttcataagctactaagagcaggtacaatagcagactataagcttactataaatatattttaaaaagataaaagaagagagaaaagagcagcgggctacagatctgtagccagctgcagcacagactacaaaacgtaatgtgtatatgacatgtggaaccaggtattaatagtatagtaagcaactattgtatgaattggctgttacattggctatagatggtttggagctagtagccggctatactattaaacttgctctaacaaacgctaaacatatagtttttcggtactatggcttaaggctgtaactttgtgatgaacttgatattataatttgcggttttgtaatattatggattaaagagtacatatatactcacacatatctagatttatagccaaaatatctttatatttagagctagagagagtagttttgttaataatgctagtagtttcatgaaatttactactactactcatcaaagaaataatagacatcaatgcccactgatcagaagaggtagggcacacaggatgaaggaacagactgaagagatggcacttttttttgtgcatgatcacttgagcataaatgcaaagcaatgctggggcctcaagacactgaggcaaactgtagctagagactcattgtatgcacctccttttgacaacatcctctctccgaaaaatcgatctattcgttgcccttgtccccttatgcctcttcttccactgctctcttctttgtttcttgttatcaccatcatcatcatcatcgcctgaatcagattccatgcatctcatgatgttcacatgcatatcagtccatgataattcagaaaacaggtttatactctttctttctcatgaaaaattcagactcagattcatcattcatggaggttttggcacttctcttccatggtcacaatctgttgaagacaattgttatgagtacatagtctttttttttgtttttttttcttgagtgaatggaatagagagatgaacagtcgccgacacggaggccccacacgacagtgacaagaggcgtcgcgggcattttcgacctaacagaaaaacattattgtttgttgttttgtgctgattgcagaagcttttggtgtctgaggatggtgcccacagtggtactagccattatactgaaagatggaccacttgtgttcttatgatgcaatgcaaacctatctcttcctgctactattccagtgttatgatggttttcctccaggagcattcaccattcaggagcagctttggagaaagcttacatgagagagcagttttcagaggaaaaaaaagattacataaaatagattcaaccaaactgatggaaccagccttaacttgatcctttgcaagatcaatgctaatgccacaagctttagttagcttggttgatagtgacagaacagttctttactgaacaatgagcatggttcatcttttccgattgagtgctggattctgaccctagcggtatgacgtttttcgtcaaattttactttttcaaatttgaattctcgaaaaccattcgacatttcacttggaacctacttttgcctcgtgtcgaaacctcaaaatttcgtgggttttgatcggttttcatgggaaaacataaaccctgacaatgagtgcaatgatgaacaacacaggagggagcaggcatacatagatttgccacagtccacaaccaagaagagcaccaaaatcaggaaaggaacaagtgcatttcaggaaacagctgccaatgtgcaatctgaaaaattaggtactccacacctgaaatggaggaggatccagtggatgagtacttctccaatctccatcctacacccccccagatgttgctacaaatgcaaaggactttctggtgatgatatcacatctcacaccattttctcattcagtctatgaacatgaataattgaattgaatacccccattgcacacttctgtactgaaaaagttgccaactaactctgccatatgtgcatggtcaaactgaacatggtactagcagtataatttcaacagctcggtcaaaaatggcgatcactgctactgccaaatcagttcagaaaaaagagtagtacatgaccatgaagaaaagctgctgcacatcacacagttgcatttcatcacctgaagcgattcagggccaggggttagctgatgatttgcatggtttgcaatctgcatgacttaatcctgtccacttaacaaaatctcaaaattagatccctgaaaccatttagcaatcaggccaatggacttttgttggcttagaacaagccatgcttccaaatggacataccaaccacctccaagaaaagtttgtggtcaaggtcaacccttatcttatggttgctaggtttccattcagacattgtcaacatcaaggccacatcaccactagatgatccactaagtttatttttctatgcacttctagataaaccaaggagctgtgcacatagcaaatcaacagaaaaatcgtacctttttgttgcacataaaggctaagtagctagcaattagcaaaagtaagggttgctaaatgctacaaaaacaatcaacaccttcccctgaatgacataggagaaacaaccaacataagctgctaatttcctaagctagttattgatcacatcgaatcttatgaagccccaccaccgctttgtcaccgactaatgagacaaatccgtgtctagaccttttcatacttaatcagatgtagaaattgcaagtttgttgacgttgcagaaactagaccatctaaaaaaaattttagggtgtccttgtcagataaaacaataagcaaagttgcatactagccactcacttgtttagcaactacagtgacacaagcaatctcgtcagtatctcatttcttggctacaaactgattgcatactgtttctccatgcaagagcatctgaaaattttatccaggactgatacagaagaacatataatttagaggagatatgttaccttgtcaaattctattagccacttcaacaaaaaacaggaactacagttagataatctagactaatttaaagtccatgatatcaagggaaatccacgagtatgatgtgagatctccaatggcaatttaatatgggaagcaaattggatgacactccttatttaattttgacgtggaaaacatagatagatgcacgaggtttaagtgcaccacttgaaaaaaaaaaaagaaaacaagcattatgtgatatgtcaaacctcacataacaaaaatatctgatgaagtataaatcaagcaaacacgaccagaagagtttgtgagcaagtgaaaaattgacaacttttgcgcttttctaataaattccacttcttatatcatatagcattacatcacaatccaaaggaggatgataagcagatacacacaatcgaaccctcatatcaacaacacaagattgtagtgaaaaatcataggaatttcacaggagacacttgagagcaaaaaagagatcacttgatcatgagatgtatcatatatcatacgacatttcagattggatgattttgggattcagaattcaatccagaacagaacaccacagaaggtctgggtgaaatgatgagaggaccatgtttttctaagcatatgaacaaaaaaaaaaggaactaaattctacttatttttttttcttcttcttcttcttcctttcgacgctgctaccacatgaaaagagaagggaaatgaacccaaccaaaaagaagagaagagtagaccccaaaaaaaggttcacctttgctgtttctacctttgtacaccgagcccaacaccgattcgaagaggcgccgaatcaaaattcgcacaaatttgatgtttggagtttggatgaaattcatcaaagcttctcgagcgtccgagctaattccaccgcgttcttggcaatcttgcagttgtcgtcgttgacgagagcctcgcagagatggaatgctccgagcttgatcgcctccctcgccaattggttgctctcgccgcagatcaagttgaggacgacgagcgcctgctcgatggcgcgcgcgttgccgctgccggcgacgccgacgagcacggcgacgacgcgggggatcctggacagctcgtggcgcccctcgcgggacttggcgaagaggccgagcacctcggcggcgcgcgcggagcccgcggcggcgaggtcgacgagcgcgggcgccgccccggcgcgcacggcgcggcgcctgttctccggcagcttgcagagctcgtacagcgccgtggcggcctcgcgccgctcccgcgcgccgccgccgcggcggaggaggccgaccagcgccgggacggccgaggggtgcgccccgatggtgcacttgttgacgtccaccgtggcgaggctggtgagcgccgtggcgg

SEQ ID NO: 10557 - DNA, 10074 bp, Oryza sativa
aaaataatgcacaactgaaaatctcaaatcaaagaaaggaataaaatgtgttcctgaaatgccagattgtgactgtaggtacaccagtgaagacgccggcatcaagaggaaattagtactgcatctagggcacaggtgtaccaatggtgagaaaaaaagacagggagatgcacagttgcaaaaccacatctggcaagaaaaggataattgcaaaatcaaatgaagtacaagaacagagcgcaatatgtaacaagtgcatgcactgttgatcacgaatgaattgcactctgcacagatcagcttcaccgtcgctgtcagcagatcaggattttgatcaaggaaaattcagttgtaccttgtcatgtataaacgtgttattctgagcaacgagtcattatccagtacatgagcagcacatgccaccagctgataagggctacgacaattcaaatgaaagggtgactccaacacaaccagcacctcatgagtcaggacaagcaagacatgggggtcattattagcaaaggtttgaagctgttcgtgtcctgttgcgcgttgatagtaatattgtttggtccatattcagtttgacaagtgcttctccatgcggaaaccatgggatgcaagcaaacgaccactccaacacgataagaatattggatcggaaactctgttcacacctggaacaatatggtatagcgataaactaaatatagaatcaataacttgtcgatccgctgtgagccccacggccagatagagggccccaagattgtatcttcatctactgtgcaccccaggaactggatggagggccccatgatttgtgtggctgtgagttcatttctggttcctgcggtggtgttctgggtctagcatattcagcaaaaataacccatccatcgagaaactgcatagaagcagagatatatcagaaaaaacctgtgcattatgatatactgcagcaaggctctaaaaagaagcccaaaatggtcaatgatattttcaccagttgctttcagagtatctaaccacaccaaataaacgcttcattttattttcactatggtagaaattagtagactgaaaaaataaataaataattgagagctcagccattcaagaaagcataaattatagcatgagggtcatgtgggcaatagttagtgtatcacatacgtaattttcttacattatgtgtgaagtattgctttggtgccacaagaattcaagaatgaattaagaaaaatatggagtatcattgctaatgaggaaacatacagagtaaaatattttagtatctaaatataaagcaaaaataaaaacaagataccagaatgcaaatttgtattaagattctaaagacagtgcagaaccaccagttcacgatttttgttgaagaaatcagtccaagcatgtctgagtacggttcatgatttgccagttgcaacgaagcaacacaagtcacaagtcacagcgataacatgtaagaaaacaatgtaactattatacttgagcattaaaaggttagcgtataccttaaaaattaccacagaaatttatcaagatatccagcatctagcacaatacaagctatatgaaatgagtgcatgaggctgatatctgtgttcttaagaatcttgcacatagtaattctggattattcacacataattatttttaaaataatgaacatttttttttgcatttttgttcttcagagatgagcacaacaagaaagaatgtgtgcaaaatatatcagagttgaattgtggtgagaccttaggtagttagcaaattgtgctaccaatatcataataaaaaaaacttacacatgaacttgaaaagtggtaacacatgccctgtctgcttgtgcaaaacacaaagagtaaacctgagtgaccacgatgctctcaatttcaatctcaggataaaatgtccagaaaaatgtgatgcctatgatgtccaccccatagcatgtccaagttattaaatagtactactatagtattgcacaacgaacatacgctcacagtttctggtcaactaggatgcaaatatctatacttcggtactgtcaaaatgagatacctgaataattctacaacatatttagtttgaaatagtctgttgacaaagggtgcctaagcaggctccctgggctctacctacctctccaacttgtcctgctttctctgaattccacataatcaaatcaattctgtgtatatattaactgcctatgctccaatacaaaactagctttcttactgtttccgcctttccagtggcagccagtgaaattaggcagttcttgtattaaaatttttaaaatgaggcataacaagtagagaggtaaggtcatatattctgcttattgcatcatgggaactgatcattatataaacagtgagagttcaacacaagagaattgaggaaaaaacaacaaatcctaacaacaaaaatgatatgaaagtatgaaacatacctttccatccattccttctattcctttagctgcatcctcaactgtagcataccttacgaagccaaaccccttagagaatccagtgacacgatctgtgacaactcgagctgcaatttgaaatcagattgaaatagaactcagtgtcttgaaatacaaaggatgaaaggaatggctgcattttaagcaaacataccatgtatgacttccccaaactttgcaaaagcttctttaagcccatctgttgttgtacgcttgcttaagcctgcaaacaaggatgctaagatgggagtccagagattgtgtgcaacaaggctcaacatgcaaggaagcatccaaaatggaacaacattattgaactttaaattgtaagacggtaaaacagggaactggtgctagctttaagtaggtccgataataatatggagtacaagctcagaaagcttgcacacattttgtcactacagataaggaatttaggtcagagcaccataagtagacaaaatttaaataatgtttattaagtgattgtccatttcctcagttcccgcagtgaatttccttgtgtcgagcatgtagaatcaagcaagcagcaagtgtggaaaacgccgaagacctgagcttattgggcatggactcaattgttcgtaaaactaattgaatcaagttccatgaacagaaggtggaggggtacgacgtttgctatcataatctgaaccagcaaatccagcaataggtctctttcaacctaggctgatgtacagctggttcatcagtcattccaccggcgtcctagatccgtcctatatcctatatcctccactaagtaacaaactaatatatagaggagcagtcagtataaagttacatctagaaacatcaaaagattatactaacttcacaacatatcagtatccactatatgtcttactaccatatgatcttatctcccctgattttgctcatacgaatcaagcagcccaaatccatcagacattgaattagtactaacaacatatatatacatactagtatactctaatgttgcttttgaccgcccaaaagtgcaaccaccatgagatcctctaaattaagccatcctagatcatccacacgaccgaatcgggtacggcaacgcaacgggagcacttctacggccgccgcccaagaagagggagagagagagagaaagtgaggcgtacctgagatgaagaggttgggggaggggtcggccttcgggggcggggtggccggcttgggcggggagaaggccgagatggagaacatgcgccggaatccggacctcgccgtagccgccgccgccatcgccgccgccggatttcgaaggtgaggtgagaagctagggatttgcttcctctctcttctttggggtttatgggtttaggtcatgggctgaattgactataatgcccttctctgacactagtattagcggcgagattattatgataatgattgaaaatttgtttctgttgggggaaaaaatctcctcagatgaatttgcagtctgacatgatgtgttgcaatttgcggttataacaatttgataatcaagatgagatttagtcaaatgtttgaaatttttaacattgaatacctctcaaaggttatagttaaaaatggcacgagtagattttgtcttgaaaggtagagtagtgtcataatatcatagatttcaaaaattttgtctatgggtttaggtcatggggctggaatgactataatgcccttctattgatagtagtgttaacaacgatattacttaaataattgaaaattttgtttcttttgaaaaaaaatcctcacatgaattcgcaagttaacaacatattttgattagatactccattcgattgtatacatttgacatttaagataaaatttgatcaaacatttaaaactttgacaactgaatacctctcaaatgtttattttttaaaaaagaagtaaaatggtatagtatattgtcttaaaaggtagagtagtatcataatatcataagcttattagattttataaatctgttttgatataatattgatgattaaagttttaaaagtttgactatttttttctcctaagcattaaatatttataaccagaaggagaagcgttttagcaatttttttgtttcttttatttgaaacttgtaaataaaaatctatttgcagctttgaacttttgagataaacggagagctctggactacaaactaggacattttacatgtttaaagcttccgctatctctctcttggacgaaaaccacattcatttcggttacatgtcatctacacgtcactataatttgccatctcatcacagccttggagatcatgtgggctaccatttcaactgaagaatatttaagtactaataaagacagcaatgaagaaggcataaccatattatattgaagtatgacaattcactcatcacatccacacagcaacagcttttcaatctcacttcgattcaatggtcatcccaaattgcaagtctcaggctctgagcagaacaaatgccaatacaaaggccaaaaaatcaacttcagttcaagaaaactcacatggataaggatcaagaaattccacacacaaaccagcaacacaactactaggtagcagggtaacacaagaaaaatatcactagatatttgagacagtaacattcttagatagatcagaatttccgtcttttgtcacattcagaggtcatagtccacccaaaatatcaagaatgatgatgatccacatgatccaaaattccaaatgcagcctgcatgaatcgcttgcacagctctggatgatattttgggttgaggatagatttgtctgtcagagctttcccgtatgcgacgccaagtggtagaattagctagtaagcaagttctttctttccattacgtggatgagtgcctgcaaaactgacctaataaggattttagatcaattacacaacaatctatagctaagggttgtttttttggattgcatttctacctcatgaagaagaggctgactcaggctgagcagtctgcggccttggtctcctgcttgctgggggtccatctcttcgcctttcataccgtctgctttcatatttggatgtcctccgctcttttggttggtaggttgggtaagtgcatggaattatctctccgtttatgtatttatcacctgaattgtgaaaggattgagattttttatttaagaagcaacaactaattgattatgcaaataaccagctgcagacaataatgttgaactaacccccgtagtctttgttcttgacatcgatgtaggaatcaggaagcacccacagaacgccgggtaaacctacaggtaatagaacaatagtttgaaccagggcaatccaaaaatgtttagacttggttaaatactgaggcaaccagtatattagcaaatacccttgaacttctctgatgtttcctcgtcgacagtgcactggaaaccagtgtaggtggttgtgctgaaggcatacatgttcttcttggcttcctccatgctgtgattgcaaacatatgctcagtatcaagaaaatgaactaaaggcagaaaattacaaaactgtaggcctggtttatagtatagcaatgctgatttcagacatagcaccgatgataacttcaccaacgtgcagtgaccagcaaagaatacctaaacaaataatcaaccattccttgtgtttacgcaagaaattttaatccttgtgaatcgtcaagcataaactgtgcaacatatagacatgtctaccaatctactacacacttgtttcttcaacaaattatcatgcaaaatttgcaaccacctatagaatgtaaagcttttttacattttaccaaaaacgtgcgctccaattaaaatttcgactatcataatttacaatcgaaacaaaatttattatgtttgagtgaagcatgaaacaaacatttctctcgagattactctaccgacttagtcagtcagtcagtcagtccttgcaaattggcaaccaaactaggtgagtcaaagagaggtggagatcttgacaatgaggatgagaaattttacataattatacctgccaaggacggtggcgagggtgttgaggtaggtgtcgatcatctgctcccgcgtcggggcggggtccttggggaactccatcacgatcagccagtggttgtagtcgcacccggggagcagtatcgtctccctctgctcgctccccgtccccgcccccgccgccgcggccaccaccggctgcctcgccttcccgcttcctcgcacagccagcgtcgggaacgccgccgccgcggcggtgcgggggaagagcgcggatggtgcggcggcggaggaggatggcttcggcgcgagggcgaaggcgaatgcctgcgcggcggcggcggcggcggtggtcgggaaggaagccatgggaggaggcgcaagagtggggagagggagaggtttacgagtttggggataaggtgggaagaagaagaagagaataaaaagggagaagaagatattttttttgtgagggtttttagcctcctctttagtgggccgggccgggccgggccattttcggcgtggatttatgggctgtaatgtgtgggctcagatgggcttatggaggcccaattgtgacggtgatggaataagtccctcattattagatccaatcggtttttttttggttaaccaatcacttttcgggttttttttcaggcgaggtggctatctgtttttattagcggccagaagaataattaggctaaaaattaggatacattatgagaaataaaacttcttagaagagaagcaaatgaaacactttcattaaaaaattctcgaattaggatacattattagaaaatgaaactttcttagaagagaagcaaatgaaacactttcataaaaaaaattctcggcacttttaaatggcgatttagcttcctgtagcaatgacatgtttgatcatgcaagattactgatatgtaggtcagaggaggataaatactcatcttagaatcttggatcaaaatttacaattataagatcactggtgccacaaaagtgacagaaatataaaacttaaacataaattacagaaatgtagctgttgaattccatctctttttgtgtgtgtgtgtgcgcgctctataaacaatcagcagtgtttcaaaagcaaaatgggtctgcagaaatgtgtcggcaactgagcaaccacacattcaccatgatgaccaagaacaaaaaaagggcagcaacccgaagtgaatggcagaaaacactagagatgatgttcaactttcaagcagtgagaagtcaaaagcatttgacccattcactacaaatcagagatgcaacaaaatgcacattcatttcaggaaaaagaaaaaaaaacatgccgtctctgtcggtgcagaaagtttaagggttcaagggaaagtgtattcatccctcgagcggatatccccttgtatctaaatagtcatcaaagtgcacagcgttcagtagtgaacacttgacactagcagcttcaaaagaaatgcttaacaataagctagtgccatcagctttaccatcctgagtggaggtccattccattctgaaaacttttggtcctgtgcatccagtcaaacacattcagttattggattctgaaaaacaagaaaaaacatattgctgattcctttctttgctgttccaaggatgcaggcttctggtgcctttgtatgtgagattcttgcatttagttgcaggtttgcagctatcatcaacacaagtggctgtgcatgtatggggactttgacatggtgcaccaactcttccttccatctccatctgcttgactcaccatatacatcatagacataaacagtaaattaagctggaagttgcaggattgcatagtgaaggaaatgacaacagaaatgaggtcatgcaggcctccaaatagctaggctacaaaaagagtcactcaatatgcactcaatcatgccaaatcatgcctatagctttcataaaccaaccttcttgcaaaagtaaaggcttctcttgtctttccccttctctggtgggagtctagaaatcttttaaagtttctagtgaatatatggtgctgcactgacagatcttcttttaatttggtacgcaacattcatctttagcggtatggcatggatagaattaaagcttttatggttttattttgtagagtggttttcatgatttcatcatattagtggtttccaaatgatacttctcctatagtcaaatcctggtgaaaatcagctcttcccagcacttttactacagtccttaatcctggttaattcaaacaaaattggcttgacctttaacaacatttttttttaaaaaaaaaactatcatctgactccatttttaggtaagaaatgagtcctccaagggattcaatttctagtaaacattctttttaatctcttaacgcaacacaagttctctgtttgatgcttctagattgtttaacaacaatagtttgttaagaatctatggtaatctatgtcaaacttttcctttggagagctttaatattgaaagaaaaacatgaatcacaagaaatgtcatgtgtcttcaccagaaagggaacaggggacaattgagttcaccaaccatagaacaatttgtagtacctttctaattgaaaagaaaaggcagcttcttctagattgaaaatgaccatgtcctgcttctggttcaacatccagctactccttccatctcatgaaagataagttcgaggcatcaaacgagtgcgctgtggaactttaagggatgatcagattatacagcataacaagatagatgtgactagtgtttaagaacacactatataacatgattgcttcaccaattttctatattaattggtaatgtaagtaattgatctacatacatgcctgaaaattagtaatttaattgtgccactcaaatggtacggaaactagtcacctttcatgtactgaaaatgataggaccaaaagatactcacagaacttaagaaaagtaaccgtccaatttcatcaagcaaatccatggcaaaatattcataaaagaaaacaatatagaagaaatagagcatgtccacatgatgccagcatgtttcatgctagaaagcagtaaagcaggaaaaggtatgggatcacatatatcatggcaaagtattgggcaacaacccaaattacattccaatggcactctgaggtaaaataacaaactatcaactttagagctgaaactttattccatatggatgatcagactcaaacattgtctaggtgatcatgcggaacccttgagtttcttcgcaattccagcaaagtacttcccttggtggaaggcttgttgcagctcaagctcagtggcaacccttgatccatcaccagcgaatgtgccagacccgtacgggcttccgcccttcacttgctccatctcaaacatcccagcaccaaaggtgtaccctactggaacaaagatcatgccatgatgcactagctgagtaattgctgtcaacctacaagatg

SEQ ID NO: 10558 - DNA, 7348 bp, Oryza sativa
  unsure (1)..(7348): unsure at all n locations
gtgctctgatggggcaggctttgggcggggcgctgcgccgcctcgggcgccgccggggcggcgatcccgccgccgcgctgctccgttgcggggtcgtcccctcgtcgtcatcatattctgctccggggacgctgctcccgctgaaacaaccggtgggggattgcgggggctgccgccggagcttcagctcgtccgcttgggtgggttcccgcctgtggcgcagtctgcatcggcgtcagagcgcgggggccgcggccacggccacggcttgggaggcgcaccactcgacgaggtgaggtagagtagctagctagtggctgcttggcgaagggctgcgcattttaattcctcatttcatttctacatttcgttttctggtgctgatgtatttcatatcttgttggtttgcctctgtccaggaagagctccatggcaacagtatcaagtgagcctgacacatctgcttcacagtctgaaatcctacatttcatcaaatccacctttgggacacttgaaggtataccatgcaattgtttagtggagaataaaccaaaaaaaaaaaaaacaaaccaaaatcgttatagaggatgttgcattgttgcaaatggctagcttgtttctgttaagatttgcaatgttgttaatattcatgtgccaaaaaaaatcataaatttccttctagttaccatgttttcccacctgaaccgtttgcattgtttgtgaagaggctgttctgttctaacgtacaagagtgtaatgattttcatcgttatttattatgtttcgtccaagttcttccaaagctgaaatgaacttgcgtctggtacaggaatagtgctagcctttgcttgtagatgcgagtaaatgtgctgctccttattcctgaggattaattccttggtataacctacaatttattgatgcagggcaaaaccattgttggttgaactgcatgaatgacacctggaagaccctcaatcaaggagtataccttatccttttatatgaatcttgtggaacatcagacagccatggaaaactttcatctgcttttcaaagattgaagtatcttcaacagaggtatttatgtaaggcatgctggttttctagcctgacaaaatctggaacttgttttaactcctccccttcttaggtatccacgtctgactgttttcgctatggagtatgggagtgatattagttccctacaaagccaaacagttcatacagtaatgaaggagtactttacttttcctatcttgatgtcagataaagactttacacatgtaaggcacataacctcgaaatcttagtagtactatagaagtttgaaaatgttttcatgatcaataagcgttcgtgaatggtgaatttgtgatgcataaataactgtattccacttttcgttgatgcctttggtgtatttttattgcattttaacctggagatttcacctatatatattctacaaatatgttatgcacatttggtatattcaattttggcagtgttagactcagtttcaagagctctctaatcatgtctctgttaaaattgaagaccttgtgttgcattttcttgtattaaatactttgttgaaacaagaatgtcctttcatgagtgttcagattacaaatggtgcttgctgcttgctatttgaaggttctaaggatcatgccctcttctcaaatttggatgaagagcttgaggttttgatcaagggtaaaaacaaaacatagctggctatatttataatgttataaattatgtcttgtctaaattttctgttctcttgaacttttctgctgtgtttttgtgcttagtttgatgctcatcatttgttaagcctgcaaatctttattgaaagcaggcatggacaatgctgtcttgaaagctgaaccttctgacactgctttagaatcaagagtttcttggcaaaaagaagaggttcctaaagaaccgtatgttggttctgtaagaaatttgttactataccatcctggtacttacttgtcacctttttctggcatataattttctacttaaacatcaatattgcagcctaattctatgaaattgatgacatgttttttcccatttaatccagaagttgtaaatactcaaatagtcaacttaatgtgctgtagcttgcatatcggttgatgaagatggagatcgcattttcatctcagacagtaaccaccatagggtcatcattagcaacagcaatgggactattttagattatgtatgtatgactttctgtttcagttgggtttaaatcttatctgcacagagtgtaggactgcagccatgcaggatgataattgtatttgcccttttcagattggatgctcccctggctttgaggatggtgaatttgaatctgccaagttcttgcgccctgctgcatcattttataatactgctgaagattgtctgtatattgtagattcagaggtaattattcacagtagaatcaattccttttttttctctacatgagaagtatgctcttttcagtagcgatagttttcttgagtactgtgtattcaattatccgtaggtcttgtttgcatattacaccttctacttctttccttgtcctttaccttggataatttacaactacacatgtactaatgcatcgcattcaaaccatactgcctgattcttgttcagaaccacgcagttagaaaagcagatttgggaaggaggatgttagagaccgtttatccagtctccagtaaaagtagcagtggcatctggagttggattgttgataagctaggcttgagacgggaagatgctccaagtgaaaatttcattgcagattcaatagcatttccatggcatttgctaaatattacagaagatgacttcttagtagcagaccgcaagtatgcacaacttctcgccccctacacgttgaccttctttaaatatcaattggattaatttgtctctctcacaatggctatagccatttgcatctaatttaacttattttcaattttctgcaccttttctatgttagattgtcattcgtttgggggttgacatgttgtgcatgtacagtccagtcagatcccagttttagttccatatcgataatggagctcaataatggttctgtggatgcttgctggctattcttttgatcaagtgtgacaagaagatgcttctttcgggaatgcagaacaacattcttcttaagagacttttcttgttcatggtgaacctatagtttttacaagaaatattttaccatctatggctgtgcttaaataaactattgaagtgcttaattcagtaaagctgcactactttcttggtttttaactttttatatggcatgcacacacaatatactgtgcgtcagttataggtggttcctgtttcggacatattatcttgatgatttgctaagaaatgtttcttagttcttatattactgttgtttgcagctttgaagcatcatggatcttgagtgtatcaactggtcaaaaacaggaaattggaagaggtcagtgaattcctttttttggtatgtcagatttaaatttccctagctcattgaagagttaaagtcttgtgaaggtatagctgaagaaatggagtcatatcagcaaataatacatgaaagatgtgctctcctgaaggatatgaacatgaattggtcgtcaagtgctaaagagcattctgatctgttggggaagatcccgttcaaggaacttgtctcgtctgttgcaagatttcagaagtacattatcttctgtgatgcaggttgatctataagctattattgatgttaagacttgattttctgtcaaattatataataaatggttccaatttatttcctttctgtgaagatggtcaaagggttttgaagcatgacttggataccaatggcacctcaaatattcaattttcgaattttggggtccttgggttgccgtattggtttgtttgccatctcgagagagtatcaaccaggtaagctgcttatcctatatttatatgctcaacgtgtttgtgatgacatggaaattgatatgctgatggtagaagcttgagtgtgcactgttttgatattcatttctctttgttttgtaatgaatcggcaggggacattcaattggaaaatttcaagagcatacccgtaaagtaaatgtgctcccaggtaagtgataaattaacagtatctgcctgttactattatccggttgttccatgtgtgccacatgaccatcattgactgcacttatgacagctctaaatctacttgcaagtttatggtcacatgacctttagacccttgttacctcagacagagtggtatcacatttgcttgctttcagcattttttttgtaacttgcggtgccttcaacctcaattgcttttgaattgacagcagtcatgtgctgcaattgcataatacaaaccttccaattctaaaacaaactgcacaaatttgaataatcatgagaaataatgtaagttactcaggtgcataattttaagaggagctttacttattgttttgtctactgatgccacactgtactgctatgtgggattcattcaagatattggtgtaactcgatgtgttcatttcacaggaagatgcaatataaaggtttctgtagatataccagctgatactcaacttgccgcgcctttggtcgagagttgtatttggcgccaagtaaggggatctggtgctgaggtatctggttttgatgaaccatccacaagcacagaaaaggtaaaaggaactccttattttgttcatgaactctgtgatctcttgcatagagtttgaccacagttgaaagaagctaatccttgatccgatgcacatgaactcaggttggtatagcacagcaatggtatgatgagatagacaacctagctttttctgaagttcctgaggaacctacagtgcatgaaggtgatgagaacctttcagatggaagttatcaagaacagagaagagcgcatttcaactgtgttgttaatgtcagtcctgggacatgcgaggttcgtctgtctcctctaaaaaacaatcttctacctttgtggagggaaaatgccttactggtgttatgtcatgataactctcaattactcatgttttcatcacctagaagttcagacacattgttcacacaatgccatgttgcctttgcagctggtggcctttgctgcgttgtacctgaagatcgatagcgcgaaagatgaccacggagaacagaaatcactggtgaagaggatcatccagtgccagcgtcgcgaggatcacgcaggcgttgagctactgatggagagctgcaaggattcgagggacctgacaatcatgaagccggtgcacctgaggctgatgctggagtgtgccgatcatcctgctgggaccaccaacaaggagaccatcagctcagagtccagctttgagataaacatctctttagattagtttccaatgatacgcatagcatgatagagcagcagagtagtttgatttgttcgctagagagagaaattcaacactttcagatagttttgtatctcgatggtcctgttccacatgaaaattttcagttgagaaactggttcatggagcacttaagttttttttttcttttggctcaactttactaccacaagtctgtaataactttctccacttaaatagtctaaaagttcgaatccaaaattttgaattcaacaaaaatcgaaattcgttgcatttggtctcttttgttttgtgccaagacctttgtgcctgcaccgttatacaagtccacctcagctcgatttgaaaaaaaaaaatcggtcagtaatatttcctcttcgttgttgttattcatgtgcatgatgcaaatatatttgatcaaattcagatgttatcttgagcaagctagaaaatttagcatactctgaatatctctcattttctctatgtcatcagtctccaaattctttcaagggtgtctttccaaacttgaactgaaggttagctagctcatagtgttccaaacatgaaacatgtgtgaatttggaaacatcatattcgaactacttactcgcacacccacttatatgtgagtaggtaatctacaaacccacttattaaagatcaaaataagccacttacccgcttattttaacttataaatgagttcgcggattagccacttacactcttaaactgatcttggatcgacccgacgatcaggtgtggtgatgaactgatgatcagctcggtgacaataatttcagcaaaggcatcatatagcacaacaacatctacgatcgctatgatttcaagagacatgagctcactagctcattatctaaaaaatgagctcactagctggctgagcacgatgggattatcatgtgttcattatccaaaaatatttgacttggtattattctaaaaatgtttatattttaggtcggagcgagtactactagtatacctagtatactttctccatcccataaaaaaccatggtactatattttcatttcatactgtatacaccagctcttaaaaaaaaaaactgtacacacctgcctaacgctgacgaaaaagattttgaccactcccaaaaaaaaaccacacaggttttgacctgttccagtgtcactgacttgtgggcccaggagtagccgcggcttgccctcgccgaccttttccttggcgatgggagcacgcgaatcacgacgcacgcacttccttctttccttccttctatttctaccgccgacgcggccgcgagccacggngagcagcggcggagcaccgacgcggcggccatggagaggaccgcggcggaagcagcggctggggggaagggggcgtggagggacggccccgtgacgtacctccacctcctcttntacatcgccatttccggcggccagatcttcttcaacaaaggcaagcccaccaaagcaacccttctatcaggcgacaccatcccctccctttttttctaccccccgcgcttctccggcggattctgcctgcgcgtgcgcgtgatccgccgccggcgtgcccggctgtacggcgcggcgggcggggggttttctgtggcggctcgtttttgtttctggtgctgtacggtgtgcgaaatgggtaggattccggatttctgttcccctctagcttttcatggatggtcaggagggtttagattagtgttaattgttgtctcagtattggcgtcatggatgttctgacaccgcgggatgcgtgtaaacttggtgaaaattggtggattgcatctccgtgtgcggtctagagtgagcgctttcgagattcgaagatggtgt

SEQ ID NO: 10559 - DNA, 618 bp, Oryza sativa
tccagttcactgtaagtaaataagttgtttattatcatacatgcttatttgcgaccggatgagttttttgtactaacatttcattcttaattgtagggggacggtctgcaacctgacgctgatgattactcggtccgacgctcccttgaggcgtacctgttgtggttgttcgggtgggtgatgttcactagaacccacgggcacgcgggttgggactttccggctggtccactacgcacggtccatcgcggatgctcagccacaggacgtgccgcagtggagctggggttctgccgtgctagcagccacgtaccgtgccctctgtgaggcgtgcacgaagactgacgcgggagcgatcatcgctggctgccctatgttgcttcagctttgggcagccgagaggtttgccatagggcgaccagtggtggacagcgcaccctacggggttggtcgcagcgcgcagtggccagaggacggtcccacgatggggacttactggtgtcgatgtgggttagtgcaacttcgctgcgttataagtttaacagtcctcttcttttttttttcttcacataacatgtctaattccaatcatgtttattgcagcgtcgttacgcttga

SEQ ID NO: 10560 - DNA, 629 bp, Oryza sativa
agaagcagagagcagagagagcaatggcgacggaggaagagctcacccttgaggcgcttgaagcgggtcttgcactgggggcaagcctgcgagccctcgcggcgctcgtagtcgtagcagttgcggcagacggggaaggcgcactcgttgcacgccacgaacggctccccgtcgggcccttccccgacgtcgtcgccgcatatctggcacgccgccttcgcctccgccgccctcctccccccaacccctccccctcctcctccatccctcggatcaccaccagctcgttccggttgtgcgaccccgccaccagccccgcgctcgcctccatcgcaccctcctcgtcggcggcggcggcgatagctggtgcgccgcgtgggggaggaggaggaaatggggggaaggggaggtggtggtataataatggtgtttgttggagagagagcagagcagcctcctccgcgttgctaggtcagcgaagggtgtgtttttttttcttttaaatttttttgtgacaaagattttcacgaggagacagagagaaaggagagtgtcggtgtgtgggagattaaaacgggaaatgtttttgtttagaagagggagagagaaaggaagggggttggtggaat

SEQ ID NO: 10561 - DNA, 9052 bp, Oryza sativa
  unsure (1)..(9052): unsure at all n locations
gtcaaacatgtgagaaaaagtcancggcgtcatctattaaaaaacggaaggagtatattgcaatgcacatacactatgctttttatacagacgtgatccctcctcacaccctatctcgtgcactgcttcggcgcccaacacacgacgtccagcaaaacctttctcccatgaactggtctgtcagccaattaaacttcacctaccctcttcctcttgatccctctcaagcaactcccactagcccacggttttcacccccagcccacatcaagaccgtatgttgagaattgagatgcccttggagagtggagaccgccatagtgagaagtcgagtatgcatggttccactactaaaccctagctcgcctcgatctcctcatgccactcccgagcctctggatccctcccttgtctcctcgtgcatattcatcggttttattttcttttcccacgactgctgagatgactcctcgttgtcggctcttgatttcttttttttttcaggtgttccttcacagatcgtctgcaaagattgcaagggcatctaccatgccaataagaagtgtatgttattattcgtgacatatttatttttatgtaatggcagaaaatactcaaactttatttctttaatttattgcaaagagtatatatgtagtactcaaatttgttaattttgtatatactacttcctccgtttcacaatgtaagtcattctacaatttcccatattcattttgatgatatgtctagattcattaacatcaatatgaatatgagaaatggtacaatgacttacatttacttacattgtgaaacggagggagtagaaaaaataaccgtgtgttgcaatgggagataactagatggaaggagaggacttccctggtaagaggtgggtgcatcggtagttagggataggatctggagttccgttccgtggcattagttggtaatttttgtcagaatctgaaaatattttttttgagagaatagaatctgaaaatatgatgaggagcgtctgatggaacatggaagtagaaagatcatcaagccagccatgggcattggatcgaacactggacaaaaataggcgggcggaaacttgcatgtagagtgcatttggttgtaaattaagagaactgtccatttttgtagataatggaatgaaacatcgatcctggccttttcttaggtacaaccaattattataaaaagtagcacactaaaaaggtgttgtccaaaataaaacaaacacaccaaccaaaattaaaagaagacctaacatgacaaggaaaatattattctagtctattggtgaatccccgttcatggttggcaaaaagttacataaccgttgtcttaagattacgacatgcaacattcaggaattctccatctccctcacacttttgtagttgagcccatagccaaaaccaatatgttgccctgaaaattacctatatataggaaacagatggtgatttgtcaaaaaccctatcatttctacacaaccacagagcccaacataaggccgaggcactaacaagtatcagtttactctttttcttgtccacaccctaaagccaaccataaaaattataatatatgcttctagaaagaaggtataatccaaaagaaaattgaacaactctccaaacaaactttgcataatgacaatccataaacaaatgttgaatagtcttatttttcataaaaaaaacaacatcttaaacacccattccaattccgtcttgctagattatagaggattgcccattggcttgcgtgttgtgcctttcatatcgcgtttattttatgataattatgaaaatagctttaccctagaaagttctcgaatgattagtatgaaaagttttctaaatttagctatatgccacactgttgtcttatccattaacttttttatttttatttatttatggtgataataggaaaacggacatatttatatttgaccaacatgatggatcaattactctactgttccgaaaatggaacggtgcagccacacatgcaggtcatctccatctgaccttcccagcaggctcacggtgcacaccttcgttccatcgctacagagagagaatcagagcacagatgcgctatgaactgagaagaaaaaaagaaacgatgcgataagctggaaagaaaagaacggaagctatttttggtcttttggatcacaaaacctattgtgaaccgcatcccgggtaacgggatagattataatgagttaacgacgagtcgttgcccccaccaatcgtgcggatgtgtctccatgggtctatatctcttcctcccacgcacacgtatcgctctcccatacctttcatgtgtcaactgcactcccccacgcatgcatgcgctcgtattgagtcgccacacaggtatcagatctgatgtggtgtcagattcaatagttaatacttgagataccagatttggttggaatccgtatcagattcgatacttgatacctgaggtaccagatctggttggtacccgtatcagatcgggttggtacccgaggtaccagtctgctaccaaaggtatcagatccgatatttgggatatcagattcggtacttggggtatcagacctgataccatcgtactaaggtggatagtacctggtctgatatccacgaggcatcaagaccagtagttgtatattagacttggtaaaaaaaaaagtatcaaagcgtacctagaggtatcgttttgtaccaaacaagtcattttcttcctctccccaacacaatatggatgtgttctttcacacatttttccaacccacatctctcattttccgcgtgcacacttttcaaactagtaaacagtgtcatttatgcaaaaaaatctttctatatgaaagttgttttataaatcatattaatccatttgtcaaaaaaaatagttaatacttaattaatcatcaaataatatgagcttcgttttgcgtgcagcctctgccgtcgtcgcactcatgtcggcttcttggggacggtaccaatggctggcccagatggcgttgcggtcgacgtggcaagaaaagagctcccggtggcaagtggctatagtggttgtaggcacagagagggtgatagaggacggagggagtagcttgcacgcggtgggtggtggtgcgtggatgactttgtgtagacgaatcaagataaggtgtagagcgttgatcattagtctatcctgttcggacggtataccgtggtctaacagttctccttttggattccatgacgacggaacaaatcacccggcaaataactctttaatttccgtgcgtggctagcaaataaccgttgcaacggattttaaaaaaatgatgttggatagactatcaaagatccatgtccgtccttgtcttaggtgggcaggcaagcccaccacaccacatgcaaggcctacccaggccagaaacccatacgctccaggcttcaacggagagtagacaggcctgcatgattttataagagcaggtacaatagcaggatataagccggctataaccatatatcgagaagaaaagagaagagagagaagaaagcggactataaatttgtagccggctataacacggactccaagatgttatatgtgtatgagaggtgggaccgggtattagtagtgtagtatatttttatagttaactattgtatgaaattagattggctatagatgtcttggagccagtagttggctatactattaaccttgctctaaagcgatacacggaaatacttcgcatcggatacaatatgcggacgaaaaaaacgaaagaaagacgatgtgactatataatcatcttcaatttttataatagataaagattatccgacacatatgatatgtaaggcctggtttagttcctaactttttcttcaaatttctaactttttcatcacatcaaaacttttctacacacaaacttctaacttttctatcacatcgttccaatttcaatcaaattttcaattttgacgtgaactaaacacatcgtacaacaaaatcacaaatattacctagatatatttccatcagaaatattcccaacaaattgtacatctccttccatgctcccaggggtacaattgaccttgttgcacatatcggtcaactactaggatcaagtgatggaaaaagtataaaagaatataatccaaattggataggatttaaatgtgcaaggaaaactaggagtagaagagatgctggctaaaatttttaagggcacaggaggaatcttatatgaaacaaaaacccgaaataatgaagagacgtactcgtccgtgtgtatggtgaaatatgtttgtaaccaaaagaataaaatattgtctgggagtgtatttgtatttcttcttcttgcaaacataagagtaaatttcacaaaaatacatatatatattgatcaagttatcagaaaaactacagatttaagattatgtataaaaaaactacatatttaacataaaatttatcataaaatatagatttaacgatttaataacaaagttgtcacaaaactataggtttagcgtcaatttaattacaaaacatggacttttataactcaatcataatattagtgctaaggatttaaacctaaatctatagttttgtgataattttattattaaatctgtagtttcacagtacttagccttaaacctaaaattttttgataaatttattgttactttcttcgtcccacaaaacctgtcgtttcaccgcataaggattgtcccagaaaaaactgtcgttgttgagagaagtggtgggtcagcctactccgtatgcgtggaactagaaaaaacgaagtgttttttattatttttgtcgctaccgtgaatgattcacgatctaatattctcgccaactgaataagatggacccaataccgttttcgggccctaggctgacacaagtggtatggcgcatgtgggctctgtgtaccggcacctatgaggaatatgggaaaaaaagaaaaaaaagaaaagcatatatggaaaaaaaaggtaaagcctaaaccggcacgcacgaggcatatggaaaaaaaaaagaaaagcatatctgaaaaaaaagaaaaaaaaagaaaagcctcgccgacctccatctcgccttccgcaccccgccgcctaccatgcatctcgccttcctccaccctgccggccgccgccaccgccgctgtaggccatcgtgtgtggccacttcaccacattctccaccaccatcatcccagatcacatcatccccatccaaaaatcaatagcaaactaccacatatatggaacaaagtatcaagaactcaacaagttggacatggaggaggagaaaacagaggaagaactcaagaactcaaaaagagaaaacttgttatacttgggccaccccgccggaagccacctctcccatgccagcctccaccaccaccgcaaccgccgttgctggatccagcggccgccaccagccgcctcctcgtccacgccagtctccaccaccaccgccgccgccaccacctcggcgcgtgtgtgccagcctctgcgtcgtacccaggtcggtcgtcacctcctgagtaggccgccatgtcctccgtcggccgccgccgccacctcgccgtggttttttctctaaaaccgacacctataatattaatattggtgtcggttcagttaaaaaaccggcacctatagaattggtgtcggtttttctttagaaccgacgcctatagtgcttaaaggtgttggttctatattttttcatcgtgtggaggtgagaaaaggctcataggtaccggttttaaatgaactgacacctataaggttagtccctatgagggttttttagtagtgtacgatcatgcactaagaggggggcgtgttcctgattagttgcgaagcctaggtatagattaaattcgacgaggatgtcgaatcttcgagggtgggtgaatgtaacaccctaggaaagaaaagaagagtgaaagctagtgttggcggctgttaaatgccgactctataccgccaacatatgcataaagttcggataataaaatatccaacatagtgataggtgcttaaatctcacatattccatagtgttggtgtatatttatatgcaggtgataaaacccgatgttgggaggaaatttaaaccaaagtgaggagaaatatgtatccatacaaggatgggttgtggacttcatagaaatactagaaaatcagcccaaaacactaaagaatggagagaggaggaccaggagaggagccaggccaaaggccaggccaggggggcccagcccaggtccctggttcggccgaaccctagtgatcaccgttgatcccaagtttttggcatggacgctccagatgcattcctgatggcggttaaggggcacttcggacaattctccttcctataaccgtcatacatatcctataaatagacctcacttcattcacactcacacacacttccaagcttgagctgaattataagaggctctattgtactatatcctatactagaataggaagagagtagagtagaagaagtcggaagaattccggagttgtcggtaatcttctcctatttcttttattctgtttattactctgaattcaatataatattcttctggagtaatcttgatttatcttgtgagaatttatctcttggttagttcctaaatagcatacgggattattgttcactataatcaactgaaatatagtgattgctttggtgagttataaacactaaagtagatattaattgcttagacgtggtgtttaggtaattattatccagtaattgctgcgcatcccacagtacgtttgaggtaggtgtagaggtggtgacagcgctcgagatcacttaagtcctccatgtctgggtacgtagtagagtgacatctgggaacagtgggttgccagtgccgaagtatcacattaggattaaagttaaactttccctagacactgtttctcactagtaaatcctctctatcctggcctatcatttgcttagtgtccttggatgagccggaggaagatctgactatatacgttcccttggattcaatacccttggaatactccgtaggggaagtgctacatcggtatatccgcgcgcttgcagattttatctgtaaccgtatcaaatactaacaagcatttctggtgccattgccggagaacggttgctgatcatttctgaacctagttcatcctcgtagcctttttacttttttttaattctatctctacccctgctatcctagagaagtattcctgtcaaactcttctcgaccaaggagcaacttctttttgagttgtctgctcctcgaggcgaattctatgagccacctccttcatcggggtccatttacataactggctatgaaattcgccccgaactaattagtatggttagggaaaattctttttttggctttgatctagaaaatccctaccatcatctgcgagattttgaaccgcgaacacgaattatttttttattagtacccaaccttactgatggtaaaccgtgagacgaatttattaagcctaattaatatatcattagcaaatgtttattgtagcaccacattgtcgaatcatagagcagttaggcttaaaagattcgtctcaaaaattagtcgcaatctgtataattagttatttttagcctatatttaatacttcatccaggtgttcaaacgttcgatgtgacaggtgttcaaaaacaggccctcattatttagctgcaatagctgtatatttaaaacggatggaggaagtaaataggtagttttttatataccacttagatatgtggttctgtgaaatttacttcaaacaaaatgacaaagaaaagattggagaaaagctttttctattgacttgcctggaattcactacccctttcaaaggagccgcgtccgccaacgcgtcataccgcgtccaacgcggacgttgatgcaacttgaccacttgagtagtgacgagtaaagaactggacccaccctatttgatcgctagctactcgtttttaacaaaattcgaagtaaactaataaaaaagaaagactctgttcctatgcacgttgcaatggggtcataggctagtaatagttatacacaagatgacattcattatatttttttccgcttatttgagaatgtgtggcgtgagtccaagtttttgaattctctctatgtggtttaaatcctacttaaaaaaaatattaccatggtgtccttgtccttgggtagtgtttggctaataggatagagaaataatttcccacacatcaaaaaatatctttaaatcttaatcatttattctctcttccatttaatactaatccttcattcattttccaatcccaatctcaacatcaatttcccattatccaacgcacccttagttctatcggatggatgcatgtcctctacaataactatagagaacagtgattgagtcttgcgatacaatgatttccattatcttggcattgtagcaacattgttctaaaagtaatcgattttatcatcgaacacctcttactgtagcacggtaatgtagcatgctaatttgcagcgttcaatgaagattcaacgtatcaaaacatgagctaatgtaaaataatgtagcacctctgcatttttttacttcaatgaaaaggatcttattccgtactggtgctgaagttgaatgttttatctccatctatctatctatcttctattatatactaaaagtccattaaactttctacaaacgctcctaaacctccacgtggcgctcctacaaacactcctaggccgccacgtggcactatctaatctcaccgttgattttcacttaaattggtgaacccgttaatttagaccattagattagatctattattaaaaaaattgatagtttttcttaaaaaaaatatgcaactggtggctgggaaaaggaaagaaaatgtccatacgcaagtataattgaaaaaaacaaat

SEQ ID NO: 10562 - DNA, 5926 bp, Oryza sativa
aattcatttgaaaattttcctcaaaattcaaaaatcctgaatgcaattttgaaattcaaacatgtgataatgcaaaaaattcaaattattgaaagcaaatatgcggatacataccaattttcctgttggtgaaggtcgcgtcatttaaagtccgacgtgcaagactgtacctcgttccgatttagttcgcggattttccacctgtctccggtggtgatggagcgggcgtctttggcttctccctccacaccttctttggttttggtgcggacggcggcttcttctgagccggctgctctagcttcttggccggtatgggtggttttactgtcgtcttccaataacggttcctgggcatcgttgtttccatctccagaaaattctgcatggatttcaccaggctatccgttttgggtggctctacttcgaccactcaaatattctgtgggttcggcccgtacttgattctgaccatggagcattgctccgtcctcggttaaaactcaaacttttcttccttgccattgatgtggaaaccgatactccccgttccaacgtcaatgttggcttatgcagtgctaaggaatggacgccccaggatgagtggcgtctccttccctgtgtccatgtccagcacaatgaagtcaaccgggatgaagaaatcccgtatcttcactggaacatcctccactatccctgccgggtaacggattgacgaatcagccagctgaaggcgcattggtgttggtgtcaatacgtgaagttaagcttgtcgaagacgtgttttggcatgacgctgacactgattccaaggtcgcacaaggcctggtcgaattgttgtgccccgatcgagcaggtgatcgtaggacactccggatctttctacttctctgggagcttgtggagtatcaggttgctgcattgttccgtcagtttgaccacctccattgtcgggagcggtctcttgttgctgagtatgtctttgagataacgggcgtatgttggcacttgcatggcgtcaaacaacggcacgttgatgtggatcttctggattacttcaacaaaacgagtgaatcgctcgtccactgacggtttcttgctccgttggggaaatggtagcaaacgtgtgtcacagtactcctgcggcactgtcctttctggctgaacttccttgtcagctgagtcattagatggcgcttcttttgatatcccactcgttcctgcagggttaggatacggcggatcacgagtggacttacctcccctcgtcgtgatcgccttgacattttcaatgaaggagtcgggttgccctggaatcctcccagtttcatttgcagggactaaggatgccaactgagctagctgggtttctatcattttgttaaagctcagttgattttgaaaagcggaagcaaagccatctaatttgacatttatgttttctaggaccttgtcattggccgcaagctttttgcttaatgcatcagtggttttagcttgcgcaaaaacaagatcattcaaggagggctggttagaaaaattaccgttgttgttacctccttgttaatatgggcgtggttccacccttgacctccttgtggatgatacccgttgttgttgcccatgtacatcgcctcctcacgggtttccgggcagtcattcccagaatgacccgtgttgccgcagacctcacacgtaacgtgtgagtccaaggccttgacgatgccttgtggccgtttctcgtgctcgtccaacctcttcatgaggaggtctagcttggcagcaagtaactccgtctccttgatggtgtgcatgcctcgctgacgggtctggagtcgttcctcgctccaacccatgttggagaccatcttctctattaaattaacggctccttgaaccgttttagagaagaaagctcctctagctgctgcgtcgaggtgatcgcgggacatctggttgagtctattctaaaagttctgcagaatcagccagtcatccatcccatgatgaggacaggcggccacgtattgccgaagacgttcccatgcttcaggaatggactcatctcttgtctgttggaaactagaaatccgtccacgaagggcattggttttgcccatcaggaagaatttcgagaggaatgccgtcgagcacttatcccaggtattgatagcagcacggttggcatagaaccactgcttcactctcccaagaagggagaacggaaacagttgtatcctgacgacatcgggactgacgcccttgatggtgtacgtgctacagatctccaagaactattgcagatgagcattggcatcctcattaggcttgccactgaacgggctagcctgcgccatcgtgatgaggctggacttcaagtcgaaatccacgtcccctatgttgacctgcggcccaatggccacgttgtcagcagagggagcagcaaactcgcggagagccttgttagccacaatcttgaaggtctgtggggctagtacggctagtttctctgtcggtagagttttttgcggagcagcgactcgcggcgtgacgctctggaagaaagcttctggattttctttgaagttttccggcaagttgaaaccagtcatgcactaccctattttcacaacaaaagtgaaaacaactaaggttagcctgcaaagaaaaatgattatacagaggtaaatataaagtattagttcaagtaatctctattatgaatcttccccgacaacggcgctagaaatgcttgttgatatttcttaatgacattactagaaatataattaccagcaatggcacagaaatacttctggtatattatggttacaaagtttatccgcaagcgcacggatataccattgtagcatttcacccgagagtattccaagggtatcgtatttattttaacccgtgggaagatcatgtagagagaacattgactaataatttatatattacttgtgataatcatattctaagcagggatgacacacaagcattattactcattctcataatatattatttaggctaagtggaaagaaaagataaagaaaatatattcctatacttctaatatacatagtatacatacattctagttaaccaattgtggacccccgtttttataacaggaatcaatcgtgtaaacagtaccatttccctggatcaagtagtttggtacacacgaattcatagctggaatatcaagtgcacatacacgagtgtttaatacgaattattacatcataggcccgcaggcatagccttaaatcatcggaccgagaggtccggaatacatccaaaagcagaaatagataaggcagcggaattcaggcagcggcatgccattgccacaggcaacgaccgtgctaagacctactggacgccatcgtcttcatctccttcctgataataggcatagggatcctccgaggcttcatctcccacttctgataaattttatatttgcaaggatgagtaccaaccgtactcagcaagccaccacagcaacaatgcatatgaaagggggagttcaaaggatggccatagttcttttgcgcaaagcaagttttgtaattcttttcacaagcctaagacctagcattgactgatcaaatttttagtaccagagtttgtatttaaacaacgacggttctgtccaccatccattgtgatcccaaggatagcttcccgccattgattcgtcatggttttctgaggacgtccaccttcccgcctctcaggaagtggctccaacagcataaaattcatcatgcaatatcccatcccacacaagttaagaatttagagtctagccaagtgtaatacatgtcccggtgctcaataaccgcgagcacggctattcgaataggtttggtttactcacactgcagtggatgtacactttacccgcactccgcgactgcccaactcatgagcctcgtcccaacacatgagacgcgtcacggcaaagcttttcgataacctcgcattggcagtacccgctccatgaacttaaatcctcatgcactctaggcgtacacggtttctagcagtgagaggagttctggcgcacccgggaaggaaagactcacacatgcattaagttgtaattatgtttaaattctcacatggtagtcctactgatggcgacaccactgtagacacccgcctcgcggttctaccaatggctgccccaccgtagagcccctacctcacacatcaagaaaccactatgcatggatactgcctccgctcagctatctattccgctaggtctatacccatacgagaagtgcggttgtacgggggtcgtttcatgcttaacttcatggctcggtccttaattgaccagggacggcactagccttttccggacaccacccaagtcctccagccgccccagtcgaaaacagttgttttactttattttcctttcacaaattatgtcatcaatagcatggcaatgtggcgctcatgtctccacatgccgcatctcaattaccttcccaaaggtaattgcccaagcatatagcatttgataaatatgagtatgcatgaatctaaaatagcatttctaagcaagtgtcatagttgactagggactcgtacgtatctatggttacaaagatttaaaggtgaacaataatcaaggcatggcataatcacaagtaggaggttcataattgcatgcaattttatttataaacaaaacaatttcgcaattgggatcaacatgttcaaggaatagtgatgacttgccttgctcgaggtcttgcgggtcttggccttcacctggatccgcggctccctcggtctctatagttacgtgcgaaaattgatttgaattcggttagaattcaaataaaaatccaagtaaatccgaatggaagtcgaacgcgaaagtcaattcctttttattaattttactatccgcgaactatggcaaaccccaattttggtttaaattattttgcggttacaatattttgttgtcgtatgtttttaatttaatctaccctagcattatatccatatattaggttagaaatttcttatcgcgagctaaatgtcgggcggaatcctaaaattatcttataatattatacgacttaatttagtctatgattaaatataatacacggttaacaccctagtaattaaatccgaatcgctaccgttgatcgattatttatagagattacccagaaataatccacaataatttacgagaattcatacatttgtttaattattaattacatctaaattaataccgcgaattgatttcttatggagagtactaaaagttatctataatctataggaatttatcccattatattttcattaatcctatatttaaatgctagtattttaggtatttaattagtaagagtttatctaactatattttcattaatcctacaattaaattctaatatttgcaaatattttaaatttccccctaaatttttctttctctttttctttccctttttcctctcctctcttttcttttctttttctttctctccctttcttttcttttctctcctggcttcctcctcccttcctctccttctctttctcggctctccctctctttctctcggctctctctttttcccacccgagcggtggcggcggcggactcgagggaaacggagggcgactcaccggcggcggcagcggcgatgacggcggcagcgacggcgacgcacggtggcgcgagaacggcggtgcgggcacggaaacggtcggcgcggcagcacgacggcggcggtgcggcggcactacgatggcggcgcgacggcgtggaggagtgggtggtggagacggggagaaggggggggaatagtgaggcttttataggggaagggagagagataagggggaaggaggaggagggaagagg

SEQ ID NO: 10563 - DNA, 6767 bp, Oryza sativa
ttttaattaaagttaattctcattccatcgtattaaaatttaattgttgttaatatggttgcgataacattttatttatttccaaacccacctaatctttattttaatttatattttaattatttatttagcccacttgatttttagggtttattcctagttaatttcctcccatttgtgatcgatgaaatccgaaatcaaaatccaataaaatcttcgaataaaattggcatgatgcaatttatttaaaaagttttttttttgaagatcagaatttttttttggagtctttgattttgttggtcgaattttcagaatgttacaaacctaccccccttaaataaatctcgtcccgagatttcttaccggttttcgaatagatgtgggtactctgtcctcaagaattcttcgctttcccatgtggcttcatcctcagtgtgattgctccattgtaccttgtacatacgccacactttgctcctagtcctcttttcggcttcatccaatatccggatcgggtgttctggatatgtgagatcattgctgatgtgaatttcttccagcggagcttgctcttctggcactcgtaaacatttctttagctgagatacatggaagactgggtgtacatccgcgatattctctggcaactgtaactgataggcaacttctcctcgcctggcaatgatctggaatggtcccacatatcttggtgccagttttcctttgaccttaaacctttttggtcccctcatcggagaaacctttagataaacgtaatctccttccttaaattccaggtctcttcttcgagtgtcggcgtaattcttttgtcgtgactgtgctactttcagacggtcacggatcaaacgaaccttttcttcggcttcttgaataatgtcaggtccaaataccgcccgttccccagtctcggaccacattagcggggtacgacatcgtcgaccaaacaatgcctcattgggtgacatctttaggcttgcttgaaagctgttgttgtaggagaattcggcgtagggcaaacatctctcccaatccttgctaaaatccagagcacaagccctcagcatgtcttccaggatctggttggttctctctgtctggccatctgtctgtggatgataggccgtgctaaatgcgaggtaactccctagggcttcatggactttctcccagaaatgtgaggtaaactgggtgcctcgatcagatataatcctcttaggtataccatgaagacacactatcctggtcatgtacaactcggctagcttagcactgctatagtttgtcttaacgggaatgaatctcgccgtcttggtaagtcgatccccgatcacccaaatggaatcatatcctgttgcggttttgggcaatccaacaataaaatccatacctatctcatcccatttccattcgggaatcctgagaggttgcaacaaacctgccggcctctggtgttcagccttcaccttctggcatacgtcgcagagtgctacgtattcggccacatctctcttcatgttgggccactagtatccttccttcagatcttggtacatcttcgtacttccggggtgcaatgaatatgccgattcgtgagcttcctttaaaattaatcccctcagtccaccctgttcgggtacgtaaattctctttttataccatagaacatctttttcgtcggttgaaaattcctttgcacgtcctgcagctaagcgttccttcacctctcggacttccttgttgtccttctggacttcttctatttgggttctcagaagaggttgaatgtccagggtgtttatctgtccacggggtactatatgtaggttcagctgagctatttcctccctaagcttagggaccatcccttccattctcagatgattgcaatggctcttacgactcagagcatcggctacaacgtttgctttgcctgggtgatagtgaacctctaaatcatagtccttgattaattctaaccatcgcctttgcctcaagttgagatctgactgggtgaagatatactttagactcttgtggtcagtgtagatatcacaatggtttccaatcagataatgtctccaaatctttagcgcatgaaccacagctgcgagttctaggtcatgggtagggtagttttcctcatgtggtcgtaattgtcgcgacgcataggccacaacttttccgtcctgcatcagtactcctcctagtccttgcctcgacgcatcacaatatataacaaagtctttcctgatgtcgggaagaactaaaataggcgctgaggtcagcttttccttgagttgctcaaagctttcctgacactgttctgaccacacaaacttcttttccttcttgagtagttgtgtcattggtcgggctatcttagagaacccttcaatgaaccttcggtagtatccagccaagcctagaaaactccgaatttcagtcacagatttgggtgctttccattccgtgacagcctccactttagcaggatccactgctactccaccggccgagattacgtggcctagaaaagcgacttcttttaaccagaactcgcacttgctgaattttgcatataacttatgcttccgaagtttctggaaaaccaatcgtaagtgttccgcatgttcttcctcatctttggagtagatcagaatgtcatcgatgaataccaccacaaacttatccaagtaatccatgaatactttgttcataagattcatgaagtatgccggggcattggttagaccaaacgacattactgtgaattcatacaacccatagcgtgttgaaaacgcggttttgggaatatcctcggtcctaatcttcagttggtggtatcctgatcgaaggtcgatctttgagaacaccttagctcccttaagttggtcgaagaggtcatcaatccgtggtagtggatacttgtttttgatagttacttcgttcagtgatcggtagtctacacacattctcatgctaccatctttctttttaacaaacaacactggggctccccaaggtgacgaactggggcgtacaaatcccttctcttgcaactctttgatttgctttttaagttcttctaactcattgaccggcatccgatatggtctcttggatatgggggcagttccgggtatcaggtcaataatgaactctatgtcacgatctggtggcattccaggtaaatcttctgggaacacatcaggaaatcgctgtactacgggcattccctttaggggtagcatggtaaatatacccccagcacgttcggttagcctaggatcttgatccatggttgctctcatatccgatccccagggtgtggtcagggtaacctctctacgtctacagtcaattactcctctatgctttgctaaccaatccatacccagaatgacatcaagagtttggggtattagcaccataagattggagggaaataccacatccctaaggcgaattggtacgtctatgcaagcatgactcacagttatctcgcccccaggtgagtgtactatcataggctttctaagtcccacgagggtcaagttgtgcttttgactagccttcagagatataaatgaatgcgatgcaccagaatcgaagagaactttaaccggggtggaattgatagagaacatacccattagtacgccctgatcttcctgggcctcttcagctcggacatggttcacttgtccgcgcccaaatccagtggtggtcctgttcgattgcggagtcttgaataggcctcgcccgacagcaggggtagtagtgctgcgaacagtcattgcattcgcgccagttcggacaggggttttgcgtggatgagggcagttgttagcgtagtgcccgtattccccacagttgaagcagtccacattcttcttggctccaggggcagccaaagttggcgtaggggtgcggttctgaagtgcaactggcctgttgaagttgctaagtgcagcgggacggttggtcaccatgacagggggcttccatccggacggagtggcttccttaagtcgctgaggcactgtctgaggtgggcgactcatagcaagcctcctcttgcggttgtgttccaccgtcctttgatcgttctctagcctgacgaccttgttgatcaggctctggaaactctcgtgatcctgcccgatcataggtccacgcaattcatcattcagcccttctatgaacttgtcgatcttttcttcttcatctgccaggtctccaattgcgtagcgagccaactgagtgaacttgtttagatactcctgcactgttgtattcccttgccgcagtcttctaaactcgttcttcttcatgcgcatcactgcagcaggtacgaaattctcgcgaaacgctgcagtgaactcctcccaggtgggttctccagcaccgtcttctcgggcccccttgtaggtatcccaccaatcaccagcgggtccttccagctggttcactgcgaagatcaccttgtcggcttcgcgtaccctgactagagtcagtttcttttctatgatgcgtagccagtcttctgcttccatgggctcatcggccgtagcgaacgtgggcggcttggtcctcatgaactctccaaagcttgaccctccgcggttgccttggttgctcgcgatagcttgcagaagttgagtttgggtggccataattccggccagagcgtttaagtcgggtgtctgagtttcgtcattgctggttgttgcacgacgtcggcttgccatctgtgtaggttgatggagtaagcatcctaattttctaactagctcctatggctttatcccattaaggggggttgtgttgatatgaactttgtttcgcaagcatggtggaataaactcatttataatacaacaacaatagataccataaataacctcacagagtttcacaaacagtacataaatcatgatgcaatcgactgcatacatacgcagtccaaataaggttcatccaaacgatacatcaaaccaatcatcaaactactcgtcaatctaggtaagggaagagggtgtctcgcatactatccaaaaaccatctgatacgagatcgaagctgcaaggagtccgtcagtctagtcctccagccatccgcaggatcccggggcaggtagagggtggtcgctggctcgcgcaaaccggagtccccacggctcagaggtagtggcctctggatctggcttgggcctcttgcccgggggtcgtgtgctcttgcgagcagtgctgagggtgcgagggcctccgaggaaggtgatacagggaacaggagcctcatcctctgaaggatcagtgatgtctggctcgatctctggctcggtgtcggtcccctctgtctcggagtcgacctggatcggagtctccaaattggaacccagctgcggagaaggtgtagggatcagtggagtgtgaaccaactccggaacaggtggctgtgtcgctgtagggtccactaggtagggcgctgactcagtagctagcatactagcctctcccagaagagcgtggaacgccggtgggtacggcggggtgaggaagaagtagcggtcacggcctaccgctgtggaagtagaagcccctgtagtgctgatcttggctgctcgaagctgctcctccagctggctgacgtgctcctgactctctctcagctgctcctcaagagtatccatcatcccgcggcgatcgttgtactggtcggataactgctggaactgatcgccgtggacctggagctgtgccttcagtgagtctatctcactgccccaagcctggtgctcctcctccaactgaagctgctgtgccgtgaggtcggtcacctcagtctctaactcccccacacgtctctggtggtcgtcaatctccaacagagcctcctcgtagtagtcatctactgcctcagcccatcgtgacaaccgagtcaccatcgggttgtagcagcagggcgtgtcctgaactgtgcaaactgagttgccctcctcccggaacgggtgatgagcaaactcggtactcgctaactcagctcggtggatagagctgagtcggaggaaggcctcccgggcagcatcctgcatcgcggtctctggcaggtctcggtggtgacgtgtctgaaagctgtagtccaactcggaagggactcgggggtgaatctcgacccgagcctcccaaactgagccacactgcctcactcggtaagacgggaacccagggtatcgcagacgcctcaacatccgatgcagctcaatgacatacccctctgattgaggtaagctcaactcccaggtagcgggtgaatccgaatctgccatctaattttaagaaaaacccaaggtcagtcgagagtaaaacttgctttgtaaaggaaatagttaagagtaagatgaaaagtgtaccgagttttgtaaacatagagtttttatttttgaaagtattgctaaatgggaatttctcccttggccaacttagaaaaggtgtggggcgccttttggtcttttcctacagtcgtatggctctgataccagctctgtggacccccgtttttataacaggaatcaatcgtgtaaacagtaccatttccctggatcaagtagtttggtacacacgaattcatagctggaatatcaagtgcacatacacgagtgtttaatacgaattattacatcataggcccgcaggcatagccttaaatcatcggaccgagaggtccggaatacatccaaaagc

SEQ ID NO: 10564 - DNA, 1076 bp, Oryza sativa
  unsure (1)..(1076): unsure at all n locations
aatagattatactctgatcagaggtgtacatctttacccacaagacacatcttcctcacgtgtaaccacgtgccacataccaccacggtatacgtacggaagacgtgacatagttcccacccatcctagccataaacaagagtaccgactcaacnccacctacggcgggaaccnccgggacaggtaggcaggactgagcccccagcagcaggacaccggccctgtgccatgacatctcgactaccgggccgcagctcgtgtagccttcatttgtcctagagatgtccatcgacccccgacttcgtccatctccatgcgtgtacttttgtttataaccagactgagccacaaactaagccttacccactagacatgtggaagtacggtagtgctttgcaacaaaggcccgagcttaatccttatagtacccgaggtacgactaacaaaacccaaccacgcacctcgagcccagcctaaaaccattttgggtgttttgaatagagggggaggtgtgtgtccacttccaacgtaagccaaccattacatagtgtccaaatgatatgagaattcccaaagtctaaagttataaaaccacctaatgttgcctaattaatcagcgaagcatctacctaaattcatactagtggaaccatgaatagagtacccactagttggggttttgtttatccaagggtgaacaaggtaataataacaatagcaataataatgtcttaacaaaggtaaataggcatggctaaataaaacagtgataacgcgggaatttaaataaagcggtaatgcattaatttaaattaaaataattttataaactgggattcaatatgctcaaggatgatgtgacttgccttgctcgctttcccaaacgtcggctttaacctccacgaagagtggatcttccgaagctgcagcgtctacacgaccaacggaaaagaaaaacttttactctataaactcatataacaagcaggaacaaagcacaaaatggcttcttgacttcttaaagaaaaatagagacttgaacggtccaatttcgagttcaaatggccagttatggc

SEQ ID NO: 10565 - DNA, 2237 bp, Oryza sativa
tttttataaaatcattttaactttgtttatttcttaataattattatttgtgctctgaaaattccactaaaatttgagggctccttttagaccaaggagaatttaacaaaaattctccgggccacatttgaatttttcttttacgtattttagtgtttgccaatttcttttcaaattttaattaattctattattccttttagaaaatgatttttatttcgggatgaatttatcaggacgtgacacaatttcctcttgtgggagtctgactggctggctggtttagaggtgtttggttgagcatcagaccgaatttttggtcctccactcccctgaccagtctactggcgaggtgatcagcactgagcaattgggggatctgacttcatcaatgcaaactcctgagcataatatttcgaattgtcaaatggcttaacaagagacaagagcatgcttttgagagaggttgaggtgtttgaatacataccggtggaggaagattgaaggcgttgtatggcaccaccggcagcaagtgcgaatagctgactacgataacgtttgagaagatcttgcacattctctccttcatgaccttaaaatcaagagagtctagatcttcgcggttttgatcatgcttgctgtcaaattcgaaggccgtacgagatctctctttaattggagctagccgactcttgataaaatgccgggtgatctgttctccttgcagaccttgctcctttagcttcagcatacggtccatcaggtcaagcgcctgtgcggcttcatcttcaattggcaatgagttccaagtgtcctgataaagtggagggagacaggagtactcggggagtgcaggctcagggttctgtacatagaaccaatttgcatgcttgcctttgttcgaggttttgaagggcatggaaaagtattttttggctcaaacttcccctaagttggaaaccagccccccctccccaacaacacatggtttactcttgttcggttggggcttgaggaagaagatgcggcggaacaaggcaaaatgcggcctaatgccgaaaaaagcttcgcaggcgtgaataaagttggcaatgtgaactatggagttcgggtttaagtgatgcaggctaaacccatagaaattcagaattccccggaagaatcttgaggttcgaagggaaaatccgctatagaagaaatgagaaaataccacgacttcatgtgtgtcgggggtcgggaacgcttcaccgaatgctgggcaccacccaatgatttccttcgctggaagaacgccgtgcgccaccatttccttcaggttttcctctgttacatcgaagggtgcccattggctctcgaagctttctctctcctccgccatggatgcgaattgggtgatgcgatttgctttggaaatggatgggagtggatgggggatcggtgcggttgttgcgcggaaggtttttgcggagttttggaagatggattggagcagatcgatgaaccctagctttgccggcgcatctttgcactgtagcgggaaatggggaaagtggcaagagtctcggcggggaagacgaagagacgttttatttctctttggtgttattagggtatcgggagtactaatgggcttgggcctaaaatagtacttcagcccaattctattatcagcgtggcccattgtgatcttgtcgcgaccgagaaaaatacattttcccgaacgctagtgtattaatccccgtcccaggaaaagccggggtacaccacacaaacatggtacaaaaggcacatctttattttatcgataatatttacattattacaaaggcacttaaggcctgacaatcaaaaataaacagcagcggactagcgggcctacggctccatctccacaggcgctcaactggggtataagccaggactccacctaagacttcttctccaaagcttctcttactgaagggggggaaaagattgagcaagaatgagtacaaccacagtactcagcaagccacaccggcagatgcatgattaatgcaaggggggtacaaggggtaataatataggggttaagttttgcagaaacagcatttaagagtcacttagttgcccaaagccatatataaagacgatcctagagctacacaatattattaaccaagaccgtgaaccctcacgaacctgccttaacccaaggtctacgatgattcagaccgaactggcaacccgaccatggg

SEQ ID NO: 10566 - DNA, 757 bp, Oryza sativa
  unsure (1)..(757): unsure at all n locations
ggatgggntttnnattggaaattcgagctcggtacccgagatgatactagtagtaatttttcggaccaaaaagataaatatagaactaaatgtgacatattttactacaacgaatctggatatgacagaggtatgtttaaattcgtagtattaggatgtgtcacatacaatattagattgtttttgtagatggaacgagtagttacctagtactagttgcctgatttgcatggttgatcttgatagaaaggtgagggagtgtatgaagaaccaaacgaaaaggagcaaaatcgagagtcgcgctagctaggctccaaagcaacggcgagcagttggcaagctcatctgagccactacggtcaccaacttcatcggcacctccttcatgctctgcctcctcggcggcttcgtcgccgacacctacctcggccgctacctcaccatcgccatcttcgaggccgtccaggccaccggcgtgatgatactcacgatctccacggcggcgccggggctgcggccgccggcgtgcggcgacccgaaaggggcgagcgcggagtgcgtggcggcggacgggacgcagctcggggtgctctacctggggctctacctgacggcgctgggcacgggggggctcaagtccagcgtcttcggcttcggctccgaccagttcgacgagttcgacgtcgacggcgagaagaagaagatgatgcgcttcttcaactggntctacttcttcgtcagcctcggcgcgctgctt

SEQ ID NO: 10567 - DNA, 677 bp, Oryza sativa
  unsure (1)..(677): unsure at all n locations
atgatatgaaaagaattaataattacttaaattttttaaatgggtaccgagctctgatgaatcccctaatgattttggtaaaaatcattaagttaaggtggatacacatcttgtcatatgatcaaatggtttcgcgaaaaatcaataatcagacaacaaaatgtgcgaactcgatattttacacgactctctttaccaattctgccccgaattacacttaaaacgactcaacagcttaacgttggcttgccacgcattacttgactgtaaaactctcactcttaccgaacttggccgtaacctgccaaccaaagcgagaacaaaacataacatcaaacgaatcgaccgattgttaggtaatcgtcacctccacaaagagcgactcgctgtataccgttggcatgctagctttatctgttcgggcaatacgatgcccattgtacttgttgactggtctgatattcgtgagcaaaaacgacttatggtattgcgagcttcagtcgcactacacggtcgttctgttactctttatgagaaagcgtttccgctttcagagcaatgttcaaaagaaagctcatgaccaatttctagccgaccttgcgagcattctaccgagtaacaccacaccgctcattgtcagngatgcttggctttaagctgccatgtataaatccgtg

SEQ ID NO: 10568 - DNA, 518 bp, Oryza sativa
  unsure (1)..(518): unsure at all n locations
agtgtgtacgtatntcgctgaaacccgcacagaaanntttgagaggcaagagcaaaatgaaagtgagaaatgtataacagtagtactaacagtagtaggatgcatccatctgataaccaagaggaaggcgatatgtcccgttgagcttgctgccattctcaggaggggggaacattggtctatcaagcaagtctgggtagcaaccgacaagaaacccttggtcagcaccatcagagttggcacgggcaatctctaggtcatgaaacatgcctttgaagacatccatagaaggctgtaaatggaaaatgttgccgatgtcagattactgtaacaggaaatagtaccagcatcagattacttgttgtgcactacatatgtgtgagcagaagatattttcaggtgtgacaacttaacactgattatttattaatgacatgctatttcatcgtagtacttccctaacggatactatattctaatgaatatggaaggaaaatatccagtttgtgacctgccaa

SEQ ID NO: 10569 - DNA, 629 bp, Oryza sativa
tgtgtataagaggtgccgtgatattttgtttagactgctgcgttcccacagcacatcttacgtggtgtgatggtgtgttccagataacaagatccattggagatgtgtatctgaagaaaccggagttcaacagagaacctttgcatagcaaatttcggcttcaagaaactttcaggaggcctcttcttagttctgaaccagctattgttgtacaccaattacagacaactgatcagttcatcatttttgcatctgatggactatgggagcatattagtaatcaggaagcagttgatcttgtccaacataatccccgcaatgtatgtgttcttatcttatgtaaattaattatttcaatggcgaagtgcttgttcatattattgcttgtccaataaaagaaatcttgatacgtttttgtaatagttacatgctttgattgttattatcattagggtaaatagatgattggatgtcaattgtctgagaaagtaagaagatcatgttgaatatctttagaacttgctgttctaagtttcttttaaatgtaccaaatattcagaaagaccttgttaggtatatgttaatacgatcccatatgaaattatgaaggcacctttacattgtgagtt

SEQ ID NO: 10570 - DNA, 594 bp, Oryza sativa
ttcaccttgcgtcctcatccggatcaactgctgggaagaaccagaacgagtcgccgtcggcggggaactcgccatggcggtgcggcaccgtcttcttcagcaccagcagatcacccggcgccgcgcccaccctcgactccgaccagaaccacgcctggccacgggcggcgacgtccacgtcgggcagcgtcgacggctggtgcgcgaacaggacggtccccggggcgcggccggccgcggaggaaggcgggacggccgccgagcacccgcggccgagcagcagcacgcgctcgccggggcaggcggcgatcggcagccacgccctcgcgtcccagttgagcttgtagagcgcgacgcggttgtggcgctcgtccgagagacgaggaggacgtggccgagcgactccacgaggtagtcccgccacagctcgagcgacgggagcgcgaaccccgtgtccctgcgctgcaccttggggttctcgtcagcgagatcggcgcgccacagcagcctccgctcgtggacgaggtacaccgtggcgcagacggcgacgacgtcgctgagggccgcgtggtggcggaaccccggcgcgcgcag

SEQ ID NO: 10571 - DNA, 1175 bp, Oryza sativa
cacacattgaccaaaaggtttgaagtttgatccatatccattggtgcccagtagtatataacatcctcattattttcgccagccatagtttcctctaagggttcttcggctttttcagacaaggatacctgatgacataagaatgtttaaaacttatttccatgtcattatcaattgaaaacggcctcattcaagtgttcaagcaatctcagcacatggaaagcatagaacaacaaaaggaaaacataggcatggcaagccaaaaaaaaaaaggcattttcatggagatgaaaccaaatagaacacatggaaagcatagttccaatactttttaacatctgaagcaacaattgtattgcaaaattgcatttagctggtgcagcatagaattgcctacatgataggcatcatgagttcatggctagagggaactgttgctactgcttaaaaaatcctctatgaaaaggtcgaggaacctattttattatattgtatgtccaggcaaactggaaaactgagatagtttgggagatttggaagcaccgcaacgactgcgttttcaataacgccaatcctagagtagcgacggtcttgcaagtgatagaaaatgagggccatctttggggtgttgctggagcttctcgccttcaaaagctccttagtgggacggctaacctaggcaactaagctccccgggctgtctagtgtgtgtgggtcttggtaggagggctcgggcactcctactttgttttttctttgtgttctgttttttgtattgttttttcttccccttaatgaaatgaaatgcagctctcctgcgttttcgagaaaaaaaagaaaacttgaggtagtgaaaaattatgtctagttcatagtacagaaaaatatcgaacaccacaaatttaagtagctttagccactataaggcatatccataataatagcattggacaataatacaagaacgaattaatttccacagtttgaatgaaaggacaaaaagtggatctgtgaaaaaaaaagttcagcaggaagaatgccaaattgccaatccaatatgaccaaaattagcacatgattctatgagaaattaacttatacctttcttccagcagcctgccatgactggaaacctatccatggtaacttgtgaacagcatcgattctgttcgcaa

SEQ ID NO: 10572 - DNA, 557 bp, Oryza sativa
ctgaatcttctgagaggatttgctcatggagggtatgcagatctgcagagagtcacccagtggaatcttgacttcttgagggacagcacgcaaggggacaggtagttgttagcttagctcaagtgctagacattttgcaattagttttattcaaaactctttacgcatattagtggttgtttcatatgaatgcaaatgtttattttccaaacaacagacataggaattgcattatttagtacagatggcatgtacgcatcagacccttaatataatcatggtgacgtggcaaatagtagctagggatttctagtaagtatcattgataataatcctttatacaatggaaaccaagatcatgtcctcttttgtttttttctgtgagcaggtatatggagctgtccgagagggttcacgatgccatcggatttatggttgctgctggtctgactcctcagcatcccatcatgacgacggctgaattctggacatctcatgagtgccttcatttgccatatgagcaagcattgactagggtggactccatttctgggctt

SEQ ID NO: 10573 - DNA, 552 bp, Oryza sativa
atcttctgagaggatttgctcatggagggtatgcagatctgcagagagtcacccagtggaatcttgacttcttgagggacagcacgcaaggggacaggtagttgttagcttagctcaagtgctagacattttgcaattagttttattcaaaactctttacgcatattagtggttgtttcatatgaatgcaaatgtttattttccaaacaacagacataggaattgcattatttagtacagatggcatgtacgcatcagacccttaatataatcatggtgacgtggcaaatagtagctagggatttctagtaagtatcattgataataatcctttatacaatggaaaccaagatcatgtcctcttttgtttttttctgtgagcaggtatatggagctgtccgagagggttcacgatgccatcggatttatggttgctgctggtctgactcctcagcatcccatcatgacgacggctgaattctggacatctcatgagtgccttcatttgccatatgagcaagcattgactagggtggactccatttctgggct

SEQ ID NO: 10574 - DNA, 756 bp, Oryza sativa
ctcgctcgcttcaaacccacaaaatgcttcaccagccaagataaaaatggtgagatcttcgtagttcttcaaaaattgatacgtgctagttgagaaacaaactgaagaggacagtaatacagataagcgacttgttgctagttgccaaagatttctccgccctctttcaaatgcatgtgcaacaagttttgcagcatctgtccttagctgatagaatggtgaatctgttcctgatgtgctagtatcaggattgctgacatcagaagatgatgtcctgtcactcatttcagctgcatgacctctacctgaatcacctaatgattcatctgcactctgggatgtgttgttccttcctgtcagagagttttcgccctcggactcgatactctgaaaagtaaccacagtaaaaacgaataaagatatcaaaaatcaaaacaactcaaccaaaatattgcattagaatatgtaaaattatggaaagataagcctaattaacttacatctcttttattctcaaaacaggtaattcttggtgatatattatgtacgggtcaacttacagcatatttgacagttgccaactgccagctccatacacaaaatagagtttaaactgttaacatttgacatctttatacataaaagtttgttcagttgtaagattctggatgcttttattgttgttgttatttcaacttcctaaactattatttctcagttcggctttgcaattttttatgatggtttacaatttta

SEQ ID NO: 10575 - DNA, 756 bp, Oryza sativa
  unsure (1)..(756): unsure at all n locations
ttattcaattttatacctgtaggtgtacaaaagctcaagtgaagtattaagnacattgatggtgcaagaatgaaagatacnaatttctgtgtgtccgttcattaccgcaatgtagcaccacatgtaagcntgcattaaaatctttaatttcacacagnaaatatgtggtgtanaatgtntgctgaatattattctcattgttacatcttaggactacgnagaagttcatcaacgtgtgctgccgtcctaagaattcccccccccttttttnggnttnntttttaaaagggcctttaccccaattgggaagaaaggttaaggaatatacacanccgcacagctgtttcgaagcactggttaagtaccattgttgtatttgtttttaattcaactgcgctcttgaattcaggttcttgaggttcgacctgtgatagactggaacaaggggaaagctgtggaatttttgctggagtcacttggactatgtggaaaagaaaatgttcttcctatctatgttgaagatgacaagactgatgagaatgcattcaaggtaacccataaactggtctgcttgctcttacctgcaaaatatcaattactacttccatgtcttgatgtataatattgctcacttggctcaaataggttctgaaggcaaacagcattggctttggaattttggtgtcatctgtgcccaaggatactgatgctttctattccgtacgggacccagctgaggtaattcgtcttctatct

SEQ ID NO: 10576 - DNA, 625 bp, Oryza sativa
atccctgaaagttggtttttataggacgagaggagtacatattttttaagaaaattattttataaattatttataatcaaatattttaaaattcgatcttaattttgtccgaaacaacgagtattataagagcttatttggtagagctccaactcctaaatttagcttcaagagttagatctgaagtagagttatatgaagctgcttaaacccaactttgcatgtctagttcattttggagatagctctacacagctcagctgaaattgtttggtgaagctagagctgtgccaaacagggcctccgtctggagagaaagtagcaacgcatccatgcaaaccactcttgctataggctcgatcggctataaatacaagacgccatgacaccccaagcaaaccaacccaaagcaacacaagccatagcagcagagccgagtagctgagctcactgttcgatcgatcactagctcgctagctgcatccatggctgcttccaaggtcgctccgtgctggccctgagccttctcctcctcggcgtcgcggagcacgggtgcgagccccactgcttcggcggtggcgcgcccgcggtcgcataccgacgccgactgtggtggtgccactgc

SEQ ID NO: 10577 - DNA, 685 bp, Oryza sativa
agaggaaaagtacaatatgcagacctaggagcggaaaactggaaacctatcagcaacttacatgatatgtcatctagtcactcaaagactttaggctataagaggctgactaaaagcaatccaatctcatgccaaattctattgtataaatctcgctctaaggccgaaaaaatcagcgctcgacacggactcattgtcaccacccgtcacctaaaatctactcagcgtcggcaaaggagccatgggttctagcaactaacttacctgttgaaattcgaacacccaaacaacttgttaatatctattcgaagcgaatgcagattgaagaaaccttccgagacttgaaaagtcctgcctacggactaggcctacgccatagccgaacgagcagctcagagcgttttgatatcatgctgctaatcgccctgatgcttcaactaacatgttggcttgcgggcgttcatgctcagaaacaaggttgggacaagcacttccaggctaacacagtcagaaatcgaaacgtactctcaacagttcgcttaggcatggaagttttgcggcattctggctacacaataacaagggaagacttactcgtggctgcaaccctactagctcaaaatttattcacacatggttacgctttggggaaattatgaggggatctctcagagctcagcagctg

SEQ ID NO: 10578 - DNA, 676 bp, Oryza sativa
  unsure (1)..(676): unsure at all n locations
tgctctacgtagtgttcttgatgccttgcgtaaatctatcgattcaaaggtttaccattgtcaatcaaatctttgtgttatctgcattatctcaacttttatgtgaattttatgctgacttatgttgtttgcagatgtttatgttcggaacaacagcgctagagcagtttatggatcgtctaatcgagtggccacagtactgtaaccatatattgcagatatcacatcttcgtgcaacacatgccgaattagttgctgcaattgaacgagtgctcgccaagatatcgtcaagtcaaaatgagccaaatgtaggcagcatgctttctgcagatcagcatggttcatcatctattggaaatatggaggtatacttacatccaagtcaagcaggcaaacttttgttttttaatacttgttacacttggtattaaagagatgcccttcgtatgtaggcttctgaagcatcgtggcagctcatcaatccaactncaacacaacttgaacggtcacaccaacagaggcaccagggttttcttggggagaggtccaagggctctacnaacatcattcaagccaaaacatttctttctagtgggcaaatgccacttgcttcatcacctggtgattgggctgtcaatctaaaggtaccagtgttgaaattattattttttatgtc

SEQ ID NO: 10579 - DNA, 1531 bp, Oryza sativa
tccgaccaccaaacaaaagctcagaatcctacctgactagtactaccactactagctagtagcgagctactctctctggtcatcaagctttgagtggttggagtggtggcagctatggctttttccatctccaagaaggctgcagttgctgcactcttctccttccttgttgtcacctgcgtcgccggcgccaggccggggaacttcagcgcctccgacttcaccgccgatcccaactgggaagtcgccagggccacctggtacggcgctcccaccggcgccggccctgacgacgatggtacgtttgccggtgcacctcggcgactgatcattccatcgagatgaaccaattacgttgtataattgaactgttataaataagtgtggtgttgatgctgcaggcggtgcttgcgggttcaagaacaccaaccagtacccgttctcgtcgatgacctcctgcggcaacgagcctatcttcaaggacgggaagggctgtggctcatgctaccaggtacactaaagattcagctcaaatttgcaatgacgacgggcgttgagccgttgatgcgaagcgactgatcgagacgtaggtattcacagtgttgttgactgtttgttgctggtgcatggcttctttttttcttcagataagatgcgtcaaccaccctgcctgctccggcaacccggagacggtgatcatcaccgacatgaactactaccccgtttccaagtaccacttcgacctgagcggcacggcgttcggcgccatggccaagccgggcagacgccagctccgccacgccggcatcatcgacatccagttcaagaggtaatagtttagtagtaggctagtagctcctgcaggctgcacgaacagaagcatcatcatggccaccccttgccttgcagttgctagcttgtgccgtcgtggagccctcgtacttttgggtgcaaacccgacagcgacattgcttgtatgtcctccgggacccaagcagattatgatcgcacaaataccactaaaactcttttaattaagtacatgcagccgctttacaatttgtcgcctctgcctgtcatcacctactactatactgccttgcatactcactctgaattaatctgataagaatgtaacactaacacatggattgttgggggtttggccatgcagggtgccgtgcaacttccctgggctgaaggtgacgttccacgtggaggaggggtcgaacccggtgtacttcgcggtgctggttgagtacgaggacggcgacggcgacgtggtgcaggtggatctcatggaggccaactcccagtcgtggacgccgatgcgcgagtcgtggggctccatctggaggctcgactccaaccaccgcctcacggcgcccttctcgctccgcatcaccaacgagtccggcaagcagctcgtcgccagccaggtcatcccggccaactgggcccccatggccgtctaccgttctttcgtccagtacagcagctaagccaatgatcaagaacaagggctgcagga

SEQ ID NO: 10580 - DNA, 1057 bp, Oryza sativa
atctcaccacttcggcaaatgcggcaaaccgaggtggtggtcgtggtggacgcggcagcagcactggaaacagaggtggcagacgcggcggcttcggtcgtggcggtcgcggccgcggcgcccctagcggcgcaagtcagggacgcgggcgaggcaatgatactcgccccgtgtgccaagtgtgtcacaagcgagggcatgttgcaagcgactgctggcatcgttatgatgactcatatgttcctgatgagaagcttggcggtgctgcaacatacgcctacggtgttgataccaactggtatgttgacactggggcgacggatcacattaccgggcagctagacaaattgacaaccaaggagagatacaagggaacagatcaaattcacactgcaagtggcgaaggtatgagtattaaacatgttggtcatgctattgttcctactcctagtcgccccttgcatcttaaaaatgttttacatgttcctgaagcggcgaaaaatctagtatctgttcataaacttgttgcagataattatgcttttcttgaaattcatggcaaatattttttgattaaggacaaggccacgaggaggacaattcttgaaggtccctgtcgacgaggcctgtacccacttccagccagattgtctttgagacaggccttcgttgcgacgccatcttttgagaggtggcatgggcgtcttggtcatccctccaagccaattgttcttagaattctcagtcaaaataaattgccttgtcttagtaattctgtcaatgagtctgtgtgtgatgcttgtcaacaagcaaagtgtcatcaattaccttttcctagatcaactagtgtgtcaaataatcctttggaacttattcattccgatgtgtgggggcctgcctctgagtctgtaggtgcaaagaaatactatgttagtttcagaagtttcatgaatttcagaaacttgttgaaaggcaatttgatcgcaaaattctttcgatgcaaactgattggggaggcgaatatcttaagctgcacactttctttaatgaaataggg

SEQ ID NO: 10581 - DNA, 1088 bp, Oryza sativa
actgttctaactcatttgcattcataattatctccaccggaatttgctttagttggtggaatcctttctaatattttttacctttcctttgtttcagctagcggactgcagtcctgatggatgcagtttgctgcttcaagtttgtttggatgaagtgctgctgaatgccgacgtggcaaagagctctcgattgaaacctgagctcttatcaactgttttcaagtattgtctggataaaccatacttcagcaccagtttttgtgaagcactgaagacagtacatgtcagtgatatgttccttgtaaaattgtcaaatgaacttaatctatctgctggagagagggttggagttgggcttgccctatcagattctggaaatctaggcttgattacgaaaggtaggtgcttggtagatcaatttccctggcttagtcatgtgtcagttctcattgaaatgcttaattacacctctattctttgctttatagggcaaaagttctcaatcgctgaaatcgaggagatatgtgcaaatccagcccatgttttaacaaatgatcaaattcacgatattgttgtgtttcttcaccagactgatggcctctcaaagcatatggattctttcactaacatcatctccctattaaatgtcaaagagatgccattctatgttcctgccccaattaaggaaggcaacgctcggccaacaatttcttcaaggtttgaagagttccttctatttacattatgcttcattttcaattttgctttactcatgcacatttcattgcctttttggcaccttacaggcacatggaactatacactggtagcttggatgatgattttgattcccttctatctgaaattgggaaagaaataagcatggctgacatcattactgaattaggctacgggtgtacttcagatattgctcattgtaaagaaatactgtcactatttgagcctcttgatgatatgggaatctctaagttgcttggagcagttgtttgcactcatgttggtcttggtgaagctcataatacatattcaacgttcatgtcggccgttggcaacagccaaccaagtga

SEQ ID NO: 10582 - DNA, 4773 bp, Oryza sativa
  unsure (1)..(4773): unsure at all n locations
gggtactcgcatgatgcggggcgtcatctccgggagcggcagcgcgatgtcgacggacgcgccctagccatcgcctccccgagctcgccgtctcggccgctagtcgggggcgctcgatgatgccgacggcagtggcggagacggggatggctgcgctcggcggcggcgcgaggcgggaggcggaggcgctcggagacgacaacgcgacgacggcggcggcagcggcgggggaggtggaggcggcagcgcgagccgacggggacgacgatggctacgttgcaaggcggaggcgggggcgcgaggggaaggcggaggcgacgacggcggcgcgagggggaggcagacgcagcgggagagggagagggtgggatgagaggtggcggcggctagggttttttgggggaggtggacgcggccgcggcggtagaggtgggcgcggccggggggcgcgaggggcaagaagcggcggcgcgtggcggcgacggcgggagaggggaagggagaggatgagggtgtgtttagttgagaaaatgaaaatttttgggtgccacatcggacgcttgaccgaatgtcggaaagggttttcggacacaaatgaaaaaacacacctcataacccggcnaaaaacgccacacgaatctnctnaaccaaaaaaacccatcannagnnaannangcncaaaagattcgtctcgtaatttcctccctaattgtgtaattagttttttatttatctacatctaatgcttcatgcatgtgtctaaagatttgatgtgatatttttgggaaaaaattttggggaactaaacgggcctgaggagagacgagagagaagagggcggcggcggctagggtttggggcagttagagttagtgcgcgtcgctttgcggaaaagcccctcgtcttttaagttttacatcgctgtccttactcgcgatttttccctcgttttaatgtatatccgacttttataagggtctcgacctaaaataacatctcacaggtactgtttggagggagctatttcgaattacaaacaaattggagggctttttcgaaaaatcaccaccgcgcgcactgttcctatcctacgtggcatagccgagcggacgccccttccgccgctcttaatggtttctaatgtgtcatttattccatactttgcgctggtaaaagttgctttttgatattttattattcttcaggcatatgcgcgaaccaaacgcacaaagcttcagcctgcctgatgaggcaagtgttacatctcccaacgctgcctgtccggcgtgagtttttctcaggcgtggccctcaggacacaaaccaaacaaccccttaggccttgtgtattatttacaagatggaaaaaaaaggaaaaagttcacttgacgtccctcattttgtcgtcgagttttgtaatactggatataatgcatcccgaatatttgcaaaacggtcacattaggtctgaagacagtatagctcccaaatttagttgacgtggcatgtgagtcagtgtgggacccatatgaaccccacatgtcagcaccacaagtccacaataccctcttccattcccatcccctctcttcccatatctctcatcgtgcggcatgggcggagccctagttgacctgatgaagatgctgttgctccttcggtgaggcccgtgagaagctttgctagggtttatccccgcgtcgccgccccaaaagatgagaccaccatggccgcggtccagtggtggtgttgttccagaccaacatcaccaaggctgcgcgaggctcggcgccacaacctccatcatgtttgccatcgctctacaacattgatggcaaccagcgcgccgtcatcttatatcggttccgcggggtgctgccttggacagtcgagaagaagcaggtggcatagcaggaggccgagagcgctccaattgcctcatcgccaaggctgagcaagaaaggcgcccgtgcatcatgcacactgaaggagactgttaataaccaaatttagtaatctaagtatcggagatgaggatgggattgaagcggaattcgagatggaaatcgtcatgaaaacagagtacggatcggctgaagtccgaatcggctgcggttggggtaggcagagttcgagtcggacgaggttagccgatcgagccgaatccggcaacgtgacgcggtatgcgttgtcgggttgagctaacgaacttcatgaggattgccacccatggatagagttttgagaaggcaattgtatatattaattaggatatttcatgtaatttccttagagatatgtttgggcaaaagtctgccgcaaagacttatggtatcttagagtttgttagaaataagagtcgtgtccgacatggacatattttgtaatctcaggtataaatagatcccgagccctatgtaatcaatctaacacacgttcaatacaatctcggcgcatcgccacccttttactttcgttttgtttcgacgagttcttgcttttgggttgagcccgcatcggtttcgatcttcaactagaggtaaaacttgttatggcggcttgcgttctcggtattagtgcttacatctttatgatactctaatattgcttatgtaaatcgtcgagttatcatatattttatgtaatctccgtcaatatcgctatctaaccttcaatcggctaatgtctgttactagaaggcagtcgattaggttaaataccgacgttgacttagattacataggatatcaaccactctatgaaacatccaacggcttgattgtctagatattgtccttattttcatacttatacctgcattagttgagtttgatcttatgagtcgtgattagaatctcaacctctagcctgtctttggttgccgattagggtagcatcgggtttcagccaatcttacctgatttaactatatttttcttatatgcttgattgacatgttaaatctgccctttatattaagatcttgttgcatttaggtatattaggctttcgtttggtatattctacttgctttaatatcttaatatagagtggtatcggagtattagctgatacatgctagatctatatgatcagctatgctatgaacatatatagtcttgttgctaatatatctttcgatctaagtaatttatactgtctcggcatggcgaccgatctatcccaataacttgatttaagtatatatcgacataaggattatatattgttaatatctacagccaatcgagtaaatttagttctttcttacttattcacgattgccgatcgatctacatatgacatcggctcaaagataaatgatatgtcatcggcaactagccgatcagctatcatttatggatttaaccgcggttctttgtctttatttcttgttgattgcaggatcaaattaactggcacggtcatacacttaaaggcaagcttttggacctgcactggagttaagcagatctccaaggcctcgtgtttttacatcaacagagacgtagccgatgatccttaatcccggcgtcccagcaaaaaacgctttccgaaccattgaaggagttattttgcactagttttcagagacgggggagatgttataccggttttatggttgagggaggaaattcaatcaggaggaagatgagggatgacttattccaaagggatggggagagcccttcaagggcatggtctgtctgatgggccgcgttagtcaaaaacctgagcagaagtaaatgggccaatcgttctgcatttcacaggttctgggctggaccatagaaattcaccgagaagcgactcgaaagcagtagttcgtgtcctcggaacgaacacgtattttctaatttacgtgtctcccaatcgtagccgacgacggtcggtagctctctttggctcctcggctcctctccatttcccatcacccggcgctcgcatcgcttcgcactcgcccaacatggcaagcactgaagcacccacacaccctacctccacacgccatagctcgctctcccagcgtggcgcttgccgccgccgccgccgccgccggcgggatgatccccttcaattccgccgtagccgaggatgtccgctccctggtgcagggcgtggacgactccaccttcgactccacccaccgcgagctctgccaggtaaacgcgagccgccctgccccgccccgcccgggcccgaaatccacggcccgaggtgcttcgtttcggcctggcgttttgcgcggcggcgattggttcgtgccgcggtcgtagatccgccccccccccccgtcgcttggatttcgtctttttgaagcgcctcaatcttgagggctgatctagggttttggcggatttatctgtcttgtgggtattgacgaggagcgatactagggcatcgcctttgatgctcttctccgcgacttaatctagggtttcggtgggattcctcacgattggataacgtgggatgtgttggttggtgttttttttttgttgcatagatccctcaatgtggtgcacgtgttccatggttcaagtttctcagtttgatggtcgtgcaaaatttactcttgggttggaataggacacttaagctttggattgttttgaatttagcctgacttgtggtcagatactcagatgagaattgtgttaagatgcatatgtttgtgaatttgtacaagattttgcattctttgtcattgcagatgtcttgggatgtctgtcttatgtttatacttacacaatcaactccgctggggtgcagg

SEQ ID NO: 10583 - DNA, 651 bp, Oryza sativa
tatctgtaccgttgaatctgcacttgttaagtccacttgtttgaaactcatggtcactatgcgccaagaaaaaagaaaagagttgattgccactgttagtgccactagcaattaacttctctgcatgttactctgttcttatattcttttatgttgatagttaaggatttggtcaccacttatgtttgttttttcatgcattttgtgtcagtcaaaaggaggtaggagacccagatcagatgatgtggatgccgtaactcatctttcagttctggacaatccatattactcagatcgtctttgtgaatttggtgctatgtttgccgttgcgaacagaatcgatgctgttcacaagttaccatggataggtttccagtcatggcaggctgctggaagaaaggtataagttaatttctcatagaatcatgtgctaattttggtcatattggattggcaatttggcattcttcctgctgaactttttttttcacagatccactttttgtcctttcattcaaactgtggaaattaattcgttcttgtattattgtccaatgctattattatggatatgccttatagtggctaaagctacttaaatttgtggtgttcgatatttttctgtactatgaactagacataatttttcac

SEQ ID NO: 10584 - DNA, 686 bp, Oryza sativa
tttcatctccatgaaaagcctttttttttttgggctgccatgcctatgttttccttttgttgttctatgctttccatgtgctgagattgcttgaacacttgaatgaggccgttttcaattgataatgacatggaaataagttttaaacattcttatgtcatcaggtatccttgtctgaaaaagccgaagaaaccttagaggaaactatggctggcgaaaataatgaggatgttatatactactgggcaccaatggatatggatcaaacttcaaacttttggtcaatgtgtgattggctaaatgctggtcgttgcaggtgcttttttaagtgttccctttcagtttcttttatgtcaaattcgaggaatagactgaagaactgttgtctaactcattacatgcttcttagtgtagtatagcttcaaaattggcctgcgagcaaggagtagtgatgttggttactaattttcctattgctgtttgatgtaatatacagttctatgatgcactagttgagctattttctacaatattccttttcttatcctgcctgcttagttttcttttattttgaacgcattgtttttttttccagaacactttttgaagacgcattcagaactatgtatgggctctcagatggcatcacagccctgccaccaatgcccaatgatggtgattattgg

SEQ ID NO: 10585 - DNA, 1714 bp, Oryza sativa
acgggatggcggcgagcgacgcgcgacggcacggcggtaccgccggtgcgcggcgcaaggcgatggacggcggcgcggtgacgcgacggaaacgacggcgacggcggcgcggggttaggggcggccaggcatggtgatggcgacggcgtcggcagaggggaggcggagcggcgcgcggcgcgcggggcgcgacggcaacgcggcaaaggaggggctagggctaggggacctcgtcgaacactttaggtgcaatgaacagtgccgttttctaattaacccgattttggcccatttattatttaaatttgattctttaattcccaaattttgcataaatgaagtatactcaatatttgtgccattccaatccatggattcattctagattaatttattccatgttttacatattattattgtaatttacttgaacttaattagagttaattctcattccattgcttttaaatttgatggatataaatatggtcgtaataatattttactcatttctatcctcaccaaatcttattttaagttgcactttaattatttactttttccatttactttttagggtttattcctaaccaattatctattattcgcgatttataaactcagaacccaaactccaataaaataatcgaataaaatcggcatgatgcaatttatttaaaaagtttttaaaaatccgcatttttagagtttagatttttgtcgtcgaattttcagggtgttacatcctctcttctctgttctttcccatcctcatctctctctccgttctctccgacaggcgacagcgaccggcaacgcggcttcccctcttctctcacttctcctctcgggcaactaccggggcgggtggggaggaggacgccggggcggccggcgacgtggtgacgggagcacgaggcgacgcggcggtgggagccggggtggcgccgcatccatgacctccggacggaatctcactgaagccgccgccaccacccaccgcagtggctctccagcggcgccatcagctcctccgcccgcagcgctgcctcgtcgaggtcgccttcgccgttgtcgaggacggatttgagcttgccgacggcttcgtcgatggcgtccaacgcggtgggagcatgaggcgacgcggacggcggacgcgaccaccactgtgagcgaggagacgatgtcgacggcgaggaggatgcgcgtgcggccgccggggcaccgccgacttgctggcaccctgcatagacgcgatcgccgctgtgagcgaggagacgacgttgatggcgaggaggacgcgcgccacggccgccggggcaccgccaacttgctggcaccaccgacttgctggcaaccaaaccggatcgagtcagatcgagcggaggaggagcgggagctgccgcggcggtgaggaggcgacggctccagtggaagcatacacttacgacgttgccaagcgcgacggcgttgaggaaggtggaggggcggcgcgggctggactcgtcggaggggtcgttgtcacccaggaggagggaggcggcctggcacatggactcggcgagctggacgagcttgtccatggcctccatggccgacgacgacatgggcggcgacgatgccgaggcggcgcgggcccccaagggaggagcggcgcgcggacacccgggggcggagcgaacgacgcggcgacgggcccggacggggctgcagg

SEQ ID NO: 10586 - DNA, 2856 bp, Oryza sativa
atatttcataaaattttttgaataagatgaacggataaacatgtgctaaaaatcaacaatgtcaaatatttagaaacggagggagtacacgtcattcaaatggttataaaagatatgaaaaaaattaacaagatatagtaatacgtgacaaaccactccacaaatgtgcaagttaaaatttattttttataagataaaaaacagattaatctatgcctcgttaatatatattcacaatcaaatttatttctttcgttgtaacatgtagaagttaaatttaatcttatatgtttgtgaagtgatttatttgattaatttttcataactatttagattacatgtaaataacgagggaatatccctcgagaatttagaattgtttctagtacatttatccctgtgatcattttggaacatgagctaattagtggtacatgtgtatacatatcggcggggtttatttggtaaaactttataactcttaaatttaactttatgagcgtagttttaagtgaaatgtgaagcggtctaaaccatactccacttctctagtgtattatttcctcactacttcaatccgctcaatttgctttttttttatgaagctgaaatcagcttaagttctagactttaagcctgtgttcgggagggaaccctccctccccggcacgcaaaataaagcagcatttagcgcgtgattaattaaactttagctattttttttactaaaatggattaatatgattttttaagcaatttttgtatagaaacttttttttttaaaaaaagacacacagttcagcagtttgaaaagtgtgcgcgtgtaaaacgaggagagggagttggtaactgctgggaacgaacgcagcctaagagtggagctgaagcaagagaccatctatcatatgatacagcacgtacttagcacttagcagggtttacattaccgtcggtaaccgcgccggtacggtaaatagaaaaaccacggtaaccttctcaaattcaaataaatttaaaaaataatatacatttttgataaattttatacagttacgtacggtttttcacggtcaccgcgcggtaaccccggcttcaacggtttgggaaaaccttacacttagcaggagaaggaaatggttttgtacgcccatcgtcctctcccttttgttagaacacttgcattttttttcttttccttgcacagagaaattgttagattcgaatgcgtccaatatataagcgacataggcattctcctctcctcgttagttattggcgcgggatggattacagcaattaccaaaattaagacactgcacctttgcccctcgtggcctcgtcgttagttgtggatgctagctgcttaatttctgtctttgcgtcataaggccgacgcaaatcaacgatcagctgttgatgagctagtatatcggtcatctcaatcgcatcgagaaatcacagtcgttcaagagtggtgtttagttccctaaaaaacttgaaagttttgaaaaagttaaaagtttaaaaaaaattagaagtttatgtgtgtagaaaagttttagatgtgatgtgatgtgataaaaagttaaaagtttgaagtagttagaagtgaactaaacacgatccatccagatagaaaaagaagcccttttttttcccgatggcccgaatacatcacgaactgtccttgacggcttgaccagcttggttcagtgaacaactgtcaaagaagataagaaccttacgcaactggtaatttaggattggaaatttcttgaaccacttgcaagtcagattatttctccttaccgcaggaatttggaatttgtttaccacacctcttcgaagaactgtataggaaggagtctacggggcgtttgaatcacatgcagagagcaatgtaaccaaccaagggaccgagaacggagatatgtaagagaagaatgaaagggttgcaatctgagttcggatgggggagattggaatctaacacctactcacagaaaacggagcggtacattaacacgtgattaattaagtattagctatttttttaaaaaaaatagattaatttgattttctaaacaactttcgtataaaaactttttacaaaaaacgcaccgtttaaccgtttgaaaagcatgcgcgtggaaaacgagggagagaggatgggaaaaggtgcatgcgaacacagccgaataattgacggaggacagagatataattgtgttttggggagaattgacggagagaaatggaatggtgttaattttggggagaagagagcgacctccaattttcatataatcgatgaaattatacaagaagtgagaacttggagcacgggtggagcaaagcgccaaatagcgtatcacaacattattaggataagtttttcgtaagcgctgagtgctgtgtgatttagccgcgtttccctgtacataacaatgatttttcgttgtttttctcattctctctcccctatccataatataattaacgtcggcaatggctgacttttcgttcaaaaatgatagcatcaacctgatgaaaccactgaaaacggcacgcgagaagcaacatcgctgcatgtattatatcattgctgacgctggagatattaagctccattgcgaggccaagattttgcaggccaaaggaccacacatcacacagttcacacatgcatgcaaacacatggacaacttctaactttctgtcgagaaaattacctgcccaaaccaaaaagatgtcatcgcgctgtgcgctacccagctgtatggaccacgacgtccgtttttatgcattgatgagtttggggtgaatccaagctggtcgatctgatatgatctgatc

SEQ ID NO: 10587 - DNA, 1192 bp, Oryza sativa
ttaaatatacatattgatctatcttattcatattttttcaattttttttataaccatttagatgacatgcaataaacgggtggacatccactcgagctattaaaatagtttcccctgggtagagtgtaaaaatggaggtaggtcgatcgcttacacgctcagattcgttatggatggcagcggctcggctcctcttggtagaaatagacgatctcatcgccccttcccctctgatcacgacgtgctcatcctcgtcgcacatgccacctctcttttaatttttcaatgcaaactctttcagcgaattattgataaatacaaacgcaagcaaacgaaatctgcgctctgaatacgagagtgaagatgagaagctagctatggtactcgacgtgcatgaaaaagctagctactatctgtgcttgcctgcgattgcgagcgacggctgaagcaacgcgagtcgctggcgccgccggcgatgctggtgttctccgtctccggcgagcccttgtcctccgtcctgtcctccagcgaggtggagttgttggtcgtcgtcgtgaacccgcacacgtcgtcggccgcggtgccgcagcaggcgtcgagcgtgagcagcgtgctctcgccgcggcgccccggcgcggcgctcccctggctggcgcacgcgcgccgcccgtcctcgccgaccacctcccgcggccgcttgctccgcccctccgccgcgtcggcgtcgcacggcaccagcgcgtcggccgccgccaccaccccgacgctgccgagccatggcgcgggcacgggacgcgcgcgcgccgcgaggtgcgacgactacgacgaccgcgcggtcgcctgcggcaccaccgtctgcagggtctcgcggtccctgaccacgccgccacctcctccccctcccatggcagcctgcagctgctgatgcggcgggaacttgggcggcgcggggcggttgagcatcaggccatgcgaggagatgttgcccttctcccacgtcagctccgccacctcgttgtatggtccgacgtcggcaccgccactggcatgaaccctcccccgcctcccgacaagacgcggtgcccgccgccgccgccgccgccaatcccgccgccacccaccgggtcgtccagatcccagctcggcacgccctggttcatgatcgatcaacggagtgcacgagtgaatgggg

SEQ ID NO: 10588 - DNA, 5751 bp, Oryza sativa
tccatttccggacaccggcaatggattgcacatgcatgtgcagctcagatgcaatgcagcaacaactttattaggtttaggatgtttttttttaaaaaaaatttcatcctctgccagactgcaacatgctcgtttttggctactagcagtaggcacgcctcccttctgcagccaaacgtatgatgcgtgccctgctattatacgccaccggccaccccatttccatcttgtagtaaaatgctttttatcaatcaatgggccccaatccgattaacaaaaaaagtaggacacgattattgtatttccacatgaccagtaaagcaggcagcatatgacaagattagcagcggagtaattctcacttgtgtttaattaacttaatggtggattcgtgtgatgtgatggtgcagggtgccatgcgagttcccggggctcaagatcgggttccacgtggaggagtactcgaaccctgtgtacttcgcggtgctggtggagtacgaggacggcgacggcgacgtggtgcaggtggacctgatggagtcgaagacggcgcacgggccgccgacggggaggtggacgccgatgagggagtcgtggggctccatctggaggctggacaccaaccacaggctccaggcccccttctccatccgcatccgcaacgagtccggcaagacgctcgtcgccaacaacgtcatcccggccaactggaggcccaacacattctaccgctccttcgtccagtacagctgaaccgccgctcgccggcggcgaccctcggcgccggcatcgccgccgctgctgctgctagtaatactactactgctatgatgtaattgtgttaccggttgggttctttgagtttgttggggttggggattgtgtggtcggtctgtgttgcgatttgcagaaaccgggcgagcgaaagaagaaaaaaaaagctgtgtgggaaatggaggaggtaggcgtacaaggttacgctctcccgcccactctcgcttttataatttatcattttcaaatggtgatgatatgatgattaatcaaaaggattatattgctacttaaattgtatggtactaccattagcttgctgtgatctgtatctatcctccctgtttgcgtacctgtgctgtgccattccttctcaaatctcatatcgctggagtaacacgcatttgcttttggctcacagctagagcatctctatgccgattgccgagaggaaaagcaatgccggtgttcaaagtaaacttcaaatttggaagtgcagaaaagcataactgaaatcttggatccctaccgtgtgtatcccaaatggttccatttcgcgcgcttttcgcggtatccagttcccgcgcgcggtaaaattacaaacatgaaacatacggttgtacactactcgtacctttgcttttctgtgattccgttggttagttactgacatgatttggttgccggtaaagtggtaaagcacgcggccaagattatccagcctcccagcattgcgccgttctataaagctcctgacaaggagtggcattttccgttcttttttatcctatcagcatagtgctgctactgctactacttgacttttggagtagtactactagtactgtgctaaaccctttttttttcttcttgaaaccaagaaatgtttggggctcgattcagagtccggtcaaacagaacagggtcggtccatctatgcagcgttacaatagcttgcagccaaaccatcccatctttgctgatgcgtgtgcttccgagttattgcggctcatcgatccagatctcatctccgacgccggcatctttatctactcctcctcctactcctgcgtgaacatgccacagtagcactattactcatcagagttgagaacatgcaatgcaatcatgcagcgtgcgagagcagcagcagcagccgagatcagacattcacaaccgagctccgatccacgcgtggatgcatgtattgattcctacacactctgcgagtgagtgaatgaatgaatgtgcgtgtgtatgtgttcattgatgcagatttggatggagcaaatgcaacatgccatgccacagcatcgaataaattgctaaactgaacacatctactcctactttaactctacatgctctggcttgccggtgccggagctcatcacggtgcagccggagctcatggatggccgacacggtgacattcgcggcgcctttttcccccttttctttttggccaatatggaggagtggtacatgtccgcggatcgagctgtttccccgcggtccgcggcatgtgcgcctcgcctacatggatggatagatgtgtgtggcccaacggagtcaaaagcctaacctgtactagtactactcggcgtcgacctgtacggcatctctctctcttcttttcttttcttttctttttttcagtttgtgcatgcgtcggtgctgctgaataatgttgccgccctgctctgctctacctgtttaattatccaattccatggagctacaactacaatttggtgagtgcgctacactgttgataggtgttcaactccaccctccaactctcaagtgtagaaagatgagttgcaaagggagaaatcatcactttgttggccagattgtgttggagcactgagagaagaaaaatctgagagaatatacttggggcagggagcagtatggagatagagggttttgggaggtaaaaagatctgcgaaaaaacgaacggttgacaagctaagctgggcatgattggtgagctgagctccagtgagtactctctacattcatttgccggcagacatgaacagcggagacgaaagtcagacaagatgatgaattgacccccacctggtccatcagaccaaagtgcaattgcttgcctctacaaaaacacagctgtacatgaccatctgccggtttatacaggtcaagacaatataaatatactgtgcacctctaaagaaaagagggtagaaaaatatacaccatgccacggttgttgtgacgccgtactatttcatatctaaccacaagattaggaatttactccctccgtctcaaaatataagcatttttagccgttgtccagattcatagccaaaagttgttatattttgggacggaggtagtaggcaaaataatattcagtgcaaatacaacaactagcattttacatgtactacttgtagtaagtaccatgtcacgatcattgtctggagttgcttggctggtcctgctgctgctgctgctggtggtttagcttctggtacattgccatcatccggttgtacgcctccatgccgttcggttgctgcacacatttgtgccaagcaattcgtcaggttccaagttcaggttgagatgatggcaaaatgcaagaacgattctactggagtactacatttacctgtgcgttttgctgcgccgcttgggaggcgaggaaggcggagaaggcgtcggaggtggcggcgccggtgggctgcggcggtcggtcggcggcggcggcggaggaggaggatgcggcggcgtcccaggagacggggaggaaagggggcgtgtgcatatgcatgggcgcgtatccgccggcctggcccatgttcatcatgctgaggccgatctgagccatctgggccatctgggccatgacggacatctgcagctgtggcatggccatgcccatgggcatcatcatgctgcccatccggctcatcacctgcacctgcgcctgcagctgcttcaggtagtcgatcacctcgtcaagcatcgacgccttgtcagtctggataaacgcaccacggtttacacgaaccgtcaaaatttagttgatataaatggtgatgtgtgtgtgtctatatatatatatatatatacatatatatatacatatatatatatacatatatacatatatatacatatatatacatatatacacatatacatatatacacatatacacatatacatatatacatatatatatacatatatacatatatatatacatatatacatatatatatatacatatatatatacatatatatacatatatttgttggagtgatatagtacgtgctaaattaatttttacaaaactccagctaataacgatgtcaaccgtttgatttaaatagttaaaagttgaaaattttcaagaatccaatcaaggtatgacacgtcagtgtttataaagcttctaagtttctttttgtatttatatatattttctcccgtttatttttttttaccaatgtacgtggatttaggtttgtttgctgtcgtcgtctcaccttgcttgaattgggaacgagcttctgcaatgttttcatcttttggttgatcctgtcccgtcgtttctgcaatcaacagtagaccaaatgattttttagttagtcgaaattagcaaacatcgtaatagtaatattctagatttattttttttccaaaaaaaagtcttttgagagagaaatggagtttttagcccatggatgggcaaacaatttttacccacgggcggttgtgttctgttcatacttcatagcaacaagctggtcatttttagtcctgatgactagttaaaagaagcttaaatttttaatccatccggtcctgttcggaactgcaaccggcaaatgagactatcacgggcacagttcccaagctctgatttcattaaaaactttgttcatcaatatttttttctttaaaaaatactttctattttttatatgcaattcattcgtctgtgcccttaaataattttcataaattcagtttttgtaatccattagctactcctaattcaaacgggacctaatcaatttcagttaagtaaacatatgcttcaaaactcacaagagtcaggtaagcatatgcatggcgacatacacatcagcttggaactgaaagtgatattggcatcctcagaaagttgcaatattgacgaaccttccatcaaggcgaggccaaaaaagatatcaatgaattgtgatagctatctaaaacgtatcctatagcttgtgatactaattaacaaacgttgagttttcaactggctgctgtctaggatatcattggtctaaaaaaacaaaaaagagaactagttggcatgtactagctagtagtgacctttttcccacaaaagaaaatgaaattcttaaatcagttgtggatgcttggaccagattctcagttccgacaatcacaaaaaaaggaaaaaaaaaaggagctcaatgcatgacatctccaggggaaaagtacagaagtgttggttggtggctcaaaacagtagagtggatacttggagcaaatttagccaagaaaactcattatctaggtagtagaatcatgtggacatccatgcttacgtgattattctttcgcacaaaccttaacttcatatttgatgcgtggaaatgtgcagtactgtataaactatacctccttccgtctaaaaaaaatcaaacccagggtttgtgcgtccagatacaaaccttgggtttgaatttttttccggggaaagaatttttttttcagaatgaagatatagtactagtactagatcggtaagcaattttagatgtataatacacctagatcatatttttttttaagatagagaggctaacctttgcgtttctattaagagaaatgaacttcagctacaaccggatagaaagaaaaagaaagacttggtgcatcatttttgcttttcctgtgatgaaaaaagaaag

SEQ ID NO: 10589 - DNA, 2502 bp, Oryza sativa
ctgcaccccgaattcgcgaataaatccctccaaaaatttgccaaatggatggttaattaacaaatcctttctgtatgaatggctgctagcctggtacggtagcaatcctaccactgttcatagggcagcttttcttctctctaccggcaggccggcttaatttgccggcatgtaacgatcatggagaaattgcgggtagttgcgggcatgcatgtgggatgatatgcaaattaaggacaaatggagtcaaaagcggcaatgcgtgtgctctttgtgcatgcattatcctgcttgtttttcttcatgcacatctgtcacaatcgtttagttttgggttaactcagtgtcagctagcgaataatgccaggcgctaaagatgaacgtaacggcaatgtacagctaggtagtagctcttccgtcaataatgagatgaaaaggagatcagtggggattagtttgcatgtagtactggtagtaaagcaagctgccggtatctgattgaatgtaatgtcaagtctgaaactggttcaggttagtttggaaccagatgcactctggtctactgcaagggaacctcccctaaactgtcatttatactcacgaaagggatcgcgatttttcaagtagtcgagtgtacagtagtataatattgttgaggttctaatcttcattctgtgtaaaattgccaaaccatatagataaatcaaagattggaattgctttgtagcttcaaacaagctcaatatgttttgcagcaaatataagaaaacaaatttttgcaggatgaaggtgtgaaagcacaaacatcatgggtgtacgggtcctctgtttacaaacagtactccactacctgagaaaaaggtcgaaagcaaaaaaggctgaagcacgaacaaagatccaaaaaacccatatctgaactatgggcgcaccaacagcatgaaacgggcacgagaagaggatgatgagacatcaatcagttgtttatcccggggagaagaagagaacgcatgcagtaacaattacttggatccacaatataatttcgtgtcatggcacattggcatggagcatgaacctttttttctcacggcacgcacatgccgacatttcaaaacacaagaagcagcaccttctgttctcgttctcttctgagcctgatcggatgtggtttagctgagctaagcctccatgtcagtcaggcagtgaggcagaggcagctagctgagctgaggccagcctatctatctaccggccccaactatcatctgccaacttttaatacgcgctgccgtagcaagaagaagaagaagatgaggaagaggaggacggacgctgcatgtcaccgtgccaggccatgtgccgcggcccaacatggcacgttctcccctccagttcacttctctctctgctcacacacactagcctagccagtgtactagtgttgtagtgtacccacctcgcttataaatacccggttccgcactacggccacacaaaccaacacccccactcatctcacttcactctctttctcttctcttcacttcaccaccgccacctctctcatcggatccctgcagaggaggagagggcagtggcggcgaaaggcgacatgggctcgctgtcctctctcgccgccgcggcggtgtttctctccctcctcgccgtcggccactgcgccgccgccgacttcaacgccaccgacgccgacgccgacttcgccggcaacggcgtggacttcaactccagcgacgccgccgtctactggggcccctggaccaaggccagggccacctggtacggccagcccaacggcgccggccccgacgacaacggtacggcttgtgatatctttgctcgtttttcttcttcttctccgacgatctgctgcttctttccggcaatgtggctcacaaaatcttgatccaggcggcgcgtgcgggttcaagcacaccaaccagtacccgttcatgtcgatgacctcctgcggcaaccagccattgttcaaggacggcaagggatgcggctcttgctacaaggtgagtagagtactccaaactaatcaaaagattaaagaaagaaaaagaagcccatttacatggggggcctaactgtcaaagcagtgcatgccgttgcagtcttgaccatcggtccgcagggtgggacccaccgccgagagcatgtgcgcgtggccccctccaccccggttttcggtggcagtgattggcgcgccaaatgcattcaatgctaatgttttttcttctttttttttctttttaacattacagatcagatgcaccaaggaccagtcgtgctccggcaggtcggagacggtgatcatcaccgacatgaactactaccggtggctccgttccacttcgacctcagcggcacggcgttcggcaggctcgccaagcctggcctcaacgacaagctgcgccactccggcatcatcgacatcgagttcaccaggtcagtgaaagaaaccacattgtactgtac

SEQ ID NO: 10590 - DNA, 2365 bp, Oryza sativa
aatgagaaaacatctgatcaagggggagaggaacatcatgatcatctgtttaatatctctatgccaaatgctactgatatttcatgtgcagaatctcccagaaatgtgaattcagatataccgggggcatttggccgggtacatggagcaaatggcgacttggcgggagaatccgcctcagattcagcgtcggtctaggcgcagctgcagcggcaggcctccggatctgcgacgcaaggggagtcggagcagcagcactcgggcatccaaccagcgcgcgccacgtcgcctgctgcatcgcctactgctgctcctccatcgcctgcccgtgctgtcgcgtcttcgtcaggtggtgcgcagcagtcacatcagccaggatcatctgcgccgtctgagtctgcacagctatctgaggtaatgcgacctaaaacaaggttacaaagtggtattagaaaagagaaaatatacactgatgggacagttagatacagttgttttacatcttctggagaaccacaaactttgcatgaggctttaggtgataaaaattggaaagaagcaatggatagtgaatatcaggctcttatgaaaaacaaacctggcaccgagttccttctaagaaagggcagaatataatagattgtaagtgggtctataaggtcaaacgaaaggccgatggcagtctagatcgatataaggctagacttgtggcaaaggggttcaaacagagatatggtatagattatgaggacaccttccgtcctgtagttaaggctgctactatcagaactattttgtccatagcaatctctagaggttggacccttcgtcagctagatgtacagaatgcctttcttcatggggttctagaggaagatgtctttatgaggcagccaccaggttatgaacagaaagatggctatgtgtgcaaactagataaggccttatatggtttaaagcaggctcccagggcatggtattccaggttaagtactaagctgcatgagttaggttttaaatcatctaagtcagatacatctttgttcttttacagtaagggagatgttactatatttatgttggtatatgtggatgacattatagtagccagctcatctattgttgccactaatgctttgcttaagaatcttaatcaagaatttgcactcaaggatctaggaagactgcattacttcctaggcattgaagtgaaagaagtaaatgatggcatagttttgacacaagagaaatatgctatggatgtgttaaagagagtgaatatgagtgactgtaaagcagtcaatactcctttgtctatttcagaaaaattaagtgctcatgaaggtaatcctcttggaccagaagacagtaccaggtacagaagtctggttggagcattgcagtatttgactctgactagaccagatttatcattttcagtaaataaggtgtgccagtatttgcatgcagcaaccactaagcattgggtggcggctaagaggattttgagatatttgaaacatacagttaagcttgggctaaaaattagcaagtctaattctcttcttgtaagtgctttctctgatgcagattgggcaggatgtttggatgatcggcgttctactgggggttttgctgtttttatagggcctaatcttgtgtcatggagtgcacgtaagcaggctactgtatccagatctagtacagaagcagaatataaggctttggctaatgctactgcagagattatgtggatacaaaccttacttcatgaactgggaattcaggtacccaaaattgctaaggtatggtgtgataatattggtgcaaagtatatgacagctaatcctgtttttcatgctcgcaccaagcatatcgaggtagattatcactttgttcgtgagcgggttgcaagaaaacttttacaagtggaatatatatctaccaaagatcaagttgctgatggcttcaccaagacactgtcagtcagacagttagagatgtttagaaacaatctaaaccttacaggttcagattgagggggagtgttagatatttctcacatatgataatgtaacaaatagcgaaggataagagttgttgggatgtttagatagataagataagtttcctatgttttagtagatgcacaacaactctatccgagctatatatacctgtattctgttaagcccggttttgtggcaagtaattaacacgtaaactcctcgctgaaggagttctctccacagtccctcctgaggctctcgtcaaatatgacatcgatcgcgagcgagatgcgcatgtacacgctgtatccttgcatgaaggacacgatacccccatctcatctttgtggccgatg

SEQ ID NO: 10591 - DNA, 550 bp, Oryza sativa
tggtggggctgagcccgctgagcgagacgctgtggcggcacagcaagacgatgcccggggcggcggcggcgctcatcggcgacgtgtcggcgaggctgacgtggaaggacctatcggtcaccgtggcgctcggccccggcaagacgcagaccgtgctcgacgagctcaccggctacgccgagccgggctcgctcaccgccctcatggggccctccggctccggcaagtccaccctcctcgacgccctgccggccgcctcgccgccaacgccttcctctccggcaacgtcctcctcaacggccgcaaggccaagctctccttcggcgccgcggtacgcatacaaaaatcatatactcatgtagtactccatacctagcttcttgcttcacttgttttatccaacaaaatcccatttctaggaatcaaaattgtctcgtaccacagcccttgctatactttactgtctccttagctagataagttcagtcatcatccataataagtatccatcccgtttcagcattaatagtcaagctaactaacgaactag

SEQ ID NO: 10592 - DNA, 711 bp, Oryza sativa
ctgcagccccctttttcatccaaaattaagctgaatgaaaactgaaaactgtcacaataccatacctttataagctcaatgaaagtaattagtagcccccacgggtgagggcggttaactattagccgttccagaagtaccctagttatttgctcctggactatttcctgcgatttcagattagttcccatcagaaagggtgtatatttgcatacaaacaaaaaaaggagaccacatagtaagtaatcatccgatacctggtttgcctcagaaaacaagtaaagaattatgaaggaaaaatagtgtgtgtggttgtttggatagcgcagctggttggcaatcgcatgaggaggaggtagcgaccttctgtatccgaattcattacaagatttctgaagagctctgtagctgtctcaatctggacatccagttgactttggttcatttgctgcgccgacgctgatgcattcattttattaagctgcaactgttgcacagcctgaatatatcaattgtatcagattagtgttgtcaggacctcaagaatgtgaagaaacgttgacatgcagcagagtcaaacaaagcttagccacgccacgactataattgtgaatcaatatcatatgatgcatccagttaaacatggtcaggccatacgatagaataccaagtatgagcatattacatgagtagaaggcgaacacaaatctg

SEQ ID NO: 10593 - DNA, 690 bp, Oryza sativa
tgcttggtggagtactcatcaagcacacactccttcatggccgcagcggtcaccgacggcggcgaagatgcgaacaacaactctagtgtgtacttcttcgcgagcggcctacagaacaagcgaaacacttatgacagcaacaaaaaaacggatcacatagctaaggtcggcagattagggacctgagcataggcaccatcaacgcaacgtgcgcgccattgcggagccctgaagccgtttgtattcccctttaatttgtctttacatttttgtgaacattgcagctagatttctgctctaaaaaccaaaaactactgatttttgtaaataaaacagagaggatacaatataaacttctaaactactctaaaatttagatgcaaagaaactcaattttcagatgctatattacttgcaaaaaaaaaaacttgagatgtaaacctgagatgcaaagaaacgcataccgggagcaggcacagcggtcacggtactgcaaaccgcgcagcaaaccgacgttgctctggctggacggcacccaaagcagacgagctggctttgggcccctgaaattgcacaattatggctcttcagagttcagagactgactgaatgtcacatttcagcagctaacattttcattttcagacaacaaaagaatctaccatgcattaatttcatttaagacaacaa

SEQ ID NO: 10594 - DNA, 3643 bp, Oryza sativa
atggccccacgctactatcaagctcggcaatgaggttgcccttttatggttacaaagaaggaaaaaaaaaagtggaacaaagcctcggaggccggaagcatctagactcgcggggccatttgaccaaccgaaactcgacggcccacccaccaaccaccaccaccaccaccacacccgctcctcctgctccaccgcactctgcagtccgcacccgcgcgaggcttccgctccgctcccctccgatccgtggcctcctcatcgcccctattaaacgggaacccagcccggcgtccccttctcggcttcctcctccaccatccatccatccgcgcgcggtgcgtagtagcgagaagagaagggggggagggcaaagcgatggctccgatgaagctgtacgggtcgacgctgtcgtggaacgtgacgaggtgcgtggcggtgctggaggaggccggcgccgagtacgagatcgtgccgctcgatttctccaaaggcgagcacaaggcccccgaccacctcgccaggaacgtacgtgcccaccgcccctcccctcgctcgctagttgtttcctttctttttgttacgatttccctcagtcgacgacgagatatgttgtttccatgccctcactttcagtcaacgggagcgattttgctgcggccgctaatatcttgggacttgggagttatcacccaataagaagtctaggagttctacgatgaggcgtttaggtttaagacgaaaataaaatatgtttaagaagtactgtgttccaagtagacatatgaaagaggtatatatagtttcttccggtaatccttcaataccacgaattttgggttctgtcatccacagcgtagacggtagtaatccttgcttcagcatcaaaccaccctttctccgcccccccccccccccccccacaaggctaacatcctcacttcctgcaaccaccaccgacgctgccacgtacacacagcactatggtatgtcatgatcatgctatattaggctaccattttgatgatgtcgtattcgtatagccctcaagtggaagatctgatctgtccatcttagatcgaatggctgatgttgacccaaagaaattatggtgtgcttctctgacttgctcctgggatttagacgatctccagttttctatttgagaggtttgtttggatggtgccctgacctgagcgctctcactggcatccaaccacaggccaccaaaatcggacgcctgttctcagggtgtgaaccaaacaggccttgatgataaatgtgcgcagctttaagttcaagagtatgtagcaagatttgggtgggtgaactggatcaaatgtggaaaagtttattgtttatatccgttcaaagaacagaaatttgtagttcttctaataaactgttcgagagaaggtgaactggatcaaatgtggaaaagtttattgtttatatccgttcgaagaacagaaatttgtagttcttctaataaactgttcaagagaattgctaataagaatcgatttcctgccatgttaatttgtgaactagttactcctgatctccaaatccatttgagagaaagggaaagggaaaagtgactggagtgaaggaagctataggtaggcaaagaacaaacaaatgcctccatttaattttctggggaacaaaggaggcgtgataattaggtgatgaggtttagaatttaaaaggaggtagtagatgaccacttgtcgctgccaggtgtttcctatagtaaatattgtctggtagaccgtacagtattgtttgaggagaaatttttttaatcaactctgcatgcttcatcagccttatcctgaccaatataaatttgctggctgtgctctattacttctaacattttcagtgtccaacttatggactttttgcctcttccaaccattgaacagaggaatagatgggaatgccatcttttacacgtttgttatacaactaaccagatgcccatgcattgtaatggtttctatttttctaataaatatgtcgtattttttaatttgagaactcctaaaataaatatagttttcaaccaaacatcaatccataaaggacattattaaaagtcacatgcacaaatatcaacttcttagataatcctggcaactcaaagaggtggtaggggctggcacatttcaccaccggcaccaccattagcttcctttatattactcatgtttgatggtgatatatttatatgtgtatgcttttagttggtttgtgatgtagcaatttaattttttacacttgttaccatatgtcacctttctggaatctgttatgtcgtgagtgaaggtccctatccataggattatctcaccagcataactttgacaataaatacatttgtcgcacttgggggataactatgacatttgtttgctaaactcattgtttcttgtgatatcctctgcagccctttggtcaggtgccggctttgcaagatggtgacttgttcctctggggtatgatgctatctcttggtgttgttttatccttttttccccctcgtaaataaagggaactgatgctttagctgatttttctttcaccgtggaaactatcatgcctcttttcctaacatatactaacaacgctagcacatcctcacatgaccttttttctggaagcacctgattcagtgttatggatattctttattaaaggataaatgagtccttttttttgccgggttggccaaaagaagcgaccaaccaattgcattaagattaaaaggaggtgtctacaaagataaaaggagtctgcgaaattcattaatacattatggtgaaaaatacaattaataaaaaaaaggaatagccaggaggaggctaggtatcttggaattaagaagaaaaggttcaagaaatccccgaggagaaaatttgccagattcaagattcaaacccaggtgggctgtgggaacaaccctgcaacaaaccacctcacccaatgaaaagtacaattcattgccatcgcgaactgtcattgtgttgtcagggttaaggtttttattggtaaagtattaagagtaaccaaactgagccttttagtcatgcaccatagtctcatggtcgggatggtctcaaactgatgaagcaataaatttcttttgaagaatatgatgaaacaatacatactattactgccaattacgagttcaagccaatgcctataaatcatgtttataattttaattcctacgacaggcatagtattgcagttttgggccagtctcttagagtaagagaccactgttgagcatatgcctgtagaatcttggtcatttacaaatgttgtttttttaaccataactgatagctctgtctaatttcttcttgttagaatcacgtgcaatttgcaagtatgtatgccgcaagaacaaaccagagctgttgaaggatggcgacctcaaggagtcagcaatggtggatgtgtggcttgaagtggagtccaaccagtacactcctgcactgaaccccattctttttcagtgcctaatccgtccgatgatgtttggggcaccccccgacgagaaagttgttgaggagaaccttgagaagctgaagaaggtgttggaggtgtacgaggcgcgcctgacgaagtg

SEQ ID NO: 10595 - DNA, 1125 bp, Oryza sativa
cgatggtgagaggtttttaaccattctattccccatggtgagtagatattaaccatccccgtcacctaataggtgaattcaccacggggaaacggtgaacgggtccccattgccatctctaattgcaactccagttcaaaattttggacccccggggggggcaagtgattattttggctaaaattttcggtttttctcgatttttttaatttgatcaaaatttagtcaaattcagtaaaattaggctaaaatttcaaaaaaatctgtccaaaaagtgttgaaaatcctgaaattttcggtagaaacgaaatgagcgaaatttcggacatactagcttgctaagatactatgccacaaaagttataaggtttattatggttgaaacagtggtgttttagcaaactatgaattcatttgtatggaactccagtaacatacataccctcttttgagcattccatagaattcctttcacacacatgtgcagcttgactagtaacgtgtacaactccgtattaattgcacactgaacattgtggaatactccactatatttcatcaggacaaaggtgtgtataatactgttttgttatcacaaaacaaagaaaatttaatacctaattaaaaagtcctatcttgttaatttacatgatcttttgattcccataaacacgtacggatcataacccccaaaattatccaaattatcccaagaacaaaagctgcacaaacaagatcaaatatatcacatcacaaatccataaataattaaaaacgagctgacaaattcccagaagcaatttttccttgccaaaaaaaatcactccgaccatcatcagctcagagtgcaagcaacgctcccatcagcagcagcgccgccatcgtcgccgcggcggccgggacgacggcggcggcggcgccgccgctcggcgacgagcccggcggcggcgaggtccccggcgcggagctcttgatcgggcacgcgtagccgcactccgccgggtcgaccacccggtagacgcccttgctggtgagcaggtagacgtcgccggcgttgtcctcgccgaaggagaagatgtagcccagcgacggcaggtgctcctcgccgcggcggcgtcgcagggg

SEQ ID NO: 10596 - DNA, 1513 bp, Oryza sativa
ctggatctggacaaggaatacggaatgaagagatggtgtacccgccgagatagaatttcttgacttcaatccaaattctcgattacagcaagacatgagacttagtcgtacactctgtactttcttggttgacatcagagattgactcagacaaaccctttaggtacccgcacgaggctgacaaaggaagtctaacgttatctctgaactcaccgagaacggtcacatgagctagataacagttactccaaggtctgcgcgtggttgagaatatgaattcgttcatttgcattgaagtcgggggttactgtcagggttatggatacaaaatacctaatagtagttgactacatctcggcaggacccaccacataccatgtcctatacggaaacaaccttcggatataggaggagttatgataaggaaagacaaccagagttcttcatggaaacgacaaggactattcggattgtatccatattggtttccctagttctacttggacaaggggacacctatgggtataaatacaagaccccctaggaggggaagagggcggacacctaccagggagaaccaacacaatcaacacggtcaccacgatcgagacccaccacgagacaatcaactcccaacacaatcaacatagaagcctacatacgccaagacaagccgccggatatcgacatcagagatacgcctagatcgaccctatccggtaccttcagaggccggccgtagggatctagcactatctctgattccgtcgggcgcgagcttgaggaggaaggctaccctgttgtcgactacgagtcagaccttcagaccgccatgtcgacaacagttagatagactaccccacatattatactggtgtgattatggtgaataaaaagcaacatcggctccggccaacaggatgtagcgctattacctgattgctcaggggcccaaacctgtataaaaatccctgtctccatctcttttacctcagtctcgcgtataccctagcaccgacgatccccatactgtccaaataccgtagtcgagacatcaaacgtcaacaggcgcagattggacggaaccctaatgacgatggcattttttggacacacacttgtcaatagcatttcttggattttgacatttgtcaattgcatttcttggattatcacatttaattaagtttgaccaggaaaaaaatcaaagtgacatagagtattatattttaggatggacgtagcattaatctatcttactaatgattttttggacgacaataatccatctccgaggtatgtgacctggtgccagtcagccggtttagcttaatatgttcagcccccacctcctccccacccacacaaacttttctattttattgttggatccgcctctgtagctactgaagtgtaacagcagcagcactaggccaggatgccactgaacagctgcagcgccggtggcagtgtcgatgtaatatgtgttcccttcgtcttgaaaaaacaacat

SEQ ID NO: 10597 - DNA, 2340 bp, Oryza sativa
gatgggcccacgtgcaaccacatggcgcaccgtggtctacgcgcgcacgtagggggaagcgaggctagccggtttgactcggtctagccgagttggcaccgacgtggcgcctacgcagcggccacgtgggccggtaacaggaggaagaaagggggcccggccgaatggacggcggacggcggccgagttcaccggagcttgtcgcgatgattcgagagagagggagcacaccggaacgatgagatggaggagatagagtgcgccaccggctcggattcaccgaagggagaccggcgacgacgaattgcggcggcgctcgccggcggcgagaaaaggggcaaacggcggaggggcgacgaggattcaattcgaggcggtggaagcatctccggggttcaaggagtccgtttccggcgtcggatggggcggaagagcaccgaggagggccggcgacgagcagcggcctccaagagcgggcggcaacggcggcgaggccataccgggcggcggcgggtctaggggcgacgtctacgcgcgttcgggagtgccaccgagctatcacgcagactagagggggcgagggagagcaaggaaggggaacgggaggaggcactaccgagctgggcgggcagtgataggcggtcgacggcacggggcgagctctccggccttggacggggaaggggaagaagaggggtggctggagtcttattcggctcctcgcgcgccggcttctaggcacgcgcgatggcgaggaggcgaaagcgacgagcggcaacacggtaatggcgcgacggcagtggaggggcaagagcagagagagagcggggggcgggagtggcttggcttttataggcggagaagaggcggtttgggagggggaaccgacatagggcggtcaaggcggcaactggctctggtgctagggcgcggctggtggccacgggcggcagaaggagacagcggcagaggccgggaaaaggaaaaaagggtgaggaaaaggggactctgctccttgcccaaaactggatgagggacaaagggagagagagtgggggcaaggagggagaggagctctgcctccattgtttggaaggacgcggcttggagcagcggacagggggtgacgccggtggtgaccacggaggtctctgcctcccggttttggatgctagcggcgtgcagcggcagagcggcagcgtgcgatgcagctggagccagggcagtcggccaccgcgcaggagcgcgcgcgcggagcgcgggcgcgggttcaaattgcggcagcgggagttttggcgccgaggtgagaagagggagagagctcggctcggcgatggctcacgcgcacgcgcgtgtggcgcacgtgcggagcgagggaggagaaggctgagagagagaacgggccgagagagatgggccaaaggagggaattggtccatccaaaatagagggatgcaaaatagacttcttccaagaaactgatttggagaagatttgaacatggaatttgacttggacttctggattgggatctggatgagaggaagggtctaggaagagatcaaaaggggaaaatttggatatttttggggtcgggcgaaaatttggcgaggattcaaagagaggacttgaattttggaatttgatttggagacttgaatcggaattggaatcttgaggtggacgattttgatggcgacgagagtgaacaacaatggagattgaattgagatccatgacacgacttagactcacactcaaagaacgaaattttcgcaattagggttttgccgaattagtttttaacgtctcacgaaaagcggagcgttacaggccgcaagctcaccgccacctagcttctatctccgatccgtgctgtaaacttgccaccgagcttcacacgtcaccaaggaaaggggtagcaggtctggcgagctcgatggggcagtgggtgatatatggagatggcaacggtggttgtgaatcgagcgaaggagggagcgataacaacgatggattggctaggagtggtagactagttgtcagcagcgccgattccatggggaagaagagaggaggatgtggaatagaaagcgaagaaatgatgggtggatccacgtaggttgacataatcatatacaagatatttgtgggtggactcagggacgtgttttttatttggtttctagcaatgaagttctcattgtaaaatgtttcaacagaagtataaattaaaatagtttaggagctgatttgaaaaatatagtgttgaactggaggcaaaaaatggattatgagcccctagaaatactatgcaacgtgaaatgtgtatcttttcag

SEQ ID NO: 10598 - DNA, 1793 bp, Oryza sativa
aaaactatcattttacgttgtttctctctcatcaattgaccgagtattatattttaatgtgtccagtgttctgcagcaaattatcacatttttggagtgtctttgggcaaattcacgtctttagggtgttccagctaattacacattttttttgagtgtcctgtagcaaattttaccaacttatatatacatcatctgtgccataaaaaatcaatatgtgtagattcattatactaaaatgtgttaaattacatatactgtgccataaaaaactaacatgtcaagattcgttatagaatgtgtcacgtccgatcctaagttgttattttgggacgaagggagtacatcacagtaatgtataaaatttactgcaagtaccgtgtatgacatgactttagatgagatgtttgatattttaacatttcataaagcgggtttcgattatttaacatagtaggcatagataaaaggagacaatctaaattgataaatcctgacggatttaattagtatatatttgtataagttcatctcatagtgttatatgtatttttctttaatttttccctctcatacatgctagcttttcctttcactaaaaacaaaaggaaaagagggataacctaatatttcctcagattatttcttccttggaggagactgttaatttctaccgcctcagttaattgctctcaacttggagcttaactctgagcatatgttgaggtattgaagctgtgggccagaaagcctcttcagatccatcaggtaattcccttccccttctgacttgtacagctacaataagcacaagaggtaaaatttttatcatgggtaaaaaaaaattaaaggaacggttaaacacatgtttttttttgcaagtattaagatttggagggagtaataattgtcaaggggagaaacactatcagtctcattgtttggcttattcgaggaacaagccaaatgatatatttaaaaatgaaaaatatttttttaataaagttcttatatacatgttcttaacgatataaatgaaaagactaaaaaataaactacgatgaaaaactttaaaatcacctctaaatttaaagttaaatatttaaactttaactgataaatataaatataagcgaaaagatgaggttacgagagtgtatgaatgatgcgcttgaggagaatacctgaatttcaaagaacacagccgcagacaagctctcgaggacagcatcatcgacgggagctccaccgccatggccagcctcacctctgccactgccaccaccggcggaggaggaagaggagggcgcgtcgtcggtggcggcgaggtagctgcggatgatgcggcggacgccggcggcgccggcgaagcgtgcgcagagcagcttgccgtagcggccgcggtcgtcgtcgtcgtgcgcgtagacgacgccggtctcgcgcagcgccgccgcgatggcgcgcatcgcctcgcgggggcactcgtggaactccacccctcccagcgcccatccgttgttgcgtccgtcgtcttctccggcgacggcgaccggcggctctccggcagcactgctgccagttgcttctgctgctccctgtccagagcaaataggtgtatgatggtgttgaatcagttgatccaatacagtgttagattttttaaaaaaaaggaaaatccactttgtttagtacaaagaaatttcttgatcattattgtgcaaataaaacatttttgtctataaacattactccaggttgattatacttattgttttggataagagtattgtcaa

SEQ ID NO: 10599 - DNA, 1050 bp, Oryza sativa
actgcttaaaagatagtatttgaactgaacaaaaaactattttttttgtgtgaaattcactgttaaatggacctcatcattgcaactaggttctgacttgctgacatctctcctgcacacaacggtccatttccctgcatttcttctccaacttttgtctctaaattcatcccatccaatcgcaattactggcaactgttcagatcaacatgttcacaggatcaatgcaattcctgttgcgatgcaatgccgcaattactgaacacatttagatcaccatcagtggtctgctgtactaatactgaacctgggtatccggcaaccggtgaacatacaggccggcgtcagttactggaccactggctctcctctgagcagcagttactaaggatgcagatatcagtagcatccatccatccatctattgctgcaggaactgatactttctggcttagctagcattagcaattggaatagtagggaccagatttggtagtaacagtagttaggagatttggtaataacaatggtttgatatgcagtaatttgttttgttgcttgctctcgtactttctaatggattctgtcattctggggtgtaatgtaatggaaatgcgtttcttgttttgtgaaggatccagtggtgagcaggattgaaaaaagaattgcagcatggacctttcttcctgaaggtaactcttctgggcttcctcagattgtctcattgtttggttctattgattgttcaagtagcaaggttttccaagttaatgttactgctattttttttcatcagaaaatgctgagaacattcagatactccgatacgagcatgggcagaagtatgagccgcactttgattatttccatgacaaggtcaatcaagcactgggaggccaccgttacgcgacggtgctcatgtatttgtccactgtcgagaagggaggcgagactgtgttccccaatgctgaggtaaatttcaaatatcacgtccttcacttttccaaatccaaatgatgtatgagtttttgtaacattgctggtgctaat

SEQ ID NO: 10600 - DNA, 549 bp, Oryza sativa
agaataggaccatataaataatagagcactaaataatatttatctttcgcagagggctattgaagaaggtgcggattttatagaaacggacatccttgctagcaaagatggggccttgatctgctttcatgatgtaacactggatgctacaactgacgttgccagccgcaaggagttttccaatagaagaagaacctacgaggtggaatggttcaacgctactggctggtttgtaggtttgcacattacaaccaaacctaattccatccctcgttcttgtaaatgtttgcagcatcaaaagtcagaaataggaactaattgtgcatgccatttgattatttcttgagaccttagcttgaacttattacagttgaaagtagtgcatgcaagattttcttaaaatcattacctgtagtgttatgcctgcattagcaactggtattgtgccattttcagataatgccataaactatctggtgtttgctactccctccattttaaaattacttgtcgttttaggcttttaccttttgtcctaagtcaaacatt

SEQ ID NO: 10601 - DNA, 648 bp, Oryza sativa
tgccatggcgctaccggcactgttgtcttcgttgacgaccaagtacctcctcatcatgctcggtgtcagcagcgtactctagttcttcccttgctgcgatgctgctattagcatcatggccattgtggttgcgcctagccgatccatcatgaccatctttgctcattctctccaatgtattcaagatacctgcaagagaagtgttcacagccacaagggacctctccaatgaggaggaaaacttggagttggtgtcaatttgagcagcctccaattgaccaaggcgatcattggcgaccctatttaggggtaggtatgacggttatacaatgcgaattgtcggaaatgccccgcaaccgccatcaggagatgatcaagaccgtccacgccaaaccccagcctggatggctgagattgtggttcggccgaacctcggctgaacctgggctagtgtcacgcccagaaatttagcccaaatttccagactattttgtgtattaaatccctgtccaggaccagccagggtacacaaaacaataagtaatatacagttccaaacgtaaataaagcgtaaaatacttacagaagatgcacttagtcctcacaccgaaacaaaagcagcagcagtggaaaaaggcgatcctagcg

SEQ ID NO: 10602 - DNA, 625 bp, Oryza sativa
catggcctcttcaaccctgcggcctttaattcatcaaacacctcatctttatcttttttgttcttaactttagcaacataaatatgacgactttcaccaacagctataccactagcaaatcccttgctgcctataagtctatctaaataccttatttggagaccaccaccccaaacagaggaaccctgcatacatccatatgcatgaacagcatgcattatgttcccgtactcaaccaaggcaaaattctttgggggataaaataagaagtttgctaaggggccaaactcctcaaatttcgatctaactagtgactctgcagcactatttcccagtgaaccaatccaaagttcctttgaaactgaaatcacatccctcgagaaatgagcaccataaagatcagatggttctgaatatgaatgcttcgcctttccaaaattctgccccggagaagtgagagttgcagctcccccagcagaatcatgtgttgattttggtgtgtgcatatcaagtcttgcagcttgatgccctgcatcagaaattacatttccttgcttgcagacatcgagtttgacatctgctaacttctcagttttcacctcatcagtatgcaccatctgtgcat

SEQ ID NO: 10603 - DNA, 675 bp, Oryza sativa
ttatacaaagtttgtagaaacaagacacgtcgtcttcttggaagacgaaatgattagggggagctcggtaattcgagaaattgatcttgaggagaggcgggtgtctgtacccgctccgtcgactcaggaacctttctaatgttgtgccagcaatgcatgacgttgcggtaccaacacctgttgttatctctcctgtggcaacaatgaatgaaagtgaagaacctattctacaggattcaacagaaattattgccacatcagaggaggagctgcaccagcctcaaacatataatgtgccagaataggaggcccctagaaggcctgaaagagtcgcatatcgaggatgatcccatctcatatgaagaggccatgagaagccatgaaagatgaaatgaaatcaatgaaattaaatgatgtctgggatttagaagaaattcctaaaggagccaaaacagtaggctgtaaatgggtctacaaaaccaaatatgactccagagggaatatagaaaagtttaaagtgcgacttgtggcaaaaaggcttcacgcaacaagaagggattgattacaatgagacattttctccagtctcttgtaaagattccttcaggattataatggcactagtggcacattatgatttggaattacatcagatggatgtaaaaacagaatttc

SEQ ID NO: 10604 - DNA, 659 bp, Oryza sativa
tttcccaagtttataattgacatggtcaggctatcatgtggcctttacataatccaaaaaaaaatgttttgcagtacgacttcccaactcaagagattgtaatacagtttgttatcgaggctatccaagctgaagctttcaatccaaagacactttttttgattggcagctatacaattggtactgtctctgtgtctcatctttgatattctggatattgtagtgggtatatacataaatcgttcatggatgcaggtaaagaaagactgtatatggaggttgctcgtttgcttcagaagaaaatatatgttggagctgcaaagttgcaaatattaaagcacttggggcttcctcaggaaatcatgcactggtttacagccaatgaagctgaaagtcacatacatgttgttcctatgtggactctggcaagcttcaagcggatgaagtatttgtccactcaatatgctgtaagaaaagtacttgatcctaccttcgtttgtaagataggggttttagcttgtttgatatgtccctattaatctgatgagttaatttaagaaaatcatggtctttaaagttgaagttgctatttctactccacctaaggataaggactaagatctgagcatcagagcatatatttgtaatctggctcttta

SEQ ID NO: 10605 - DNA, 10136 bp, Oryza sativa
tgcatgcgtgccggtctccactgcggggtggaaccggttttcattaataggcaattttgcaaaaaaaaaacaacacatatttgtatgaaatatctcatacgtccttggaccggttaacacccgttgcgtttcttccggaaaagccctcctatttcacagaaatacaatacgaagaagagaaaattccacttctagggatagcgttgtaaacataaaaaaggaagggactgtttcgaaaaaacaaccacatctaccccaaaccctagcccatgcggccgccactccactcgcgcccgtgctcccccgctgccatccgccctccacccaccgccgccgatgtcgtccgtcctccccccactctccgttgcacatccttgtgtcaccaccgctccacctccatacccccatgctgtcggaaagggtaaagtgtaggggcaaggatggcggcgcacaaatccaccgccccccgtcctcgggagcgacagaggcgcgcggatccggcggcctctgtcttctgaagcaaccaggtacgagtgggaaggaccacggcgtgcggatccagccactctagcgtgctccccatgccacctcagcgccgcccccgccacggtgacagcgccagccactttggcgcttcaaaaaggaccatttctgggataagttttttcagtggtctatttacgaaataagttttttaaaaggaccaaattgtaaaaattccagggtagatgtacaggtagtagtgcttggctccaagcaccaaatcgtgagacgcgcataccaggaggtagaacgcgaccacgagctcaggaatgtaaatcctgcaagggtgaaaaatcagatagacatgtagtttcaggcatgaattttcagtttttcactgctctgctatcagaggataactggtatgatcgtaagtaatgtttttacctctcgacgcagtctgttggcttcaatggttcaagaagagggacttcaagcttgtcctttacatgatcaccaaccttctcagtaaccacccactgattgacattcatggtctcgagcaagcctgttagagctgcacgcattcggtgcatggccatgacattctcaaatagaatctaaaaaggcatcagatggagagacctggtatatattagataaaatctgtaatcttggaaaattgatgggcagattgagagacattctctgcaggaagaattcattcttacccaggatttctgatggcgttcatgatggtaatggcagtgggaatgcagaccatcccccagacaggaatgctgatttcagggaccatgacagacagcggaatcacaacacggtagaacaggaaggtcaggatgggagcgacgaccctccttacgaagaaaaagctgtagagtagatgaagttttttccatacagatacgccctgaatcacatataatcgggtaaagaaacttattgcatgacaatcctgtaacatgttccattctgtcatattgaagaaggctagccttgtttttggcaatttccgttgcatttttctgaagaggttggcagtaccacaagtccatctatgctgccgatgtcggtaggctttgaaggtacttgggagttcactcttaacctgctcaagattcattattaaaacagggtaaaatattcatatatgcttattaaaggatcaacatatacatacccttatatcaccaacatacaggaattgccatcccttgaggcttgcccgtacaggcgtacagccaagtccatgtcttccacagttgtgtgatccttccaacctcctgcttcgttaatagtagctgatacccgccacacagcagcagtacctgtaggcagatcagtgatgttaggaccaggcatgattagttcacgtaagtagttctgatattggatcttaccgttgaagccaaagaatgaatgcatagatgagcctgattcctgctctactttgaaatgatagtccagtgacatcttctgtatccttgtcataaggcaaacatcatagttcactgcaaaattgcccagcaaaggccagggcagaacagcctgtaatcagaatgaacaaagattctcacttaaaataaccaaataacaccacattacccattgaaaacttgaacaaattgcatcagagaattaacagttatatccaaattatgggttttctgggacccgacaaaatttactttttaataacttaaaacggtgcaacattggatgtgcccatttttccgataaacttcctttcattttcatttagtgctataaggctataagctcttcatagttcagtctatttgatgaacatgatctgagagtttagtagacaagcaatacatataacagttgagtgaccaattcaacagaaacataaatcggactatcagaccaacaactgaagcaccgctatttaatttgattaccctcacaaggttggaatgaaacaatgaaaatacttgcttaccaaactcccaacgtgtctgaaccagaccaatcttagggttatgcacaagaaatggtattatttttagaaggaaatcagattcaggttggaaatctgcatcgaaaatggcaacaaaatcgcactgttgggtatagatatgttccatgcccttcttcaaggctcctgctttgtatcccttcctgttatctctgatttcatactttatgttaatttcttttctcgcccaatcaatgcactcaagctccactagatcctgcatttgaccaaaatctaagtaaagaaaccaaaatcatattttaagctctaactctaaatagaaaataatgatggattgtgaaaatatcttctgtgaaacatgaattaactgcatgctctccaggaaactgatgcatcacagtaacacacagccaccaattcacatgtttccagttcatttttcatcactacactatactgtcctatctacagcaatgcatctctatctttaacaatttgttgctgctatcttggcaggaagccgtactgcgagaccggaacttcgaacgccatcatcttctcccctcgagcaaacccgttgcggtcgtaggacgagatctcggtgatgtccagctccttgcacgccctgatgagctcctccccgatcctcccagctgcctcctgtcgcaacaaggccagctcaagatattactattacttacaaatgagcagtgtctgtttaattactaggtgaaattcggggaggaaaaagtggccggcgtaccacggcgccgcagggagggtcaccgcagatggccttctgcagggtgctgccatagaagaggatcttcttgttgtggtcgtcgacgagcatggcatagagctgcctgttggagcagaacacggatagcctcggcttcgtcgccgtgccattgaactgcagcgccggcggcggcaagaaccatgtgagttgtgagcagaagagcgactggtggttaatttgtgatttgtgcagttgagctggggtggatggaattgaaccgtaccttcttctgcagccggcggttcctgaccttggggttctccttcctcgcgccgtgcctcgccgtggcctcgatcctcgggtacgcgcgccggcgagctactccgccgccgcctgcagaatccagcggaaagaaaaggaacacgccaggtgcgaagcgcggcgggaacacgaagccacgcctggagcctggcgagctgggagggcggcagcacgccgggcgcggcgagaatggcagcccggttgccgcgcggagcgatgccatggggagacctggctagctgcttggggtgggcaatctgtcgagcaggtggggcgcggaatcccggggggagctctacagtacccgagattaggatttatgaatgatatttgtcctcatttctggggccccacctgtcacctgaaaggtaatctttatatacgatttcaggggtggaaatgaggcgtttgattgggccacgtggctcactgattatttagggttagttcatctgaaaatcagccacgtgtccctgtgcaatctcagatagtcagatcagtaacttctcaagctggcctgtcttctcctacctgattggtccacatggacttacaaaatgttgacacgtggaacaaagacaagatgcagcctgcagctagcctgctagctacgctctgctttcatggttacaatcctctagatacttccaagctcgtagaagtatagtcaataaattaaattaagaacacctagatcctttggatgatctcaaaaatattaaccctagaataaacattacacagcgaaaaacgatacagcacaaaatttaggaaaaactaggagaaataccataaattggaaaatgaataatgacatgttatagtgaaaaaatagttgtcaaaagaaataataaggccaagactttcttttgagaaaaatcaacaactcaagtctagagtctagatgcttttgagctaagggtacaagcggctacccacaaaaacccacttataggctaaactaacctgcaaactcgcttattttgacctataagtgggttcgcgggtgacccgcttgcaccccaattttgagcgggtctttgaaactggagctcaaaaaataaatagagaaaacaatggaaaattaaaatgtaaaaaaaaacagatctctaaaattgaagctccaaaaaaaaagataacacaaccgaaaatcaaaatatgtaaaaaaaaaaaagggagctaaaaaatagagaaacaaaccaaaatccaaaatgtaaaatttaacagcggagcctcctctactgtgttccttaaaaaaatcacaatgtaaaagaaaaagaaagcacccatggatatcagttgcactgtatagctctgacgatttcagatgctagatgtggtcgattgactatgataataattgaaaatccaacagctcgcaaacaaaattttccaatttatgaaagctacacgtaatttcttactgaacatgcatttttaaataacaagtaggtaacataataaggcatatattactattgtatttccactctcaacctttgataattaaattaattatgtaaagacttgcaaaattaatctgatcatgtcacaggctataaattttgaagcacgccaactggcgtgctgatgatttttctagtacaaggcttaagcaagggaaatcgtaaaatgccccctgagtaaacgccaggtcaggtttattctttccgtatccatcttgtgctctctctcacctcaattaatttcaaacccccgtcaaaaactactcacgtagtacaagtacaactacaagccaacccgcttgcgctttgcccaccatttccacacccgcccaaagctgcgcgccctagcaacgcatggaggggcagtgggggcggtggctcgccgcagcagccgcctcctcctccattatatattagtagtatatatgaatttaatgtgaacataccaaataattaatcaatgaaaaatttaatactaatacgcagcatggtcaaaccggtacacatacataaaaatagtcatttgcatactggtattatcagtgatgtctttgtgaccaaaacttgtgaccttgatgatcaatggggaccaagcagcatgtgacctttattattaatccaaacagatgaattactgatcctcacattatgcaccaacttgtgaccttgatgaatcagcatgtggactagtgcatgcacgtgtgctgcactcttgccgtatgcgtgtaccgatcaatgtatgttgtggacagacttgccgtatgcgtataccatgcatgtacatgccctagcaatactaggaagccatagaaaaaatacaatggaaataaaggatgggatttgtgccttaccacggcgggcactcagacggagccataacccccaaaatccaaaccctagacaatccgatctgcaacaaaaccaaccaaatctaagacaaattgttgccaaattgaagaagagaagggggaaacggatttatctcatacctcgttggccgtcgcagtgccgccgccggtgaatcgacagcgccgccgccgccgcaggagtgaggctgggacgagtgaaaatgagactggagaggggatctgtagttgaggcgctggtcgaggaggagaggatgggcgccagccaaggaagagaggcgccggcgttggaggaagtggcgatggtgaggaagggctggcggtggcggaggaagcgaggcgacggactctgctcgtgcgtcacggaggctgggaatgaagagaaggatttggtttttttttattttttttagaatggtatgtgggaccctgaactgaacctgtgggtcgttgattttagattaaattgcatattgtgccacctttctttaccctcttttcgggagtgagggttgagaaccctcacttttcggcacacaaaacgaagcagcgttttaatacgtgattaattaagttttagatatttttttcaaaaatagattggtatgatttttttaagcaactttcgtatagaaactttttacagaaaacgcaccgtttaacagtttgtaaagcgtgcgcgcagaaaatgaggaggaggagttgggaacttgtactaccgaacggagccttactattgtttcaacttgaactagggtagagtaacctttccactttggaccatctatatttacatgtttcattttgggctcttcaaccttcaactccatcggttttctatccgctctccctgaattgcacgccacactcatcctcaagctctgctgatgccacactatctcaagtcccgctgtttgccatactctacctcgagctggagcttgacctcccaactaggaggtcgatctcctttccaagcgggtggaggtgactccgacggagcttcggcacgaatatagcgctggtgatcacttgtaggcctgcttgtggtgatacttctagccctttgcagtcaagattgagagaagaaatagagacaagagagagggagttagatgtggaagaagaggcccaaaataaaacaaacatgtaaatttaggtggtccaaagtgaaaagattgttctatccctggtccaaattgacacgatggtaaagcaaggtggctcaaagtgcaatttgctcttgattttattagctgagaccacggtgcactgtggggaattgaaatatgtgatgcgtggcttcattcactttttttttgtctatgtagagcacatgtccacatgaaaaaaagtggatgcattgctaatgcacttatgagtgagaggggcataggcaagatggacatttcgcgttccattgccaccttggttggtggtgtggcagccggggccctgaaattgggtgtaaaatggcatattagagctgatttgtggggaccggggggcaaattatctaagttatttagaaagatggcatttaggaatgctacatcgaagtgaatgcaaatagtccaaaatctcggttaagttaggcgattagcatcagacattcagaatttcggactgaaacctttataaaccaaaactgcaaagttcctacattggatttatagttaacaaagtttatagtcaataaaatgtcaaagtgaggagcctagtggtatttgagtttttctattagtgaatacaccacttccattcctttttctttgaagtttttaaatctaatatacaactttgaccattgttatcatattaaaatttagtaataaaattacaatgtcataattaatataaatccaatgacataatcctcatggacaccgccgtagggccaatcgccccacccttgacatcactgaagctcgattcacaccaccgaagtcgatatggtgccgtgggaggggaatgggatgggagggggcaaagggaggtggctccaatagagatagaggggaaaggtgtcgccggtgaagggagaaaacggcgggtctgagaggggaggagaggtgtcgctatcggagaagagaggagagacgatattatcgtggacggagatggagacgcattgcacagtaggggagagagagagagcacgcgatcgatcgatcccgcaccctgtaatcctgtatgcgtgggagggagagaaaaagaaagggaaaaggtaacacgtctccctcaacagtaaaaccgagtggctgagggaagcgattcaatgagagcaagctatggagaggcaacatagacttttttcccaggttaaaaccaaacctgggccgtgagtaatgctacaatcctatacaggcccatatttgaaatcagtaaattcttatattgggccgctaccgacagaagcggtccctaccaagctttcgcgtttcttcccacaaataggcgcgcaccttttcccttttcaaaatttctccccccgaaaatttccatttcgcgctccctcgcctcgttccccttccacttccactcccagatgccggcgaaccccaagctcgcggcgaagccctcgccgtcgccgccgaccgccgccgcagccgcctcccggccgaaagccacagccaaacctcccctcggtgccggataccgcgacaacgacgacgacgacgacgatttccagagccctccccgtgccagcagccgcgccgcccgcgcgttgaagccctccggtaatggcgcggcctcgcgccgccccagcaagaggttgaagccgtcgtcctcgtgttgctccgggaaggagaaccgtccagccgccgccggtagtggcagggctcccgctgggagggccgcctcgaagggcgcgggggttggcgaaaccctaggtgtcgtctcgagggttagcagcggcgttccaggcggggacaaagcgaggggcggaggaatttgcggcctattgaggtgcggatctgatgactttagttcagtttctaatgggaagaaaggattggatagatattggcgtcgcgatggaggtttgcattctcgccccaatccgatggattccacggtttcgatgccggatgccacatgtgatttggaaaatgggggttctcaagtggcgcaaatgctcagctccaatgaccgtatctcagttcagttggaggggaacgctaaggtggagttgggaaagtctgaatctgaccctacgactatgcggaaggaacggaatggctctggggcttgtgaaagtgatcatcctgcaagattgatcgagccgaggcttctgacattggttacaaattgtgattttggaggtgcagactccatggattcaaaagagcttggttcagcgattcatccctctgtttccaaagataggaatgtggagaacgaatctgggggggcatctgtatgtacatttgcacttcataacaggaattgccactcgagttgtgttgaatccgaacttgagatgttgaatgcgaagtatgatttgggtcctcgtgattgcaaggaaagccaagagggtccgggactttgtagcttgatttctgaagagaggacagttgcggcagaaggtgatgcaactttcacattcgaggaaagggggaacacatcaagtggacttgaggcttgtaaggggagtcactgcttggatccagttgaaccaaagcttatggactcatgtgcaacacatgcacttgaaggtgatggttgtgatgattttgagatcggaacacaacttaatgagctcataaacttgtgcatggaggattacacggagggtcctttgagcaacaaggtggcttgccttgaagggaatggaatggattgtgggagttttaattcatcttgtgaagtgcaatgccctttgtgtggatcaaatatttctgacttaagtgaagagctccggctggtgcatactaacagttgccttgatggagataaacctgctaaggtgattcttctatgtatttggaaaattaaaaattgttgtgatctagtgtaatgaccgtgataattattgctgctgaattgttaccttgttagaaagctcaaagacaatcatatggtaaccttaggcacaattttgcttcttgaaatttcccggttggccttcagttattcctctgcatgaggatcatgttagtatgtttattcactgggttctaatcattgttgtgccgatttttgtgtgtccatcattaagttcttatctgggacaatagatgaatacatcttactacataggggctgcagga

SEQ ID NO: 10606 - DNA, 5436 bp, Oryza sativa
ttcctgcagcccttggcggcacggcgcaaagctccgatcgatctgatagattactatagagacaggctaattgagcacgagcagctaatagctggcctaacctgattgattacctgacccgaccaggccggggcctacgcactcacggtcaggtatgaggattgaggaggcgtgaccaacactggcactgtagcgttgtggcgcctcgccacctccacacgcgtgacactgtgacgatggatgtgatgattgagctcgctcttgtgtcctcctgttgcccggtggggcggcgggcgggggtattttttaggttggcatgggtagtaagaaagtgggtgggaatgattggagaaggtgtatgattagttgaaaagataaaataggactgtgtttattagttacttgttaaaaaaattttaacgtatacgaacacacatttgaagtattaaatgtagactaataagaaaacaaattacagtttccgcctgtaaactacgagacgaatctattaagcctaattaatccgttataagaactgtaacaccatattatcaaattatggcgcaattaggctcaaaagatgcgtctcgcaatttacatgcaaactgtgcaattggtttttttcgtccgtatttaatgctccatatatgtgtccaaatcattgatgtgacagaaaagttgaaagtttgaagggaactaaacacagcctaggtgaaggagaatggttgtgattggttgagaggaggagatagatgaaaaaatagctttattttgggacaaggtattgtgtgctagaaatagttacattttgggacggaagaagtaataactactccatccgtcacataaaaaatctactggatgtgacacattatagtactaaaatgtaggattggatgtgacacattatagaactgtaacatcctagtactataatgtgtcacatccaatcttagatttgttttttttggacggagggagtactatggctgatatatggtgtcaggttcacatattagtcgctattatatatttattgtcttctacttaaacatgtgttagatgttaaaggaagatgattagtgttgaaaaagtatatatatgaatctgagaaggcaaaacttattcgtatcacttgctacgaaaccattttcgcttaaaactatagtactccatttaatatcaagtcctcttagaaggggagatctttggcttatatgcggcgcaaaaacgataagcaacaatagagcacgatgcatgactaattaagttatttaattattataaagttttaaaataaatttatttgaaatttaaaacgcttacaaaaggtcttttcacgtaacacaccgttcagtttgggaactcatctctccatcgttcagtttgggaactcatctctccatcctaaaggaacgggctgggtggaacaatcaatatttgatgctaattaaaaaagataatgatttagtttgtatatacttttttttcttgttatttttgccggattggtttgattaaggaattcctttcattaactataccgcactttcgaaatacgattttcttcaaaaagaattggcattaacatcacttatgctgataacccttatcgatctaaacccctactttaacgtatttaatttgtccaaaataaccataatcgtgaggatgtatctagataccgtattagtattaccctgtagatacatttttaggattaaatttttatagaccggatggagtaggcttgatctccttgtgtgcatttgcagggacgaatctaaagtagaagtgtcggtgttaggcgacaccgatgactttctataaaatctatagcaaaactgtttaactatgttataacaccataatctaaataaatttagtatactatgatagcgatagacacgttatgtcacatacgaatcgattttctggatcagtcactgtgcgtttggttggcgtacattgtgttcatgtgggtcgatttattcgtgttttatttaattagcgtcctcataatctcattgtgtcattgagttgcgtgccctatggcaccatgggatgacgcgaaatgaggaagccttggtgcccagtatgtgcttttgtggctcgacgatcgtggcgtgcattctggccaaactagtttgcacggtttcgttcttcactttcaattgtaaactcgctctcttgattgcccatgaaatattttgagttcgtgtgtgttcagggctaaccacttagaccactaattagaatatatttatgccttgtctagtagggttgtttcagctccatttatcttagattccaactaaacggtttaacctctataaaaaaagagcataatggggtttagaccacttcactccatactttgttttcgaagttacgacggccacatcaaacagactcttaatttttttccataataaactattggagtaccagtaattaataagtatccattaacttttcatccaaatctcctccaagaaaaacctgaccttcccaagttcaagccaacaaccctgacagccgcatggacatacctagaggtggtaataaatccaatattttagcctatgaaatatgagggttgaataaaaagagttaaactaagattttttttagagaggggcatttttatcttgcctctatatccaatcggatatatgcatcctcattaagaaacttagcctaacgaacaggtaacttagtcctcaaataacccaatctaaaaggaacttagctttcaaataacccaatctgaaattcgctcctagtgaggttaccgcaaccactaggcttcatgccctttcacaatcattaggtcttgtacgtttaatccctcctataagaaaattgagggagttttagaggggatttatttcatatctattggggtgaaattataccccttcaattttcttcgttctcttaaactgaggattaacgaacaaggcattacggtctagatgggttgtttaacagggttcatggcccctaatccattactgcccctactcccaggcataccgtatacgctcgccgcgccggcacgccattcccttctcgtcaggtcacgcgtccgaaaccgaccacagctggaagccgatccgatcgagattcagcgtgctcgcgatcggctccccatcggcttaaacccaccacaccgaccggccgctcgcggcaaaagaaaaaacgtatcgcgcattcgcacgcaacgtgccatttttgcacacggcccgcggtaataagggaaatgggctgtagtgtactcctccaaccttttcgcgccggctgtggaccacccgcggacgcgatccccgcctcgcgtcgtcgtcgtcctcgccgccgtcgctctcaccaccaccacactatattagcatttgatatttgctcacgtgtttcaggcgtctgcactgctactgctcgtaggtagcctcgcttgccccgcccgtcacgacgagcgaggcggagacaaacgagagggatttttaaagggccccgggtccaacggggaagagagagagagagacaaccagacgggagcttgtcggggaggagagagagagagagtggtggtggtggtggtgagatggccggccgtgcgacggcgacggcgacggcggcggggaaggacaggtccagcttcgccgtcacctgtagcctcctcagccagtttctcaaggagaagaagggcggcggcggcgggctgcaggggctcggcctcggcttgcggccggcgccggcggcgccgcccgccgcgggagctggaggtaataagcgattgtgttcgtcatgcgattaaattagcagcgacttgttttgtttcttaccacgtatggggtgttggtctttgcaggtgctttccggccgccgccgaccaccatgaacttgctgtcggggctcgacgcgccggcggtggaggtggagccaaacacggcggaaacagcggccgacgagctgcctctcatcaaggccccggccgatcagcaaagcgacgaaagtgcaaggtacaaacaatctctagtacactctgcatcctgacatctcacgatctcaaacaaactctctcctgttcattaaaaaagagtagtaaaatgaacataaaacatgttatcctgacttgcaacttgcatccttatacaatgtctagaagaagaagaaaacacacttaattttttggagtagagataatttggttgcaactgtctctttggttctttcttccagtgaggcagctggagagaaggctcaacagctgaccatcttctacggtggaaaagtagtcgtctttgagaacttcccgtccaccaaggtcaaggatctcttacaaatcgtaagcacaggcgatggcgtcgacaagaacaccggcaccgcggcaacgcagagcctgccccgacccgcacacaacagtcttcccggtaataacaactgttcattcttttgcagttttacattttaccatcacagtgctaattaatttccatctactatgcttaaatttatctactacatgtgaaacaatgtaggaatccttaacgaatgactgatttttgatttgttacagatctgccgattgcaaggaggaactcgctccataggtttctcgagaagagaaagggcaggtaggtaactgagtggctttcaacttctatctgaaatacttgcctttcgctgtcaaaaactggctgtcagaccaagtttatggccctaaaattctccatgctcttcaaccactccaggatgaatgcaaatgctccataccaagctaactgcaccgctgcaccgtccaagcaagctaacggtgacaaatcttggcttgggtttggccaagagatgacaataaagcaggagatatgatatgacctcttagcttacagttcactgtcaagtgtcaagtgatctgtggggaagagatgcgtggttggctggttgctagtgctagtgtattcccccgtagcttcaaagcatgaataattactcaatactactacattactactagtaagaacttaatcaatactaggaatcaagctggtggttaattctgcctgaccattggcatcctggaatatatataagcacacacacgggttgtttgttctccacattgtttgctgctggagccgtatgctcactgcagtttatatctgtctagctggttacccacctcagcctcaccatgtttcgggaataaacactgtgtatgtgcaaattcttcatttctcgttcggtttcgccgtataaattacattgttactattttggctccttgttgcttgaggatttatatgtttaatatgggacatatatttgtgtcttatttttttttaatctagagagatatttgtcttttaatttactgggacatctgcccttttatagatgtgttcgaacaatgtaatgcatttggcacatgcatgtttc

SEQ ID NO: 10607 - DNA, 672 bp, Oryza sativa
ttgtagaaagcatgcaatcaaacatctttaactttgactactgccaacaaattaagaaaactttgactgctaacatattaagaattatttagattatagggaggagtagaaaggccatcaacactaccaacttaagcattttaagtattgaagatgtaaagattgtttaatataatgcaaacagacattgatgcacaagcaaatgttgttgcatcaataatatcacctgagatctgatggtttggatgcctttcaagaaggcgtctcttgaagcaggagtgtgcaatggccccagtaacgtaccattctccaaaggatccccaattcggacttgtttataaacctcaacaagttgatcaagaaatgttcggtatatgctttcgtgaagaagctgtgttaacaaaacaaaagcatttagactactcatacaccagccattggggcagataagaaaaacctatcttaccagcctacgacatgtagtgcagcgttgtcctgctgttccaacagcagcaaacaacactgaacggacagctagctgaatgtctgcatcatccattacaataatggcattgttcccactaagttcaagaaggcatttgccaaatcttgcattcacttgctgctgaaccattagaccaacctgcattgagcaatcaggggctgcaggaa

SEQ ID NO: 10608 - DNA, 11732 bp, Oryza sativa
cctgcagccctcctctctctcactcttctctgcgggggcggtcgatgggtgcggaggaggccggtggggcgaggcaggagagtgtcgacagccggcgacggcggcacgaaagaaggggatgtggctatttagaggtgaagagggtgtcggtggccggcaacgggtgacccggtggcagcaacaacacgggagaaagagaggcagcggttgtatagactgttggagccgacgagcaccgacgcggcgcgggcccggtatgtggcgagccaatccgccctcacaccggcaccatccgtgcccacattgaaccacccatatgaggcctcctccacctcgcccctgtcgttcacctccagctccgttacatcgagtccgccttcggtgccgcggcacccacctccaagcgaaccaccacggcgcttggccccgcctccgcctttgtgcccaccgccatgctttcccttcactccccccccgggtactcctgccgccgacgccctccccttctcccgcgttgccgccgccacgtcgcctgctaccggacctcctctcccactagcctcctccccacctatcagtcaccctgcccagacaaggagaagagtgagagataggagggaggagaaaagagaggaaaaagagagggtgatgacgtgattaccctaatatgtggggcccacatgggtcgcacgctaactcaactgccacatcggataaaatcagggtcaaaaccgcttaagaacccaaagtgacgcagttttgtaatttgaggaatgacgtatatttggttttacggttgagagatgattttgtaatctgatgataagtcaagggacctcatacgtactttttcccagcagctaatcaccatggcccagcccaaaacttgtctcatctcaccgtagacataagtcacgtaagacaaactgccctgcctgtatattcacatatccaaagcgaaatgacaccgaaacataaactgctcaaatcaccctttttttttcgtaacatctcattcatcatttcgctgtcttttttttttttgcaacatcgcttttagcattttcatctgtagactgcaacgtcccaaactctaatcccgtcaatgggacgtgaatgcctgcaagatcaaaaatcaagactagttaattgattaattaattaactagcaaggtggtccatgcaaattgcgcaactagcattattatattttctctcgtataatagcatatatatatgttttttttctcaatttattattaaaatatattaaaatgacaacataattttaaattttgtactatctttaccaaactaccaatgtgtaataatcatattgtattttatatatgtgatacttattaattaattttaatatcagttttagttatttctaaattatattcctatatggcctgtaaactcgtcttctaatattttttttttattccgaattttcgttatttgtaaattgtatttttatatagactctagcctcttcttttaatattatttatttctaattctgaatttttattatttctaattgtatttctatgtcgactctaaactcatctttcaatattctttatttttttaatttcgaatttcagttacttctaaattgtatttctatacagagtaactcttcttgccatattttttatttcgaattttagttatttgtaaattatatttctatatggactctaaactctaattgtaattttattatttttattccaaattttagttcattctaaattcctatatggactctatgcttttgttctaatattccttatttttaattctttatttgtaaattgtatttttttatatagactctaggctcttcttccaatattatttatttctaattctaaattttcattatttttaattgtatttctatatggactctaaactcatctttcaaattctttattttttaaattttgaatttcagttacttctaaattatattcctatatggagtctatactcttcttgccatattttttattttgaattttagttatttgtaaattgtatttctatatagactctaaactctaattgtaattttattgtttttattccaaattttagttcattctaaattcctatatggaggcttctttttctattactttaataagataatagattataatatgctgcgtgcatgacggggctcatcgtttcctctgtgcagaattagctagggccaaaatttaaatttaaaacttaattttaaagttttttattgaaatttatcttctaatgttggtatttaaattgctataagcacatatgtaaaagttctcataaattattagcattttttactaatgcgccgtaagacgtattattagcatttggctggctgagtagagtacgacgcaccgagaagacgttgcagtggccggggtcggcgaggtgatgcaggaggttatcaatggggccctcgccggtgtagacggcctggaaccagaaccccacgaaggcgagcatggcgagcctcccgttcttgatctccttggtgcgcagcaccatgacgggctccggcgatccccggccccagttgccccagtcgaaccacagcccgccggggtagccgacgtccggcacggggttcctccggttgggcagccgcggctcgacggcgacgcacccggggttgaggtagtccgcccaccgccgcccctccgcccaccccatcagtgccatctgcgacacgaacagcgtccacgggtccgcgaagtagtcgcgcgcgccggcgtcgatccatgagtagtcctccatgaacccccatttctccagcacctccgggaccaggatccccgccaccgccagcatcgcccaccggctgtgcatcagctccgcctgcgcgaaccaccgcagcagctccggatccgaccctgcaggcaaaaacgttcgattgttactgcacaagacacaagtgttgataattttgtggaaagaaattaaatgcacttttggactacttttattgtcgtagtttaactttgaacttcaatctattcattttatactagataactttatgtttgttgcactttgaatcacctcgactatatcttctcaagtcatattcatattatacaccgacaaatatatggcctacttataggtagaggatttcgctaacgtggtaaaaccgacatgtttaagatcgttaatatgctaaataagtggttttgggtagttcaaagtaaaataaacgtaaatttagctagtccaaagtaaaaagattggactagagtgatctaaagtgaaactacgacaacaaaaggtggttaaaagtgcaattcgctcaaacttgtgagaagatgtgcgcataggttggttacctaatccaagaggatcgaaaccgaagtctcccgggaggctgccgtcgagccacggaggaggggagctgccggggaaccagagcggcctgtcgggccccagcggctcgcacaccgcggacacgccgcccttcgtcgcgccggcgcggtggccggccatccttgcaacggcggcgttctgcgacggcagcgtcggcgcgcgcaacgccgcccgcaccctaagctcagaagaacacaagaatgacattttcgcaacacacggaatcgaattgagatgcttcaatggcacaacacaaaaaatgagggaaaatgagggagaaagggaagaagaagacgatgaaatagatgggtgttgctgaattattatgattattattaccttggttggatgctacatgccgcgaatgagccggagggcagagccatggaggagagtgaggagaacagggagagggcgagtgaagctggtgaagtgtgaaggagggaaaagtgcagagcagtttatctgcttggagtttaggatagggagggagagggcgtggcgttcatcgacagggagccaatgaggccttgccaggtgtgaccagcatctatcatacaagttggggtcctgacttttgtgggcatgtaatttggaggcccgtgatacaaatctgtttagagtttggcccgtttaagattacaagaatcttgaaaagctggaaaatccaacttatgactaagatagcccactactagctccaattcatctatagccgatctaatagctaattcatacaatagttgcttattatactattaacatatggtcccacctgtcatacacacattgcatccgtactgcagctggatacagatatgtagcccgctgctcttctctctcatcttttatttcattaaaatatgtttatagctggctaatagtatgctattgcacatgctctaacaattcttaaaatataggtgacaacccggactatttgaggagctcaagattttagaagttatggttgtgaaaagctcccccaagcaaggcctctatatgataatgatggcttccgagtattataggcctataatttagggtcttagtattgagcatatgaaataattgaagcaattttgtagcttcggcaagctaaacttcatgagatgatttaacttcatgagaagtaacgaaaaggaggaacttattgaagtatacaaaacaactttacggatgtgtaaacgaagaactttattgctctcaacagagaaatttgttgctaaaaaggtgtacaattgagctatgggcctgatttagtgtgtacaaatacatgactgaagtggaaacatcagtgtccttttgtgaggcagtatagacaggtggaacatccttaaatacattcctgagactctgagagtgaaagctgtaaaaagctacccaaaaaattctctgtaactgttaactgagcagtgaatactcctacagcaatggtacagtgaaccgaaaaaaagagggtgccgccttgtcaaaaactgtagtcgatatcagagatattctgcagtgctgattgtttaaccagctcacgccgctcgttgtacagatccaggttcttgcacggtacagggaaaacatagccaatgacctgcccctggacgaaggagcactggaaaacgtggttcttcctgtccaccaaaccgactgacatatcatggaaagtaacattcttcacggggatctctgcgctcccctgtatcctgactggtacacgcaccccatgtccatggattgaactgtacgagatgttctctatgatgggaactgccttggggtcgaagccttcgtccgggtgctcattgtagtcggtcttgatcacaatgccaactcggatgtgttctagggttatgttccggtacgtgatgttgcttacataggcccctcttccaggggcagtctttatcctcacacctcgccgtgaatcccagatatggacattctctaccaagacatttgaaacaccgccagacatctcacttcctatagatacaccagcactgtccaataaaatagaaaaaaaaaggtcacacacaatggcacaatcacatggctttagaaaagtctcgactactggcacttaacaaataaattaagcgaacaagctagcctacttaataatgaagagatgtattacaaataatattgatatctgtgatcctagtagataaattaacttgtacggtaaggaaatgcaatcattagaccaaagaaaacatcacaagttcacaaccaatatgctgtgtattagttaacatattcacagaattatctaccggataacttataccaattcatattctgaacatctaaaacttctaatagtgaaccaaaccaaactgagaacataatgaaacatgaggaaatgactcacctgaccatggagcggattgtgacgttgtgaataataatgttagtagatggacgcccataagcaattccatattggtcccaaccactctttatagcaatcccatcatcaccaacagaaatatagcagtttttaatcactacattctcacaagaatctgcatatatagtaaaataattgagaatcttactagtgaagcataaagtttactaaataatacaaatgactccaacatgatgtaggaatacagggttgtctggtacatattgtcatctacatgtacatattgtcattatacagtcataggagattgtaagatataagaaaattgcagctgtggcattgccctgtggttctaaaaaaattataagctaacagaaatgaagaaaagctcagaatcacaaaaaaaatgaaagagataaaattgggaaatgacctggatctatcccatcagtgtttggagctccaacaattggagccaggatggtggtatctgatatagtaacatccttgcagtcatatatatgaagtgtccagaagggagaatcccgtagagtgatgttagaaatggtaatgttacttgaccgcatgagttgcacaagaggaccccttgtgtgattgaggactttcttccgaaatttgctccaccaactttgaccttgcccatttatggttccattttgtcctgtataaggtagggaaaaaggagaaaacctctcagctgatgaaaatacaagccaatttcagcttcaggacaaagagctgctagcaaggataagagtacaaggaacaggctgccaataaataatacacaaaaggaacaaattatatgaccagtgccaacatttagcctactcctaacagaatgatagcttataaataaatgtcagttagcttaattgcaactgtttctgaaaaaataatccaggacctctcttttagtcttatatgctgaaataggacatgtcgacaaccaaatacgattcatattaaaatttagtgactgagaaataactttttcaaccatttgcatgatttcagatatagtggtttcaagatctgatggaacttggctctagaattgctttaacaacaaatacactgcaccaaatattcatacctcctacaatgtagagaaaaatatgctattaaacaagatcgtatctttgtcaagttattctcaatttgccacatgcttgctggtggaaaagatatccagtaccgctatttaaagtttcaagaaattggtgattgtatttactgttatattttagagaacatgtgcaggatgagatcaactgacgagcatgtctccatatgatcaagaaccaagtgattggagttaaactcaaaagtccttgaaaagatagatgacaacataagctccaggctccagcatatgaccacacacttctatcatataatgttttcttttccgaccactatagctgagatttgtcatttttggagactgaattttgtggcttgatcctcacatttgttgcctcgaccctaactgcagcaatgagggtcttaaaggtgatggccatgttgacaagttcaaatgataaagccatacggcttatctttcgaaattccctgttaaagtcaagctacattcttgcaatattacctgagaatcttttacttctctacttagtttgattttataagcacagcattcacgatatcaactgagtattagaatgcattaaaaaaaaccaaaactacaacttaccagttatagtcacatccttgaggtcttgaccatgtataaggctcccatacctaggccccctgtgctctcttccgtacccatatgatggtaacggagacatcaacggccaatatctttcatccttacatataagtaaaagttgactcagttggtaagaaatgcaccaaactgtaaaaagtaacagaaaattttaagtaagaaaaaactagacccgcattgcagcggaaggttgagctaacttcagataaactaaagatcagtatgccttcatttgacagcatacacaggtatatctctcagtgggaaacaaccatttttgactaacatatccattcaagcttcatccaagacataccagataaattacaaaatactgttactccctctgtttaacaatgttagtcaatttaattaggtacaccgttttaaaatgtttgttcactgcagaaaccatgagtaaaaatattgcagctcttccaccatatgcacacctatttagtgttgtaaaaaggggccacgataaacagaaaattaaagtattaagcatttaaacctgaatgtaaatgaaccacgttgcaccacagaaagttaaaagtttgccattgtagtatgatatatgacgctacggtctaattacgtgacacttcgtgaagcgtagccctatgtgcataaacttgttaaaaaaaaccttaaaattcagcaaagagatggggattgcagcttgaaatgcctcacctggaccccgaggatctcagcgccggcggcgaggaatagcgtcatcctactggtgaggttgaacggcgcggtcagccacctcccggcgggcacgacgagcctcccgccgcctctctccgcgatggacgccaccgccgccacgaacgcctcggtgttgagcgtccgcccgtccccgacgcccccgaactccctcagatcgtagaccggcggcgcggccacccactgccccatcccctgggcggacggcgcgcgcttcggcagcagcggcgggcgggtgtagagccgcgcgcggcccaccgaggtgctctgccacaggaacacgagcgcgaacccgaccagccacagcgcgagcagcaccgccctgtacgacggcgagatcgccgccgcgccaccccaccgcctgtggtggtgccgcccgcccaccccgcccgcccgcggcgacgacgcgaccgacgccgaggaagcggcggcgcgcggggaggaggccgcggcgcgcggggaggaggcgacggccaccccggtctcccccatcggatctggcgcgcgggatctacggcgcgcaccggctggtcgtctgggccccgcggcccatggagcagggagacgcgcgctcgcggaggcgatggcgagggcggcggcggcggcggcgctcgtcggaggagcagcacgggtttaaaaggagcgggagacgatgatgcgtggagacggtggagttgggccggaaccaccacgacggcggcggcggtggtggcggcgaaatgaccgaattgccctttgccggccactcgcggcctcgcaccgcagccgttggatcgactccacgagcggcggcggcaggtcaactaacagatgagaagaagagaggagaaaagcggatttgtagcacagactctcatcaatatgtgaaccaagtttaataatgtgctatatatttactttatataaaactattgtattgatagtttattaaagtacggtagatgatatgttaatttttaaaactagcagttggctagattaattaaagagcattgctattgtactatttttttcttagtaattttttacaaacaataatctcgaccgtttaagttaggtaaataaaagttataaaatatctactctagatacactcacggcatgacaccttggtgttaataattaaataataataataagtttgtatgtataacagttttccttaattaaacttgctctttttttaagaaacacagtccataacacgcgcacacttatctttatgaacactatgaaagttagaccgatatatcaatgttaataacaaattaataataaaaagtttatatgtgtaactttttccttaattaatcttgctcttactagcagcgtgaagcgttcagacctccacgcagtgtaaccgactgacagttcagctgaggctgacggccaacctagaaaggtaggtgtgggcccacaaggcagcgggatggaccagcttccacgggcccacctgcgcgaggttggtccaagtccaccgctaggtggaggtgcggtgcgtggtcgattggcacatgcgagtgtgtgacatgacacggatcgaagagattcgtcgtctcgtgctcgtgtatgacacggccacatgatcgtacgagacacggatttcacaaaatagggattaatttggccccccgtgcgtgaccattggctaatggaggaagtaactgtttgatttactttgtcttaagtgttcagttagtccgatggaagagaccaacacagatcggatcaaatagcgatcacaccacggagaatagatacgtctgttttgactccttgtaggagttgttggctggtcagatcgccaccgttggttgcttcatagcatactccactttgaacctttgatccgccggccggaagagcatgctatgagttgggccgagatttaccgtttacgcgagaacttatggattgggctcaaatgtgctgtttcggcccgtcaaatggagtgcagagtagcatgcagcaactgtttcggcctaattgaagtactcggagggagtacttgactgggctcaagcgggcatttgcaaaaaaaaaaaaaaagctaacgggcgaccaatcgcgtgggccctctctcgcgtgactggacacgtgtcgcacacggagggggcggcggacggcgcccacgcgggattttctttttttttctttctcttcctttttttcggttctttctgttttggtttttttcggttttattcggtttctcttctttttgtttggttctctttctgtttggttttttttcgttttttggtttctcttcttttttcggttttctaagatgtacgtatgcaaagtttatattcgtatgtatactaagttttgtattttattttttattcgtgtattttttttctcggtttttaatatgtacatatacaaaatttgtataagcgtatgcaaactttgtatacgcgtatacaaactttgcatacgtgtatataaagtttatatatgtgtatgtacgggatgcaaggtttgtatacgcgtatacaaagtttgtatttgtacctacgtataaaaacctaaaataatacatatatataaattttgtaaatgtgtatatagactttatatacgtgtatacaaaattggtatacgtaggtataaaaaccaaaaaaatacatatatacaaactttatatgtgtgtatacaaaccttgtatacatgtatacaaaattggtatacgtacgtataaaaacctaaaaatacacgtatataaaatttgtatttgtgcgtatataaagtttgcatacataagtattaaaaaccgaaaaagatattgtcgacgttggatgtcgcaattctggtatttgcatagtatggggatcatcggtgctaggatatacgcgagactgaggtaaaagagatggagacatggatttttatacaggttcgggcccctgagttacatcctgttggccgaaaccggtattgctcttattcaccataatcacaccagtacaatatgtgggtagcctttctaactgttgtctacatgtcggtctgaaggtctgactcgtagtcgacaacagggtagtctttctcctcgaatctgtgcccggcgagatcagagatagcgcttttgtatctcttgacggtatccggagacaccgtaggggaatagccatgcctatccctgaagtcgatatccggcggcgtgtcttggcgtatgtaggcttgtatgttgtggcttctagtgggcgtgtgttgattgtcatgggtgtcttccatggtccttcctccctctcctcctagggggtcttgtatttatacctataggtgtctccttgtccaagtagaactagagaaaccaatatggatacaatccgagtagtccttgtcgttttcatgtagaactctgattgtctttctttatccggaactccctagaagccggtttccgtataagatatggggctgcaggaa

SEQ ID NO: 10609 - DNA, 7306 bp, Oryza sativa
ccgtgctcacggcgaggagctcctctcctccctccttccctatgtcccgcacggctgccgctccctgcgctcgccatcgccttcggccgccgccgccggcctgtgcgccgttcgccaccgcctcccgcgccgtcgcttgccgttgccggcgctcgcgcgccgccaccggtcaccgccggtgaccgcgcgtgtcgccaccggccgccatggccgccggtcagctttgaagccgagccgagccgtgcctagccgcctccccccggccgtccgatcgcctttgaggccgatccggaccgtcggtcccgtggaccggcggtggaccacccgcgtggtcctggtccacggtagaccggccaccttgtgccgctgccagtggggcccacttgcccgagccccctctccctccccttgtgcgctgacaagcggggcccacctgtcggcgcagccgcccccccttggatgacgtcagccctgggtattattgcgcaataaattgattaaggacttttctttattaataaaaacacagtttatcttctaaaattcataagtaattcatccgagctccgtttaagtccattcaagtctcagtaaattcataaaaatgcaaagaatccattaaaaatggttttgtttcctgtttcagtagtcttatagcatgttttgcttgtgtgctttgtttgtcgcgtagatttcggccgtttcgtcgatctgcggtttctcgaagacgttgctatggtctcatcagtgcaagagcaaggcaagtcatgcattacaattgatcatattgtacccaatttacaaatgtcccgcatttctattaaatgttgcattcttttacaatgtcatgtgggatgggtcctattactcagccatatattgtttaccatatgccattgataactgggggtatcaaaatgattagatgttgatttaggaaatgcttagccatgcttagctcaactagtacacaaaaaaggatcacattattacatagactttgtctattagcatagttttggattggtgccaccgcagtggtgttagttaattaaaatacactgaatggtgggctgtgggtgcatggttttgctggtcgcacccatggcagttaaggaccggttcacgggaaaccctgggagacttaccgtgcttaccacaagcgggagtgggtaactgcttgatctaaagtatagctcgaccctttcctaggcaccggtggcgagggtgggcgtgatggagttgggtcggctggggtgtccggttgtccagctgccggattcaccgtggcgcaagaggggaccgcccactgccttttgaggggtagggtgcaaccttagcgtggtgtggatggttaggggagggttatgtggagggtcttgttacgatttccccctttgcagtatcatggtgatacttcggggcatggcgacatgtgtggaatcgtgtcttgtgggtacagttgtacacctctggccagagtaaaactattcgaatagccgtgcccgcggttatgggcgatcaaccagattcaccgtgattagtctcaccctagtttagcttaatgaactggtgtagttcaggtggttggttgggcctgttgcaacgtggtgtagcgttggacagtgattggttaatattgattaattactacagctgttttactgctttcaactactggttttaaatgctagctttgtgcaaaagaacccctagcctcctttggttatatcttgcatcatacctcctcttcctgtatgacttgctgagtacagtgggtagtactcagtcttactctcttctcccccgcaccagagctgaaggtctttctagttggagctgtcttgttgaagttggttttgtcgctgccgtcaaggattgcctgtggagtggagtcgccccgctgctgaagtcaagcttcccggtttagctcgcttttatcctttccgctgcatttgtaatctttatatttttgtaagacgtggatctgtatgtcaacaattgtcgtttgtgtaccctggctggtcctggatagggatttaatgcacattcagtttagaaattctggttcgtgaatttctgggcgtgacatggccgatgtgggaacaaagtcgtccatcaatggcaataaaaacaccagccatagaagcagcttgaggcgactgacgttgaaagtgaagacgcccatcaatggcggcataataagccagccgtctaggcagaaacaccagtcggcggcaacgaaggcgagccggcggtgaaaatgcagacgcccatcaacggtggcataataggccagccgtgcatgcggaaacaccagtcgacggcggcgaaggcaggccggcggtgaagtcatagacgcccaacaacagcggcataataggccagccgtacaggcggaaacaccagtcggcgacggcgaaggccagccggtcggtgaagatgtggacgcccatgaacagtggtgtgaccaaccaaccgtataggcgaggacaccagtcggcggcgacggaggcaggccagcggtgaagtcgtagacgcccaacaacgctggcataataggccagccgtgcaggcggaaacaccagtcgacggcggcgaaggccagccggtcggtgaagatgtagacgcccatgaacggtggtatgaccaaccaaccgtataggcgaggacaccagtcggcggcgacggaggcaggccggcggtgaagtcgtagacgcccaacagcggcggcataataggccagccgtgcaggcggaaacaccagtcggcggcggcaaaggccagccggtcagtgatggagtacatgcgatgatacatgcaaagacaagaaattgcacatcaacctgtggttagatatttgtaaaaagaaaataatttatataataactaatagatccaaacacatggtttgatttgtgcttgatgaagaggcttgcatgaccaacaacggtggtgtgaccatccaaccgtgaaagtgaggaaaaccagtcggcggcgacgaggctgccggtcggtgaagatcaagacgaccgtcagcaacggcataccatgccagccgtggggacgaagacaccagttggcaacagtagtgccgcggtattacatgtaaacatcagaaaataccaagagattaatatgatatttagagatcaatataataaatgatgctagattagaagggaaaaactctggtgatgtcaggattctaatgcccgcaagcaaccagaaactccgcagaactcggcgaccatgtgcacgacgatcgaaacgcggctgacgacagcaacaaacgcggccgacgcggggatgaggtcgccgcctagcagtatggagccagccggccggtgagcacgttgcccccggcggtacatgcaaaacaaacaacagaaattgattagcaccgtagagaacagatgcctatatacatatatacttgctataggcatgcatatatttgtgatgcaaggtctgtttgcatgctcctgtaatccagtcatgcaatgatcgttggcagtgcatgcattagattggtcagaaccaatttgtacgcttgctctggccattgtgtggtcgtagcatgcaccgtcgacatgtaggccaggtgtccgtgtcgtgtcgatgggcggcgaacagcgtgaggacgacgatggcttcgaccagtggtcccgccgataaccagcaaacaccccagccggcagtacatgtaaccgaggggaaaacatatcagagaatcaactgtgattatagatcaatctgataataatatattgaaacgacaaaccaattgatgttttgggtcgttgaactcgttgagattaatctcaactcttcttttggaattgattccatcgcgcttgtcgatggaaaactcgacacaacccctacctggcgcgccaactgtcgaaacatgaattcggcaataataaaaggggtagcggacgagacctaaaagtggatggatgcggagacaaaggatttagacatgttcaggccctctctctcgatgagaggtaatacgctacttctgtttggggattttaatccgcagggggtattatagatctgacgagatctagttgtctcatgccccctagagggcctcctgcccaccttatataggatggggggcaggattacaagatagaaaccttaaccaatacggtatcggtttcctaaatctattttacaatattatcaaatcaggactttaggccgctccataatataaaaggaaacgtaatacccaagtcatgatctgtacatattccacagatataagctatctcctatgactagtcgataaccatgccgtgtgggtattgggtacccataatctccacaagtctttatctctcctcaaatttctgtgtttttcctgtggtccaatcaaacggtcattcctatgttttttctgtgttttgcaattctctgttttacacttatattcctgtcagaattctatatttttcctatttctccgttttttcattcctgtgattcaaagagacccttaaattttggctgatcccatgattagtattctggtgctgcgttgttccgaatctcaaagcggcactcacgtgcgaagcaagggccaaaagcccaaaaccttctagaacgaaccgggtcgtctcctccaaaacccagcaagccaacaacctcagtggagctcacccttatcccccccagctccagaaccttctcctctctcctctctcgctcgctcgcttctcgcggttgtcgtcggcggtagcgagctcatggcgtcggtgcagctgtccgccggcccgcgggtgtcagtgtcaccggcggcggcgctggtggcgatgccttcggtcgccgccgccgcatcgagggggcgccgcgggtaccgggggctcgtcgtgagggccgccacggtcgtgtcgcccaaggtgaggcacagctgcaccccactcttattcgggagacctgtgacgtctatggtgttttgggtttctgtgcgtgcgttgctactgcttgcgaggtgcgatctggtgcctggatttggttcacagtgtggaagcgctctcaaagctcgcggtggcgcttgaagggattaggagatcatttcgttttgttttcaattgcagagcaattatcgtactggattggctggttatatcaaagacgcaaactaatttgttaacagatccaaaaataattgatgatgttctagtttcctccacatgtttgcggtgtcggtggtctgtgtatgcgtcttaaggaaccttagaatctatctatgcaaagttgacactgcctgactgccatactgttccagcaatgaacagatctgttagtaatgtttccacctaatcacagccaattcccacactcagcttaaagtttgagtctgaatttcaaattttatggtgatattaagacatgctgtttttgcaaagctggttcacaatagctgaattgctgttttggcatgtgatgctagtttatggtgatgtcttacatgtgtaaagctcctgctgtctatttggttcatcagctttattactttgcagctacatggagtggtggaccttgcgccaccagtttcattttatttcattctgtagcatatttttctcccctcaaaactgtttaggattaagttttgagcatgtaatgtgcgattccttgttcctttacctaagcagatggacttatgtcaaatttgcagtatacttctatcaaacccttgggagatagggtgcttgtgaagatcaagacctctgatgataaaactgttggaggaatattacttccaacatcagttcagtcaaaaccgcaaggaggacaagttgtagcagttggagaggggagaagcatgggcagcgacagcatagagatcagtgttccagtatgtgcttttatgttcaactagttttgctagtactcacagacacctgctagccatttatttaaaagaaactgttgcatggtgagataactattaaaacatccacgggacctgtaagagcaacaaggcaaatttagccaagtggtgcgtcattattctacttaaatttattctcgaaccatgaacacctttttgaagataattacccttatgctatctcaactatttctttttcctgaaactactagttttttgttgatacggttaccctaatcagactacttattaaatttgctggtcataaataatatataacctggttacaggttggtgcacaagttgtctactctaaatatgctggcacagagttggaattcgatgggtctgaccatctcattttgaaagaagatgacatcattggtattctcgacacagatgatgtgaaagatctgaagccactgaatgaccgtgttctcattaaggtctgtttaccaaaagctaatatagagccatgttttatcaccaagtgaattgttattgctcttttcctattttgcacaagttgcatctgcaaatcctggtccattccatactgaaactgcatccaaaagttgcatagactataggcttcatatctgaacaatgttcatgaatggcataaatggcagcacctgtcacattatttactccagtaaaactaggggaagaaatatattccttgggtcataaccttgatgacgtgtccttacatttgtgctttccagtctctacagggagtccagaacacttacgctcttcatggaagagattgaatccaaacctttggcaacatttcttgcaaccaatccaaatcttgtactaaatttgtctcctattggtaacaaactgaatatccctaccaaatactacctccgttttaagttataagactttctagcattgcccacattcatatatatgttaatgaatctatatatatatgtgtgtgcctagattcattaatatatatatagattcattaacatatatatgaatgtgggtaaggccagaaagtcttataatatgaaacggaggaagtaattagtagtgtcaaattcaaacttgcctaggttttggcaaccaaagaattggtagggtaaagaactaaccctacgatatattattccattctgccttcctgagttcaattcatctgcttaattctgagccaagcttctggcataatgtccgatcagtgaggttgtgcacatctcctaattgatttgtgctggtctgtcttatcgtttttcaatgggtctcttgtgttccagtctggaaacttcacaggttgatattagaccataaccattctagagtttcttttgattatgctcttgattgaatttcaatagcatgtgccgttgctttttgtttgatgctgcatattct

SEQ ID NO: 10610 - DNA, 5826 bp, Oryza sativa
ccgcttagctgtagcaagtggcaagtagcaacccttatctctgtctgcgcataatttctcaagaattctcaatccacatttgtacagcaatgactgttgaaactcgattttatttttcttccaaagcaaacacttgcggataaatagtcccatcggtttgtctgtagccgtaacgtttattagcgacaacaaattatgtgcgaaaaacttttatatacaacctccttataatagatgacgccgttgatttttaatatttgttttattctaaaatttatttaattataatttattttgttgtgagttgttttatcattcaaagtactttaaacatgaattatatcttatatatttgcataaattttttgaatgaaacgaatgctcaaacatatgttttaaagttaacggtatcatctattaaaagacggagggtgtaagtgtttttaacgacttaaaagtcaaatataaaaaataatcaacaataaaaaaccattaaaaacaactctaacaatctagatttaaaacttaggccccctttgattcaaaggcaaattcataggaattttagaggattttattcctataggaatttttcctagaaagccctttgaatcaaaggaataaacactatggaatcctatgaaattgctatggaatgcctcttcccatacaagttttggaggaattttgaacctcatggaagaaatccgaagaaatcctttgagtctcgtcgaaacatgaattcggcaataataaaaggggtagtgcacgagacctaaaagtggatggatgcagagacaaaggattagacaggttcaggccctctcgatgagaggtaataccctattcctgtttgaggattttaatccgccgggtgtattatagatctgacgagatctagttgtctcatgccccctagagggcctcctgcccaccttatataggatgtggggcaggattacaagatagaaaccttaaccaatacggtatcggtttcctaaatctattttacaatattatcaaatcaggactttaggccgctccataatataaaaggaaacgtaatacccaagtcatgatctgttacatattctacagatataagctatcccctatgactagtcgataaccatgccgtgtgggtatggggtacccataatctccatagtagcccctgagaccttcacagtcggaaagataatcttctctcgaactagattactccaaagccgagtgcttcaatcatcttcgccatgatctcccgagtacttttaccaaatatgaagactgtggagggctgaaaaataaagtcaggtgcatcgaatagatgcacctaataggtgtagcccccgactatgtggttagctgaacaaactaagcatatagtcaaggaataaataatccaaccaactgagtggtttttgacaattatagtcaaccaggtgacttgataccaatatatagcatatgcggtatgaatccccgaataatatgatccaggtgatataccgactgctttggagaatatgatgcgtgcaacctaaagttgacaacatctttgaaaattcacatagcaaaatagctataaagaagagcttgatgttgtgaataaagaaattttcaaagtattgggcatacaccatgcgcacactgctttaacagatgtgcttaagtccctaaaagacatatggtttcaccacacctggaaatatatggcatatgtggtgtaacatccgagtaaataaactcataaggatttatcaaccgtctggaaaatgaccaaaatatataatcagcctaagccataatattggtcaataaaaatgcacacttacgtggcaaaaaacaatgatattgtatttaatcaatcgctttataaacccaaacaatgccttgactatatataaaaaagcagtgaggcagctatgaaaaacttcactgttgggcaccttttaaaatgcattgtaccaactcctaaaaagttgagtaactgcggtataaaaggattttaaggtattgggcacttgatcacgcgcactttggcctaagcaaaaagtgcctaagtccctaaaagaacgtgacaggccacacctgaaaatatgggctgcagacatattaggcctaggccaaaaaatatgccttcggcaccctttaaaggatgacgcatgtaacatgctcccgagtaataaatcttccgggtgatatagaccaagtgtagctcatatgaatagcttatggtctgagtgattatcccttatgggatactccaaaatagatataataattgaatcccgactggcgcaagtattcggttgatagcccttacggggaataataaatagtccagtctttgagcatagaaaaatagactcatgactatgaatccatattgaatgtatccggaacaagtccaaattggagatataatcctcacgcttgagttgatgagcccctgagcatatagcttgtccttctgtcatagtcaaaattgtccattggcaatagctgatgcagtcgatatgaaagcaagatgactaatatggagatgaacccatcaaagctgatgaagatgttgatggtggtaaagacaatgataccaatcaaaggtgatgaagtcgcatagccgtggatgcgaagaaaccagtcggcagcagacaagtcagccagcagtgaagatgaaggtgtccaacaacagcgacaaaatcgtgcagccatggtggcgaaataatcagtcggtgacagacgagccaatagtcggtgacgatgagaacaagccaatgatgaagatgtagacgcgcatcaacgacgatggcgaaatcctccaatcatgaaaatacaggaaacaatcgacgacaacaaatgcaaccggtggtaatgacgattggcagcaatagagatgatcaaatatgatgacgaagttgcccatcaatagcagtgtagcagccaatgataacgatgaagccctctattggcagttgcatagtaggcccaccgtgaagatgaaataacaagtcggtgataacaaaagcaaccgaaggcgaagacgtagtcaccccttagcaacggtggagacgtcagggccgatgaagcagaggtgttggtgatgatgtcagtgataataatccatcaaactgttgagaagatatcaaagctcgagtaatttccttgatgcgaagattgatgcaacgccctttgatttgtaaagatggcaatagaacttggtgctatagctgttgcagatgcttcacttggaggaaagtagatgttgttgaccaactcgtcgaatctgagttgattggttgataactctaaactcccggacatgtagattaaatctcaaacttgagaaatttggagtagattgtggcggcatgaagaagccaaaattgtcggtgtaataattggagtcgctgaaattaaatgtcggttctgaagcgaagatgaagataatgactccccgagttgactcgttgattgattgattgcttcatcttgacataaagcttgtcgaattttgagagtcttttatttgtgtagcccccgactctttggttagttgagaaacaactgaacatagagtcgagaactgtagcttgtcgtcgagtggccatcacttgagtgaagatacatgttgaagatgtccgagtagaaatcggtgccgaagacaatgaagatgaagtagctccaccatggtaacaaagttgcatagccgtgatgaagtgaacacgagtcggcggcaacggaagcaaaccggtagcgaagacgcgtagttgtgaagataaaaacatcagtcggcggcgacttaaccagtcgacgacggaagacgatgacgtccatcaatagtggtagcggtataaaccagacgtagaggcgagtgcactagtcagctgcagacgagatgaccgacggtgaagacgataaggccaatcaacactagcaaaatcatgcagccatggaagtgaagaaaccagtcggcagcagatgtagcagcttgtgttgaagatgatgacgcttattagcgatggcggcgacgtggccagccgtgaagacgatagcgccaattggcgtcatacgaagcggccggtcggtgaagatgtagacgtccaacaacggcagcataataggtcagtcgtgcagcggagacaccagtcggcggcggacaaggcggccggttggtgaaggtgtagacgcccaacaacagcggcatagtaggccagccgtgcaagcggagacaccagttggcggcggcgaaggcaagccggtcggtgaagacgtagatgcccaacaacggcggtgtgaccacctgaccgtataagcgaggataccagtcggcggtggacaaggcggccggttggtgaaggtgtagacgcccaacaacaacggtgtgaccacccaaccgtataggcgaggacaccagtcagcggcgatgacaacaagccgatggtgatgttctgactgatccattcctagagcgtaagagataagcttatagccatgaatcccttttatgcatatctggatctggatcctacagaacaaacatataggatgagtagtatctgatgtaaatacagtacttgagaaaaattcaagtattttaaaatatttataaatatgtatttctcctcttgtcaattttgatttccccgagcagatgactctgtacgtttaaacactctgtccgactagttatagccctcaagcatcgggagtcggcttaggcacttcccaaacatgcatatgagtgacatgagttcgtcatttatggaacaaagtttcacgaatcagaatttactactcgggtacttttacaattgttaagagtagaaaataaattatcttttctctatgcttttgatttcttctgagtaatacttagcaccttgcgtcactcggtccatccaacgagcctccgcgtggtaggaatcggcccaaaggcaactatttattggcaaaccaaacggaaagcatagtaagatggaactccatgactcgataggcacttttgtactcagattatgtcgcaggcaatcaagataaatattttataaaaattgtttaaaaaatatgatataacatctgtagcccccgactcactagtcaacggtgaaccagttgacatagtgaggcagaggaaaaagaaaatatcataaaaagaaaattaatgatgacttagctttctggtctttcccttggtgacagccgaggtggcctgtcacaccctgaagtttcccccccctttttcttgttttaaaaattggttaaataaattgcccgaagaaattatcttaattaacctagagctaaatccctaattaataaatgcatttaataatcgaattcggcatggtggaattttttttgagttccccatgctccaatgcagtaacaagatttttagtggaattttcagagccttggaaataattttaaccaattaaaattgagcaagtgctatatttttaatcccatgaaaatcctttttctccttttcttttcttttccctcctttttctttgttgggccgtcggcccatccctctcccgcggcccctcctccttgtgggccggcccaagccgcccctccctcctctctcgggacgccgacaggtgggccccacctgtcggtcgtctcccacctccggccgttggagccgaagctccaaccgctgccgccgaaaccgccgcgccaccgcctcctccgctcctcccgcgcccacgccgcgccgctcccgcgtcctccccacgtcgccgccctctcccccgcatctcccggcccgcatgtgcgctcgcaaggggcgggattcgaatttgaatcccccattct

SEQ ID NO: 10611 - DNA, 4727 bp, Oryza sativa
tgaaggagggttgggaaacccttctctccgccatgtataacgaagcactcattagcatataattaatcaagtattagctaatttttttttaaaaaatgatcaatatgatttttttaaaaaaacttctgtatataaacttttacaaaaacggcaccgtttagccgtttgaaaaacgtgcgtgtaaaagacaatggataggagttgggaacaaagtgcaaggaaaacagcctcagctcgattcatttgtttacgatgtaggagtagtatggtttcagtctttcagacccaaaagagcagagaatttgcactcgaatacttgcttactccacgtttttagggcctattcaatttgatgtcattttctatcatactatttttttttttggtaaagttgacaaaaaaaatatgtctacgtttagtttgttgccaaatttgatcaatatataagaaattctgccaaaattttagtgccaaaattttggcattgccaaaacttggtaaggtttattttggctacaatctaaacatgcccttagtatgttaatggtgaagagattgacacgtctgaacgtgataaaggagcatgagtctgaccaggtggggtccactgtcatggacccacaagtcaatggcccatgtccctgtttagatttcaatgtttttcttcaaactttcaacttttccgtcacatcgaacttgtctacacacacaaacttctaacttttttatcacatcatttcaatttcttcaaacttctagttactttttcgtaccagccataaccaaggtatgtcggcgacgtgatcaaagtggaacgaacacaacagcacaccaatcaaacgttgtttcactctgattggcccccaacacgccgctgaaccatgtgagcgacaatcagacggccaggcaggcaggcagtaggacgcagttccagttctcgcatgtgcacgcataggcatagctagccccccctgctgctccaacacacacttgagaatcggttgacggcaacgggaggttgcctatgcacacgctactactactccagtacctccacatggcgtcccgtcccgacccgaccccaacgcgacagatgtgcctccagcctccggttgccgcctgcctgcggctgcgccgacgcggacgcgaccggcgccgcgcatgcagcccgatcgcgtgattccgcgtcgtctaccaccgactcggacaaccgctgctggtcgcgggatgcggttggttgcaaaagcagtggctcctgtctctgctgcctccccgcgctgctctctgctctgctcacgggacgcacggccgccgcggctcacgggtggtcgcactgtcctcgccgtcgcctcgtcgctgtctttgatgctgcctcctctcccggcagggcaacagctccggcgcgtgcccgcccccgttgaatctcaaacttttgacaaatggggacatgttttacggtgatcgaaaggcatcagaaatgaaacgcctccaccttacgaaatactgagatgtccctgttttttttatatttttaagccatgttgtcgtaaggaaaagggggacatttcctgtgaaaaccatcaagacataaaagtattgtagattcatgaaaaaaataaagataagttttgtaaattcctgaaaggaaaaaaaaatagagatatgtgtaggtatgaaatatattcttaccagttttctctcaaatgaagttgagtttgaactttaaatttggtatgaaagtatttcatgcctatacctatctccaataattttttcgtgattttatataacttttaaatatggtttttatgagttttcacttattcgatggttgagatataagatatgcaagcaaacaaagaatgcacaatgttgatcgattcaccaacataaaaaaaaaatctatgaatgagtattggccaacagttaggttgagcaaacgagaactaacgtgtgagcacatacctcatagatttgtgtgctgatgaacttgaaataaaatagtatgtgaaacagtcatgtgtgcattgcaaaaagaatatccgaataagcatgtttgcccggtccataaggaaggtttaccggctaaagtttgcatgtttatagaaaaatatgaagaatacatttcagaaaattattccatgcctgattcccatgacatctgtcagggagccagatgatgctcatggctgatgacatgatctgccgaaccaatagctggttcacctatactttcaaaccatgaaatcggtttatagatccatcattgtaccttaactactgatataatggacctatatataccaaaatacaggtgtaacaagcaacagatcaggcagcaactgcagctatttttgctgtcaggagtcagttgctgcagaaactccacatattccatgcatttcaggcttcctatgacgtgttgagggagcaacaaaatcacacttaaaataactcaattcaacataagggtcctaggattagtaatgtgaaatatgatggttattgtttttaacaatctgaagcaacacttctgacagcataaccgtgcaaagattagtaagatgcagctaaattattaatataagcgggagaagaatggtgcaaaaccaaaatactgtcaagcgagaaaccatcacacttttaatgccacatccatacagctcactgcttaacagcattacagcgagtcagcgaccaaacattactcaatagagaaccataacagaaatctgaattacatcatcatgagcaaccaatcattacatcgcaccatagctatgtgaagcatatagttatatcgaagaaatctatgtgaagttttatggtttccttattcctcgacacataaccaatacaaacagccctcaagtaatgagtaggaagaaagaattacatgcaaaattttcttatataaagacttgttagtccacaatttagaaactcttataaattgcttagctcaccccaactgaacagaatctgaattatcaacgcagtatctttttggtatgataatatctaaactactactgaaaagataacatctctcaatgataatcattgaagcattttatcagaaaataaattatgtgcctcattcaatagtagatcaaggagtaggcaatttgccatgcacaaacagaaaactacatgctttacctaatgctgatacgataatgcatataatgcataacataagtgcattgctgttttaaaatgggatgctactgtcctttttttttcatgttagcattagcactagtccaaactaggaagttgccttaaaagagactttggtcgtgtttaattccacgccaaaattggaagtttgactaaaattggaagtttaaaaaaaaagtcggaagtttatgtgtgtagaaaagttttgatgtgatgaaaaagttagaagtttgaagaaaaaattgggaactatacaagcactttaaaagagacctgatgtggtaacctcaaaagtcaaaactgatactttaaggcagaacatggtcttgcataggtaaaacccagtaacacagatttgtttttacatctaatctatgaagtgcaatcttaatatatatctgaacaaccaaaaaggtgacaagacactcagttaagtgtcaaacaaacaccatgatgttacaacttacaactgcgaaacattctgaaagaacagacctatatgaacaatctaatcataaaagatatgatgatagtgtaacaaacgaacaaggttggctataaaaggaagaaccactaaggaatttgacagtttcaataagatcctgatcctgtttcagattacctctagtagaagaaatcatcaccaactatacccttaagtcttgcttttcccgaagcattgtagaatactaggcaaccacactcatcagtcaacaatagagatcttttgagtcttcaagccacctctcatccatgggatcttctcctgttatgtagcgaaggtggacaaccctcaaagaaatttgtgacggacgtctcaaggtcctcaactgagtatttgatgtacaactctgggtgccttccattctctatgtgatgccggaaccgaccaaggaaggatcgatatgctggaagaagtttctctgctattgatatcctaagctcttctctcagctgcgtgtctggcacataccaagcagattgaaccctatgtgcctcctcgaatgcagcattgaaagacttgaaacgctcccggagtgctgatttggatacccctgatgaaaagcccccactgacatgcagaccttcatctctcagacaattcaggatcttcaaccatgctgtccgttgatagcgagtggctgcgagccggaacttacctgtcagctgcttcaaatactcatcaccaataagcccccggagctccggtgaatcctttatcttgtgtgcaatatagtgtacattgttcatgacgaacaaatgagagagtgccgcatccttgtagagtgatgctttgctctcaagattgtgctcaagaaccacaataatccagataagatgagcagcaaggggtaactgactgtcagggtcggcaaggtcaagatcagggaaggatggggcattctcattgccctcaggagcaattcgggagcaagccaatggccgcgacacaatcagctcagacagtgtggttttgtagtcagaaatgaggctactgtaattcatgacatagcgagtgagaggatggatggtaccaccaggca

SEQ ID NO: 10612 - DNA, 3555 bp, Oryza sativa
tccgcgaagggagcgtcgtgggtggcagtggtgatggtagagctggagaggggaaggtcgtggaagatgagaagcagagtcgacgctcgctggcgaagacgccgcggacggcggcgcggcagcacggatccagcggcggatcttggcctcgaggacttcccactcgagccgctgcacgtcgccgatgctgagcttctcaacgccgaggcggcggagcgcggagtcgacggccggcttgcggacggaggcgtacacctggacgcactcgcggccgtagccggcgacggccatgcgggagcgatggcgtggaggtcggagatggcgtccgcggggaggagatcgatttctcggatgctgcgcagcgagcggtagctgctgcggcggccgacggaggacgcacggagtcgtcttcgtccgcagccgccgcttcctcggcgacgtccgcggagttggtccggtcgctgcacatggagagcgaggtgaggtcggcgagcgcctcgatctccaggtcgagggcgcgcgacgacagcacgtggcggaactcgtcctccagccgcgccatcgcgacctggacggcgttggacgccgcccctccgccgccgctagccgacgaggtgcggcgcgggctcccgaccgtggccggggacggcggcgccagccgccgtaggtcatccacagcccggaggaaccgctccgcctccacccggtcaccgccgccatcgaacagcatctgctcgtccccgcccccgcccccgtaggacgccgacgccgtggagtcccacctcatcaccaccctctccgccgcctccagctccgccgccgcagcggtggatccatccatcatgcttcaccccccaactcccaacacacccacgccgcagcacaacacctccacactcccgccggtacggcgcggggaggagagccttaagccggcggcggcggcgaggcgaggaggcgagagggcgctgtgcagtggccgcttcgagcggccgctcgttttatcgaattcgctttttgtctcgggtattttccccttgttgctttgctcctttgggcttcctcgcaccactaattatccaattagtgcgcggattagtagcaaagctgtggaagcggagactttttatcacctcccaacaaaataaaatacactctaaataaaataaataaataaataaattataaatgccgacggcaactgattggtggggcccacatatctgtccccaccggccagtgagtccacgactccacgtcgtctttttcctttcccgaatggatggctgcctcgtgggcccggctagtcagtggcggtaatcctgtaccgacgtgactcgtcacgcctatggtcaattttcgtcattagtatgcatgaacggcggtgtgctactgttttggtgttaatcttttttgagacagtttatgaagcaacattatgcataaattaaagcaggtaagcacggctgacagctcatccagtcggttcttgactggactgcacaacagcagcagagagcacagagaagaggacagcatttccggtatgtctgacagcaaccaactagcaatgcaacctatcggctaatcatcgattaatcatgtacttctatcaggttagacaagaaagagaattacctcctgtgtttttaatagatttcttcattaactttttattacacgtttagttatttatccaattaaaaagtatgtagttataatttattttgttgtgaattagtgtatccctcaaagtattttaagtatattttatatcttatatatttatataggaattttaaataagatgaatagttaaacatgtcgttaactcatctactattaaaaacgatgcgagtaattcatataacagcggatgagagagatcacgatggtcaggctacctgaaaacggtgcatgcgtgtcttcttcggtaagccaagatctttactgcattcttcttcagtcctggaatcatcttttctgaaaatgttttttatcatcttcttctccttttcaatccgttgctgtcttttgtggggttctttcctaggaaaggtgttagttgttcagcctcctttcaagaagctatggaccatactacacgactgcatgatgctggtgatggtgatgatgctacgagagatcttgccttttttgtgctaactgtaacgatttcctttcaggtcagtttcagatataggaagtgataagtacttacgttagaggatttcatcagtggtaaattttgcaggatgtggtaataagcagcgctgaatgagtacagtgagtttttcaggctacaaggcatctctgaattttaacttcaaatggtatcgttcttttcactatcgtagtaataaagtaaagaaaaagaaaagcatgtgagacagtgatgtgaccatggtaaacttcaaacgagttaatttgttcgtcaatgagaataaagtaacctgggttagttgagatcttattacaagattcgaaagcgagttacatgactttctgaatggcaccaaggcaggagaccagttcatttgtttgtcctgtcagtttgtgaagtgtgaacgaatgcaaggacacaacggaataagcaggcacgcaatgtctaatggaccgaattcatttggtagcagaaggatgacactacagttcagcaatcatcctgcaaaagcatagctgtttccgcagacgattcatgcataatgcattcgtgtcccttccctgaacgaccaacagattgagctgtgtgtgtatgacaagcgggccccactcatctgatggctttgtttgtgtgtgtttggtctagtttcagcttcatatatgatggaattattataaactaaatcagaaccaaacgcaaagctcattgtgacttgtgaggtttaatcgaataataatccagattcctctctaaccacaattcttagggataagataaagccaggaaacaggagacatctaggattataaatttacaataagttgaaaccaaaccggcaacttgacagcagtgatgccactggaaaaccggcaaagcatcgattagctttccaagtggtggtggactaccgttctttgcagggaactgaaatacgttagtacgttacgagtaattgtcaacagccacatgcctacgccgctacgcgggattttctaatgttttgttctgcacgatgaacactagtagactagattcgtgtttttttttctcgtttttcttaatctagtactccctctgtactcataaaagaagtcgttttggacaacaacacggtctccaaaacataatttttacttcttatttttataaaaatatttattgaaagtgatatatgtatacttttatgaaaatatttttcaagacaaatctatttatataatttttacattttcaaacttaataacttgagagttatttatgatttatattcctaagatttgatttaaacattgtcctaaacgatttcctttacaagtagggagggaatacttcagcagcaggtaattattggtagtaataatttaccatgcaacatatatgggccgcacgta

SEQ ID NO: 10613 - DNA, 849 bp, Oryza sativa
ctgatatttcgaacagtgatatatgtgatatcctgaggggatatgccatacagccgaggtaaactgcttgaattgtcactttgagattagcacatttttccttatttaggggaaaagtggcatccagcacgggtccaataatttgatcgatatgccctgtacttttttcttcaattgtagaaaccccgggatgagaagtactaggattggttctcataattaaaaaaaaaggaatttatcgaaaattttcttttattctgttgaataatgccaaatcaacaaaaaaaatatccaaaaatccaacaaaagtcaaaaggaaatgaattagttaattcaataagagagaaaaggggtccagcacttgatttcattgcccaaacgaatcacattcaatcgtttactcattccatgagtccgtcgaaggcaaaccaccagaaccaagaaatgggagggatggggttaaaggatttgaattatttaacctcctagcgagacaagcgtggagaatgctgcaagaacaagaaagtttgagtgcaagggtgcgaaatgtatttccctgatgaagacttcctaagagcagacgtgacttcccgtcgggcgcccgatgggagccgattaaaatcgggcgctgatgtcagcatgacgtcagcgcccgatttacgtgcaaaaactattttaaactgatttttctcttaaactacttatctaaataatgatccgattgcaccattaaattcgtagcaattaaatcttcaaaacaagaccacacatggatatattccgacgaaattttttttagcttattattgaattatttttaaatgttgcacgatgttccactaggtatat

SEQ ID NO: 10614 - DNA, 664 bp, Oryza sativa
tagccacaaaccgtccttgtatccccttgcacgtctgcatcgttggtgtggcttgctgagtacggtggttgtactcagccttgctatcattcccctttttcagaagtgtagtgcttctgagctgaagatggagttagaggaccaaggctcagaccccagttgagttttgcctgtggagtggagctgaagccccgctaggatcgcctttttccgctgctgctgcttttgtttcggtgtgaggactaagtgcctcttctgtaagtattttacgctttatttacgtttggaactgtatattacttgtcgttttgtgtaccctggctggtcctggacagggatttaatacacaaaatagtctggaaatttgggctaaatttctgggcgtgacagcctcccccttgccgcctcccccttgccgccgccgcgccatgtctcggccgagccggcttcatgccgtgcccgtgccccagccgcgccgccttgtggccgtccgatcggctttgggccgatccgggccgtcggatccccgtgaccggcggtggaccgccttcgtggtcccggtccacggtggaccggcgcctttgtgccctgaccggggggcccgcttccggcgccgcccctccctttgatgaccgtagacagcctttttctttgagaaaataaa

SEQ ID NO: 10615 - DNA, 10672 bp, Oryza sativa
  unsure (1)..(10672): unsure at all n locations
gtgtgccgatagaatcgccttattatanggcgaattcnagctcggtacccagtactatgagtgatgaaacaactcgtaacaaaataaattataattacgtaaattttttgaataagacgaatggtcaaacatgtgaggagagagtcaacggcgtcatctattaaaaaacggaggtagtatttaataaaactaaaatatgaaaaaaagtttaactcttttgatggagggagtatataagatcaggtgaactaacgttgaggagcaaagttgattgtggtaaaagaaaggcagaaagcgttattagactccctaaagacgaacgataagcccttcgcaaagacgacggcatgcatatggtatgatattagattataaacagttctagtggcgcacagcctcgttgtcacccgtcgcgcggcgcggtgacgaagcagagtgcgagaacaagccagcaaagaaccgcgggaaggaaaaaacaaatcgtaatgacggcatacaccgtaatgatgaataacacccacatcgtgaggagcatctcatgggagttggccaagacgaaggtggcactgctcattaacgccatcgccagaaagtgcgtcggcacatgattattgatggcatgcataccggaggatttattcaccagcaggagcgtgaccagaattgtgagcgccatcgcgaaagtgaccgtgttgcaggcgacgtacaccaatgctatcacagtttggtacttggtgaggacttggagaaggagcagaggtgatggtcgacggagccggagcagcactggttttgcttcggtaggaacggagttgcactaaccagtcggtcggcggctgcagcgccgcctggaaggccatttgtacgaagagcgcggcaaccatcatcatccacccgcgccggcctgtccctcatgtactcgtcaaagctgcgggagcgtcgcatgttgttagtgtcgcccggtgcagtgctgccactattggattgaacaccgtcaccctccctgtgctgaacattaacggggttccctccaggagagccgtccatggtgttgttgttatccgtgtcgatgttctgcgcacaccgaaccatgcatacaatgtttgagaaaattaattaattgcaggtcaaaaaaaaaagtttttaagaggaagagactgaacctgaacagaatcgacattcactatagcctcatcggcggcgactggctcgttggcattggttgcatgttgatatatatctctgcagtctcagacacaggcgctgccgcactgctgtattttttttagataggtcaccggaggggagagattccccacctaaaagccgcactgctgtattgtgaactgtaatctatactaacctcactccatcttatatagcgtacgtactacgtagacatttcctctgaagtgttcgcctcgtgatagtctgctctgctatagatctcacacaaatagctccaggtctgaatttttgcgcttccaagtagatcactctgccttatggattcgtctccattaatctagataattcttattataatccaaaatgccatatatttttctaaacattattgaccgtattaaataatagaagatgctacgacccaattgttacaacaaatagaaaagaaatacgtgaaatatagagcaagcaaactccaccttttgaaaccatgtaagagatacgagtagacgagcaaacttacaacagtggccgattctgcacaagtagaagcatatgaagccctattctcgtttctccgacagaacaggcaatcgacgcctatccagacaccaaaaccgatgtcatcactaatattatcatcgacaacccgagaaacaaataaacttaattagtttatcaggttttaatttcatagagaacctcgtgaacaacttacccattaacaaagagaaaagaaaacgaaggattggaacaaactaactccattatcatcattgaaacacaagccctatactatttaatagatatttcgaaaatgccacatattggacataattgaaagggaaaaaaatcatgcactattgatggaacaccagaataatatgaatagacatccatatccatatagattagggatgcaaatgtggcgagtaagcggttttttttcgcttataattatagttaattttattctttttaattttgtactaacaaataggaaatggaaaaaatattctctgagacagggccatgagtccgactccatgagggcccgctgtagatttttgccacgtgggtgatgagcacgaatcttggaatagtttcatcttcttcctcttttccccttacctccttccgtattctcgtccttctgagtgctcctggcggacaatttcatcgggtttttctgtaaacttgctgaggaatgattgtcgaaactagatttcggcaataataaaagggggtggctatcaagctcggaaagtgtatgggtttggagacaaaagatttatacaggttcaggccttcttataaaagaagtaataccctactcctgtccggggatgaatccgccgagtgtattattgattgtatgattcgggaaaaatcagcatctacccctagaggcgcccggaccccccttataaatgggaaggagtccggattacaaaagataatctatattcctaacggaatatgaagatataggtaaaatacagtcgtaaccgactaagtctcagggtgtttccttgatatacaagttaagaaacaaacccgagatacagataagatattctatctacattaagtatccggtacccaatccaaataccgtcgccgtgtagatatgggatacccataatctccacagtagcccccgagtcctttgcagtcgaccatcatagccttctcaaagatgataatccgagcacttcaaactcttcaagccaaaacctgccgagtggactgtaaagggcgaaaagataaagaatatggtgcatcgaatagatgcacctaattaggtgtagcccccaactatgtgattagttagcaaactaaacatatagttgaaaggcaaaataataacacaattgtgcattatatgacaaaagcatacgcggcgcctaaataggcatgctagccgactgctttttagccacaataaaagaaatccgagtggtttacactctaaaaggttcacgaatgaacacactcgacaggcatccgaatataaaaactctaaagattacccatcaagtattataaagattatggtaataaataagtcgaatagcctaggccatgactatttaccatgaaaacaggcatataacacgccaaggaaatgactataataaaaacaagtcattcctagttaacccaaacagcttttgtagcctaaaaaagcttgcaaaaatagcataacgcctttctgtcgggtacctttttaatttgcattgcagtaattccaaagaattatatgaccgcataaaaatgatttgatcagcattgggcaacactgttgtgcgcataatattgccaaagcaaaatatgcctaagtccctaaggaacacaatgggccacgctgttaaaagtattgggctgaagtactgttcaggcctaggcccattagcacctccgatacccttaactgaaaaatcctatatccaagcgacgcttcgtcttccccgccggaactctcgccattttccccattccctgctacagtgcaaagctgcgccggcgaactagggttcacaactccggccaaatccacctccgaaaagtgcatcaaaatccttcccgtgatccacagcctcaatccctcacctctcccaagccatccctcaaatcaaatcaacgcattttagtgaaaccaatggcggaagagagagaaagcttcgaaggccaatgggcgtcatccgacgtaacggaggagaatcttaaggagatggtggcgcacggcgttctccctgccaaggagatcatcgggtggcgaccagcgcacggtgaggctttcccgtctccggatactcatgagattgtggtcttctcgcatttcttctacggcggcttcgctcttccgacctcaaaatttttccgcgggatcttgaatttctatggaatcagcttgcatcacctaaacccgaattccatagtgcatatcgccaattttgtccatgcttgtgaagcctttttggggatcaaacctcactttgccctattccgccggatcttcttcctcaagccccaaccaaacaagaacaaaccatgtgtagtcgggggggcaggattccaactaaggggaactctgagtcaaaaatatttctcgatgcccttcaagacttcgaacaaaggatggcatgcaaactggttctatgtccagaatcccgagcctgctcttcccgggtactcttgtcttcctccagtgtaccaagatacttggaactctcttccaatcggagatgaagcagtacaagccttggagttgttggatcgtatgttaaatcttaaagaacaaggcttacagggagaacagatcactcggcatttcatcaaatgccgactagcgccaatcaaggaaagatctcgcacggcattcgagttcgacggcaagtatgatcctaaccgtgaagaatcagactctctggatttcagaatcatgaaggagaggatgtataaaatcttctcaaatgcaatcgtcgtcagctactcacaccagctgccagtcgtgccatataatgcattcaatccgcctccgcaggtatgtatcggaaatcttcaaaccatgatcagaacataattttgtcttcatgctgaattgactaactatggaagcatcttgttcaggaatatgcactgatgaagtcagatccaccagtcactcagcgccggtctcctcgccaacacactgctcagggaggtagagggccaacgatcagaccagatccgcaacctcagacctccaaatcaactggtcagacgggtcctcgcaagaggaaactggtgcttgatgacgatgaaggcgacgatgataaatctggggataagggctcgcctaataaacccccaaagcgcaccatgcccaggaaaaaactggccggccgcgcaatgctaaaaattagaacatcttccaggtataagacctctcggtatgatttcactttggtaagctctctcatgaaaatgatgctaaattctgaaagaatactttgcaggaaaccatctgatatagatccatctggaaaagaccccgatccagccatggcagagcaaaatatatccaaagaccccgagccaactgccgaaagccagccgactgccaaaagccagccgaccggcgcccatgcttcgggtgaccaggccaatccgagtgaccagccgccgactggaaaccagtcggcaacaactgaagcagcaacaactcaagagcccccgactggaaaccagtcggacgcaggccctgatcaagaaatccctgaagtagaagcgcagacgacagcttcccaagggccagaagctggtaatgactcgatagctggatctccaggcaaagaacaaagatcacctcacgctcagctaggtacatcttcaggttagttgtcttctcatacaacggcgatttaaataacctcagtgtatccgtctaatgtcttggaaacacatcaggaccatcaggtgatgacggagaagaaatccctcgcataaaggcgaccgacgactctcgtcctcctatcttgatcaaatggtgggacgagaactcacaagctgccggcatagtcataaaccgtcaaaaagaagatgaagaagtgtgccagctgaagaaagcgctcggagaagccactcgtattgtaaatgtaagtcttccgagtgacggccttcagtaactttgttttctttttagcagaactgaaccatgatccatcatgcagagaatccatcttcgcaatgaggccaagactacaactttggaaaagctggttcctcatttgggaactctagaagcagttagggaccagctgcatgaggctaaggagtgcgccaaaaagacagagaaagagttaagggaccgaatcgcccagctccaggatgcaaacttcgagctaagtggttcatcaaaaggtaatcatctagatctgttccattgatttatactgtcataattgcatcctcaaatatttggatttcaaacagcgcaagccaccagaatggctcagatggaaaaacagattgaagccttgaaaaaagacaaagcaggactggctgcagaaagggactcagccttgaaagaagttgaaggtactgccggctgatgatctgaactttcctctttttaatgcagtagagtctgattattataaatgtgttctgtagaccgtaaaatcaagtctcaagctcagtttgacgtcctggttggtaagatcaagaggcttgaaggagcaagagatgaagtcgccaatgtcgctacaccactcatccaagccatgttcctcaataacagtggtccgagtacactcgacgcaaccgaaatatttgacaagctgagtgttgctccggaagtatatttcaagaatatcaagaaagctggaagtatgggagctggcatggccttggcgatgacaaaatccttgtacccgagaattgaagtcgacaccattgatggatttgcagacgggacaagtgaagaagctgcccttgatcttatcagcagtgcgcaaaatgcggctgacaaaattgcgagtgatgttgtagagcaatttcgcaacaacgacctccaaccgagtaatgaagactctgatgatgaaaggactgattctgactgagtttgaatgtgatacatggaggctcaatttgtacaatactggtgtatttatgctgtgcttgatgattcttgcgaagtttttgatttcttaaaagtttttgctaagctttattgagcctaaaacccaaagaagctattaaaaactttcagtcctcgcaaactaagtagaaaaaccaaacaaggcaatgataaaccaagtaagcaaactgaattgataaaaatcacactccattattatgatgatagcccccgactgacaacttcaaggagaaaacttgatgtttgacagtcaaaatagggaaatacaatgataaagttaaacgtagaaacgacgaagatgttcaatgttccaagagttgtcgacgagagtgccgtcttcgcgcttgagtcgatatgaacctggccgggtaacttcagagataataaatggcccttcccatagaggagataacttgtgccgatctcgtgtggtttgaattttccgtaaaaccaggtcgccgactagaaaggcacgagatcgaacattgcgattatgataacgtcgcaacccttgtaagtaccgagctgactgaatcaaagctgcttcgcggacctcttccagtcggtgcaagtcgtccactcggtcttcttcatagcgttcttcacggaaattacggaagcgcaaagattcgaactcgacttcactcggcaacattgcctctgccccgtagacaaggaaaaaaggtgactggccggtggcccgactgggagtagttcgtaaggaccagagtaccgatggcagttgttgcacccatttgccggcatagggttttagccggtcaaagacacgcgctttaatcccttgaagtatcatgccattagctcgctccacctgtccattgctcattgggtgtgctactgaggcatagcaaatcttgattccaaagtcttcacaaaagtctttgaaaactccgccggtgaattgtgtgccattatcggtgatgatccgattgggtactccgaatctgtggacaatgttgatgaagaaatcgcgagcattatctgctgtaatcgtgacaacaggcttagcttcgatccacttggaaaatttgtcaatggccacgaagaggtgcgtgtaaccgccgactgcctttttaaactggccaaccatgtcgagcccccaaacgcgaaacggccaagacagcgggatagtctgcaactcttgagctggtagatgaatttgtctggcaaaaaattggcaaccttcacatgtgcgcacaattttgtcggcgtcggacactgcagtaggccagaaaaaaccctgccggtaagctttgccaacaatggtgcgcgctgcagcatggtttccgcatatcccagaatgtatgtctttcagcaattgtctcccttcctctaaagatacgcagcgttgcagaattcctgaagggcttctcttgtatagctcggattcatgcataacataaagtttgctccgccttgaaatccgctcggcctcatctttgtcttgagggagttcttgagaagtcaaaaatcatatgaggggctctcgccagtcggcttcaaccatagctatgtcatgagtgtccgcaacttgagtagcatctttgtgaggtactgtcggggaataaaggtgttcgacgaaaaacatcagatggcgctgcctcgcgcttggatccaaagttcgcaagtctatcggcagcttcattgttgtgtcgaagaacatggctgagctcaagtccatcgaacttatcctccagtttgcgtacctcttgtcgatatgccatcatgttgtcgtcaatgcaggaccactctttcataacttggttaacaaccagctgtgaatcacctcgaacaattagacgctttatccctagggaaattgcaatccgtagcccatggaggagggcctcatactcggcgacattgtgggacgccgaaaaatgtatccaaagtacatagcttaatctttctccagttggggagatcaaaaccactcctgctccagtgcccgaaagtcgtttggatccgtcaaaatgcatggtccaatgctctattttctccacgggggtatcctcttggcactcggtccactcggcgacgaaatcagctaacgcttgagacttgattgaagtgcggggcttgaatgatatgtccaaagacatcaactccaaagcccacttagcaatccgcccatttgcttcgcggttgtgcaatacatcgccgagtggaaatgatgtgaccaccgttaccgagtgaccttgaaagtaatgagatagcttcctggtagtaattagaataccatataacagcttctgaacctgagggtacctcgttttggagtcggccaggacctcgctgacgaagtagattggtcgctgaactttctggacatggccttcttcctcacgctcgacaaccaggactgtgctcacgacctgggaggtggctgatacgtacagcaacaacggctcctgcgggtgtggtgaagctaagaccggtggcttggtgaggagttgtttgaaatcttcgaaggccctctgtgcttcgggtccccattggaaattatctgttttcttcagtagcttgaagaagggcatcccccgctcgccaagtcttgaaacgaatcggctgagcgccgccatgcatccagtcagcttctgaacatctttctgggtgcttggcggtttcatgttgaggatagcagtaactttctccgggttggcttggatgcccctatgagacaccataaaaccaagcagcttccctgacggtactccgaaggtgcacttttcagggtttaatttcatcctgaaagcgcggatgctcgcgaaggtttcttctagatccgaaattagatcatccttttgcttggtcttgacgactacgtcatccacataggcttcaacgttgcggccgatctgtgttgagaagcatctctggatcatgcgttgataggttgctcctgcgttctttagtccaaacggcatggtgacgtagcagtatgccccaaaaggcgtgatgaatgaagtcttcaagcagtcggattccttcagtcggatctgatgataccccgagtagcaatccagaaaactgagaagctcgcagctggcggttgagtcaactacctggtcaatgcgaggcaacccgaaaggatcttttgggcaagatttgttgaggtcggtgtaatcgacacacatgcgccattgccctgtctttttcctaaccaggactgggtttgccagccagtcgggatgaaggacttctttgatgaagcctgctgctaacagcttggttaactcctccttgatcgcgtccttcctgtcttgtgcaaatcggcggagtcgttgtttaataggcttggcgtcttctttgacatgtaaggagtgctcaatcacctctctgggaataccgggcatatccgaaggtttccacgcaaagatatctttattattttgaagaaaggtgatgagcgcgctttcctatttacaatctaactcggcgcctattacagcagttttggtaagatcagaaggatctaagggaatctttttagtctcggcttcggtttcccccctttttgaaatcttggcggcgggcacttctccttcgctcaccgtggttgcagccagtcggattttctctcgggcagatgccatctcgcgggtttgggccatgtcgcaactctccttgtcgcatgtgacagcttgcttgatgtcactccgtagggttaggactcctcggggaccaggcatcttcatcatcatgtatgtgtagtgcgggacggccatgaacttggctaacgccgggcgtccgagtatggcatggtatgctgtctcaaaatcggcaacttcaaagctgatattctctgtgcggaagttt

SEQ ID NO: 10616 - DNA, 608 bp, Oryza sativa
cgtaaccatgtgtgaatagattttgagctagtagggttgcagccacgagtaagtcttcccttgttattgggtagccagaatgccgcaaaacttccatgcctaagcgaactgttgagagtacgtttcgatttctgactgtgttagcctggaagtgcttgtcccaaccttgtttctgagcatgaacgcccgcaagccaacatgttagttgaagcatcagggcgattagcagcatgatatcaaaacgctctgagctgctcgttcggctatggcgtaggcctagtccgtaggcaggacttttcaagtctcggaaggtttcttcaatctgcattcgcttcgaatagatattaacaagttgtttgggtgttcgaatttcaacaggtaagttagttgctagaacccatggctcctttgccgacgctgagtagattttaggtgacgggtggtgacaatgagtccgtgtcgagcgctgattttttcggcctttagagcgagatttatacaatagaatttggcatgagattggattgcttttagtcagcctcttatagcctaaagtctttgagtgactagatgacatatcatgtaagttgctgataggtttccagttt

SEQ ID NO: 10617 - DNA, 3526 bp, Oryza sativa
  unsure (1)..(3526): unsure at all n locations
ctctctgcttctgcgttagctttgtatatatttgaggttttcagtatagggtgaagtatggcaaggcttggagggcacgagaggaggctatgaagctcatttacggtgaatggggtgaagcgtatgtccgtttgcccactttgctgcaagccattaagcagaggaatcccagtatggtctaccacatcgatactcatcctgatagggttgtcaatgttgatggagtgaccaagaaaatttttatgcgtgcattctgtgctttggtccttccattgaggcttttaagcattgtaggccagtactagctatagatgcaaccttcctaactgggaaatacggtggtgccttgatgactgcattatcagctgatgcggaggaccaacttgtacctttagcttttgccttggtggagaaagagaattcacgagactggtgctggtttatcgatcttgtccgacgggttatggttgggccacatagggaggtttgtattatctcagatcgacatgctggtataatgaatgccatgacgactcctgttccaggattgccaccggttcaccaccgatggtgcatgaggcacttcagtgctaatttccacaaggccggtgcggacaagcatcagacaaaagagctcctaaggatatgtcagattgacgagaagtggatatttgagagggatgttgaggcactaaggcagcgtattcccgaaggtcctcgtaaatggcttgaagatgagttggtggataaagataagtggtctcgtgcatacgatagaaatggccgccggtggggttacatgacaaccaacatggccgaacagttcaatagcgtgctagttggtgttcgtaagcttccagcgacggccatagtatcatttacgttcatgaagtgcaatgactactttgtgaacagacatgatgaagctttgaagcgagtccagttagggcagcgttggtccaccaaggttgatagtaagatgaaggtgcaaaaaagtaaggcgaacaaacacactgcaaggtgtttcgataagcagaaaaagacatacgaggtcacagagaggggtggtgtaacgcgtggtggtgttagattcggcgcaagagccttcaaagttgaagttgaggggaactcatgttcttgccaaaggccattgctctaccatatgccttgctcacatcttatacacgtttatctgattcatgcaattgatgaggaatctcccaaccgaatgccgtatcagttctcttcaagagccgttgtgaacacatgggcaagtcgctttgagccatacctcgaccccacacagtggctaccgtacgatggtgaagaatttgttgctgacccaaatttgaagattaaaacaagagggaagaggagatcgaaacgattcaagaacgaaatggactcgggtctgggtggttctggaaggaaaccaccttcatgcgttaaacttgatgctgcgccggtgcaaaatagatgctcgttgtgtcaccaggagggtcacaagaaaactaagtgtactaagcgtctaaaaaagaataagtccaaaaaaaatataagtgttaggggcgtactacgaggcccgtcatcgcggggctgcgatcgaggcggggagggtatgaatcggcattgattcacttgtgaaaaagtattggtagcgtgtatttgacattatattaactaattgatttacaattgctaatgcaggtacttcaaccgctccgagtcagagctcatgcccccctagtgttcgacgatagacagctctgtgaggcctgttgtcgtcaggcaccatcatccaacatgagtggttgtgtgctattgatgcagctgtggatgtggttaagactaccggttggaaggcctaagtggaggcaaagcttcactccttggccctacaatgagccagacatggagaagacagtggcctacctttttgagagtactgccactgcacatgctcaccgggatgtggcatacaagcattatgtcaatgagatggactgcttacagcctcaacatgtaagtacttccaatatcacttctagttagacatttacttctttaattgagatactaaccaacgacatctcttcaacttttatagattgagtggttaccataccacacaaatgaggcttcaagcctgaccctgaactcgatgtgcaatcgagactctgactatttcatgtaccagtgcccattgatttgtttctgggcagttgagtaccaccttccgcaccgtgtcatacgacagttcgggaagaaacaagactggccggttgaggacatctcaactggagttgaattacacaagtaaatatttcttatctctgtttgctttcattgtcaatgttcaattttgtaccatttaacccttgtcgatgctcactattgtttcatcaccttctacttgtctaggtatgacagggtgagaacaaagaaggtgaaagactggaggctagagcataatagatacattgatgaatggaggacagccggaaggaacgacaggtacattgagcccatacaccaaaatcatcttttttcagagtaccttcgttggctgcataggacatatagactgttcctccgcgctacttggacggaagcggacatagagcgncccgcggacttcgatgaggggcggaatccctatgatgtccggactagagttggatatcagatggagcacgccccacttacagacagagtcgtaacttttcttgcatttgtcaaagttatttccatttgcaccctagactctaacatatatcttctcacgctttcagtcgagagagctcctcaggagtgtgaatcaaatggggcatgccctccaagctccgaggggtggtgaggacacggagaacacactccgcaatgttttagaggtaaaatttatttagcactttgcattacttgagttatgcctaacaaacttctttttttttttttgaaatgcagaaagttcgtcaaaggtgccggaaacttgcagcaagattaggttacaggtcggttggattggacgacgtgtaccaaccgcggagactaccaccaccactacctcaatccgggcgtccaagtaccgctcgacactccatcaggatagaagagcgtgaaggagttggtggctcgtcgtcgtcacgcattacgcaaggaaggggaaagggaaaggcgccggctccacctagcgatgacgatgacgacgaggacgaggaggatgaggactacgtcgcaccagacgccgaggagatagacatgtcgcagcttcccgacgcgcctcaggggacgcaacccacgcaatacaacttgcgatccactcgggcagcgaaaaagaggtaaaatgagcttaccattctcaaatgttatttgatttcccttattttgtttttaaaatgttttaaacattggattttcaaatgtaggtacactccgggctcgcaagcaattcggcgccaacggaagaagtgatttgtatgaagttaatctattggttggtagtatgacatatgtggtgcactttgtg

SEQ ID NO: 10618 - DNA, 15885 bp, Oryza sativa
atctctgctgaactcaccattctggatctatcacccatggaacttcagaattttatttacaccagatgaccattggtgatagtccaaacctacatttaagtccagcaattttgatttatttatttttcttaatttgcactaattatgttctgaacacctctcaggctgtgttcattcaaaggtgttgggaactaatctctcgcacactaaaacatagctatccattaacacatgattaattaaatattggtaattttttttaaaataatttttcttaaaaaaacttttacaaaagatacaacctttaactgttctgtttgggaagcgtgcatacggaaaacgagtgatgagttagaaaaatactctctttgtcccaaaataaaccaacttcgtatgaaatatgatacatcctaatactataaatgtggacatacgcatgttcagatttgtaatactgggatgcatcagatcctatacgaggttgatttattttatacgagattgattttttcttttttgcggagggagtaggaaaaaacacagcccgactactttcgtagcagtggcatagtattatggtggtgtttcagagcttaaactagtttagtccttgtcacatcggatatttggatgttattttggagtattaaacatagattaattacaaaactaattgcataaatgagagttaattcacgagataatttttttatgtctaattaattcataattagcacatgtgtactgtagcatcacataggctaatcatggattaattaagcttaatagattcgtctcgcgaattactccagagttatgaaatgagttttgtcattagtctacatttaataattctaattagtgttaaacatccgatgttattgggactgagtttatacatatatcacgcacaagatcgaccacgcaaaccgtgtccgtgaaatgcaacacacgctgctcattgacttttttttttaaattgacgattggtaaagaaactcgatttttttccgcttgcgcagtggcatttgggcccaaaggcccaagacacacacactctctctccccctcgtcgtaccactcgccacgccgccgttgcaggagaaaccctcgccgccgccgccgccgccctcttctccgccggtagccggtacgcgacggcgaccattttcctctccttccccgccttcttgaacggtttccccaattttctgaccgccgatttgtttgcagctcgcgcttctcggcgacatggcgagagagaaatccaagaaggaggaggagggatccagtgcgacgaggaatccggcggccgagctcaccgaagacctcatcgtcgacatcctctcccgcctccccgtcaagtcggtctgccgatgcaagtgcgtgtccaggcggtggcgcggcctcatctccgaccccgaccaccgcaagaagctcccccaaaccctcgccggcttcttctacagcagcgagaacgaatcgagcttccccgatgaagaaacatttccaattgtcatttgtgaaacattggttggctacctgttgtatcgaatgattaatgctggtgtttattagctatccactgtaggcatgtaaaaattcaggatgttaatcagtgcttatgtttcttacaatttgacctgtttcaattctgataacattacacccttgcgctcttgtacattatcaggtttgatgcttgctaaaatcatgtgaatatacggtgaaaatgcatgagttttcatattgaagaattcagaggacgtggcaataggcttatgtgactttatgatgaaatgcatgagttcttagatagatagaagaaattatgagaaaatttcatgtttataccttgagaaacttgatgcatttgcactatgtgctttttatttgtaccatcaggttgcacttgggcggttgagcctgaagcagagcaacaacaatgcattctcagaaggaaccgaagaacacttggctgcagtcagacatcttctcaggtatgtactactgctatttagcagagactgactattggtgcagctataaggagtgtggagatcttcggcttgtcagctacagtgatagcgacatagctggggatgttgatgattggaagaaaagctctattctttgtataaagtcctatctgctggttgttcaggaaggagaaagtggtgaatctatcatctgtgaggatgaatatttcgctgcagcttgatatggtcatatggcttcttgctgaactgaaggatgtggaggcaggcaggtgtgttggttaacaggtgctcatttgacccaaaatcccaaactgaatcaaattttttggtttagaagttgatgtcctgatctgaaattttgatgaacaacatgcagggagagggatttctgttggtttaatcgtgctcctccaaacaccttctctactggagattctgattcaccgagcatttccttaacaagcgaaatgaaaaaacttagttttgactgccaatcgtatctcagctttttgtaccaggtcctatttgaattgaaatttcagatatgtttttgcaggttgtgctcgacgagctggtaattaataaatcaaagttatttcagcgaactcgattactgacaaagaaatgctcttcagatcacaatcaaattcagtatgtgtgccacgtgagtatctcaactcctcacacctattcctctccattcagtatcaaagctatctctcgttaaaaagttctcatcttatctctctctctctctctattcttatatccatcggatcgaactggatcatgtgttgttaatgagccttaggtccgttcattagcatataattagttttttttatctgagcatataattagttgagtattaactattgcaacatcgaacaagagtttatttaatttttaaagaaacttttatatagaaaaaatattaaaaacacaccgtttagctttaattttcggaaagcgcactaagaaagtaaaacctaacccctatatgcacattcgaactcaaccttgtagattgtcgtggtagacccagataaaatttagaatattgacaaacctaagtatttgatataaaattttattttaaatattctttttctttgaaacacagtacaaacataggctcgtaaaacgcacactcatcccaacatagaattttaatttccaaaaataacttcacaactattttatattataagacagaagtagtatgaatatttagtgtctactcatacttgcagtagtactgtgagactctgggtgtgtttagttcgtcaaaagaaaatttttgggtgtcacatcggacgtttgaccggatgtcggaaggggttttcggacacgaatgaaaaaactaatttcataacttgcttggaaaccgcaagacgaatttattaagcctaattaatcagtcattagcacgtataggttactatagcacttatggctaatcatggactaattaggctcaaaagattcgtctcgcgatttccatacaaattgtgcaattagtttgagtaaattgcattggtggtacacaaacttgttagctgggtgcgatttaatacataaatttgtaaaatgctcgtttcagtacatgaacttgtctagttcgtgcgaacgaggaccaaaataacttggtaatgttaattttacgaagctgattaggatgtgacgtgcatacgtgtagtgagtatgcataagatatgcaatatttataaatttggtctctactttatccttcatcatggaaatgatgaatttcatatatttctaaccctcatatcattgctaagttttttctttatcttttttctactatcactacatccaattattattttatcagagaggtgtatgtctaatagcaaccttctcagatatgtatttacgtagtattctaatcagcccctaaatcaataagattagccatgtagtgttcttttcgcctttctccgcacgcatcagacaagtttatgcactaaaatgagcattttacatgttcgtatactggattgcacccacctgacaagtttgtgtaccggcaatacaatttactcaattagtttctttatctatatttaataatctagagtatacatatattcaaagagtgtacatatattcaaagattcgatgtgacgtttttggaaaaaaaaatattgggatctaaacaaggcctctggatggctttgcctcactgtctgaaagtgctggacctacagtacacatagcaaccgacaaagccgtaccttgtccgtgcatgcatgcaaccgacaagcaggatggatgtatatgctagggggacaccaaacatgaatgaactcatcacacaattggcaccaagttggatggatcaccatggatgtgactccctccgacgatatttctagcgtgttttgtggcctaggatatccgagtggtcatggtttcatcaacctagttgcagaggatgatatcgtggttgttgagataaatatatggtgggtttgggatgattacaaccgctctgagtatatacttcctccgtttcacaatgtaaatcattctaacatttctcacatacatattgatgttaatgaatctagatagatagatagatatatatgtctagattcattaacatcaatacgaatgtaggaaatactagaatgacttatattgtgaaacggagggagtatataggttgagggcgtgaggcacgctaacgttttgttatgattgtttgttttgtattggagatacactatctatagcgagattgtttgctccatacgtaaaatacgcagattcgttcgtaagaaagtgatgtgaaatgtgatactcattgaattctagagaagctatatatatatataggattctactaataacgtttgcatgtatgaaagaactattgtattcgattaacttgttacatattcaatgaatatggatttataaagatatatagttgttggcattatcttaaaatcacatcgaactatagttacttattagatgtttgtatggaacttctccattcaactaatctagattcctttttagataaatatcaatttacataattttccacatatatatgactatgaaatatctccatcgatttctgtcgtctagatcattttctttcacggaggagttattttctttcacgcttcttcttgttccaatttaccgagtcacttgtctccacacatcattttcattcagataagaacgtactgtacgtacatccacgaaatgccgcgtaggcagcgtatatacatgcgctagactgatagtgtgacgattagctaggaaaagtgcgtttacaatgcgtgaattaaggctgagagatatttctaattaatccagatgggaacaataatcgacttggctttcagtggtgatgtcgcaacactgaaaaagtatatgtcggaaaaagtctgttgatcttttccccgaattttgttaaagttcgtgaaatcactgtggaattaattcaaaccatggcccctgctctcgcctccccctgtctccacttgcttataagtagaaaatctcaaaattcacatagatatgagaaaaatttccatcaaaatttccaaacatactcttacactaacaaaatatatcgattgaaaattaagacatgactcattctgcttaatttattctttacttataacaaaggggattacattgcccaacaccatagtactcatgtacaaactcccagtgagcccaatcgcataacctgacaactgatctagcaaaccacaaccgttcattgcatttagcgatgaaagagagctgaccactaacccacatacatgctatttaagtggaccaacccaccaaccacgtactccatccttgctataaaaaacaaacctagaatcagatatgacatattatagtactgtgaatctggacatatatatgtctagattcgtagtatgaaggtgtgtcacatccgatcctagattggtttttttacgagagaagggagtagtaaataacctattttggtgagtttgtacatcagcctacttgcatccctaattgcattgcagcccacacaagcatgtacacaatctctcctgcctttaggcgcacgagatgtgtgcctcctcgccgacgtggatcgccttcgtcgacgatggcacggcgcactgtgccgccgccgccgccgttgccggaaagaggacgcctgctgctgctgcttgatgacggcggccctcttgcaggcggccatgacgagcggctggtcggcgccgaggggacgacggggaggttgtcgcagttgcagatctcgatcatgaagccatcgggatcgtggaagaagatttggtccacatagatgccacctttctccacacatcgttgtatgtaagggatgcctagctccttcagccgccgctccactgccaccatgctctcacactgcaaaaccgaccagctacatgtcaagtctagttcataatccaacatggcatatgtaaatttgtatagcgacgtagcatattttatagtataaaatttggtacctctcataaaatttattttttggacctcttaaatactgtaaaatttctcgcgcaaaatttatactaaaagttttggtatttttttggacctcttaagtactgtaaaatttctcaagtttgtaaaagaagttgctttacattactgggcttgtttttaatatatatttgtagcatttcctttggtgtagaaaacttttacataaatagtgggtgatacaacggctagatatattttcatatttttgatgtctgaaaattttcaaaataaaagagatgacatagacgtagagatacctcaattacctcttaactaggaataaaaaaaaattaaaaataacttttcttaattatctgatgtgtaagtttttcctcgagttgtaaattaactatgtacttatgcatcgggacaaaaaaactttttcatgtaatatgatgtgtgtcgtcgttatcgtcgtcgtcgcctgtctgccaccttcatcttcgtgtgtgcgctatgagtcagcaacgttgtcaggtttatgataagatgacacagtcacacacacacacacaagttgctcgtgataatatctccttaactaattggcaagctagtgatcatatgcatgcatccacaacaatcagtgatgcagcatcagcttgtccattagtatataatcactatttcatgtacagatcatagatcagagacagagaccgagacagagagggagacatacagaggcagagaatactaggtcttttgcatattaatgttttggcatgtgaagctacaatgaaatgaacaacaataattcagtgtgaaataagagatacaacttggcctgccagatccatgcaatgcatctctgatctatgtaagttggctaaagattcattacaattgtaataatcaaataaccaatctgcctttatcatatacctaattaacaaaactatatatgtcagtttggtgccaggaacagaggaggctctgcttgatctctttccatggcctcccattgtagcattgagaattgtcatatttgagaggttaatttgggaccaaactatacatgtacgaaagcatgcaacacaatgaatgcctctgataagttgcgataaaaaggatttggaaagggagcttagtggaaaggcaatctgtactccagatgagaatggacgatggggattacctaactaacagctgtgctgtgtctagctaaagggcaaaatgccaagtgaggtaggacatgcaaatgtgtgcaatgtggtccttttctagagagttctaaacttcaattcggaatgaggtggtcaattttaggaatgaaattcgatctaaaaggcttggaccggtcctctatatataaaagtaaaaagatgtaaagagccagtaaaacgaactgctccctctgttttagaatataagaagttaaacagacaaccttgtccagattaatagtactataatatatcctatccaataaaaactccttatatttcagaatggggaagtaacaaatagatagaaaagaaaagaacacacgatctgattatttatccttattcacgaactaccaactgatataataacctattataaaatgcatacctaaaattaggcgtattacaaatgactcgtaactgcagtgtgcctacttatatgaattttgcatgaaacatttaggacccctacatggcaattatcaattgtcactagaattttgttaaccgtgcaccatggattggcctaccgccagccagacatctattgggcatctgtcaatatctggtagggtaaggtagtacccatagcattttatttacttcaactgctttacacggccaaacagaagaaggcggagtcatttgttcaggcacctatttcaacgataaaaaaaaatccaattttacttgctcttaccgtctcagcatgcttatctttttatcagatattttcttccgtagcacattttttttctttgttttcctccaactaatctttccaacaaaagtcaccatttttacctcccaactaatctatcctactaacggaggaaaaaagaaggaatttaggagcatggacaagcctaatagttactgggactttgctaatgctagctgaagctccaatgtcaaataggggattaatgatgcattatcattttaataagaatctaaaaatagcattgtaaatactaactctgtcccagaatatagcaccctaaaaccggatgagacgtatcctaatactacgaatctagacatgcctcatatccagacttatcagacttatagtaataggatacgtcccattcgattttaagttattatattccgtgatggtgggaggatatgtttaatgatgttaatttggaagggaaatggtagaagtagccgtggagatatgaacagacaaaagtccccggcaactttggcaggccataacattattaattagtgtcctatgttgttagccgttgatgattggtgcgacgtttcacttatacgtactattcgtccatatacatacggagtatgctctaaaatatttatgtgtatggggccgttttgctgacgttgacacggatgctaacacatgtgccaacaaaatagagacgtgtcgaacaggtaattagttagattaactttgccacgacacgaaaagaaagagatgtgtcgatccaaaatcgcacaaggcgtcgatcggcagtgcatactctgttcggccagttaaccaatgcaaatggaaatatctctttgagaaaaaaaaattcatgctgatgggatcatgaaggtgaatgggatgtgttgcaatatttgtagtgatatgatccaaatctcgtataccaaacgtacctggaaggagatgtgattatctttaggattgatctctgttttccctggcaggctgtcaggatcttcagcctgaagcagatggataccaatcccataattaaacagcctgccaataattaaacgatcgatgatattattgcgttgcatgcaccaatcagaccagaacaaaagaagagaaaaagagaaaaacataagatgtatttttgaacggttatactgttaccgacgttttatataaagaagatatcctattttaaagaagaaacgagatcaaaactgagcgaaaatcacgactacgacaaaccctccagatcgaagggaaaaacattggatgtgaattgtgtgtaccatgcgccgtcgaagtcgaaggatccggggcgacggacggggaagaagccgagcacgtcggtgtagaaggtgagcgactcctgcaacgacctgcacacgatgctgatgtggttcagcgacgccagcggcagcccgctgcccctgctgcccttcgccgccgccaccgccgccgtgttcaccatcgccgccgacgatctcccgctagctctcacgtacactctaatctctcgattgattccaagctccggcgaattgaagagatcaccgagcaaatcgagctagcaattaattaggaaaactgagctcgattgctagctagctaaattaacacggcacggatgaactgagctgttgatgattgtgatgatgagcgatgatcgagaagggatcggatatggaggaatcgggcgggtcggaggggattaaatagggctcacgagatcggtgccacttgacacgtgggatccacgtcaccatcctgctccgcaaccatggcagtctaagctgtactagctaagctagtggatggctaagctccaaattaaacagtactccactccgtattgtctacgaggatccaatacattaattaatggattaatagtgccgccaaagatgaattaatggattccatgatcacggcagagctaagagctaactcatctgtccaattgaaattagttccctctcctttagaacagagaatttttaacaaattatataggaattaaattttgttcctgtaaaaagattgatataaaagagaattctaaggtctcctttgaaatgaagaaagagccatcgatcaatggatacgatggaagttgattaattggagcatagctgcaggaaggtagctagctgcttccagacgttacgagacggatcaccggaagagaaggctgtcacggctagctagctagctcatcatccctgtacaatttgtctattgctggatcacacatattgacaacactgtcggtgtaggtttgttcctctctcgccgccgcaaggtccagattttggatttctctctaccgctttcttcgagctaaattccactttctttattttaaaatataagccacaaccatcgttaatacaaagatcaagatcacctagatgcgtgcaaataacgtggtgttgaagttgaacgatagaggatttaaaacaaagcgaattacaggaagatatgttagttaaatgcatgcaaaagacatgaagagaaaaagagataagtccattttatacccccgaactcttgcacatttgcctaaaatacacatctagctaaactttaaagccgggtattttgcatcccctagcttttagttccgtgcagttacccccctccccctccccctcccctcttaccggtttgtagtccggttttaaccaacatggtgctaatgtggcagtctactcagcactataaatataaaaagcttatgggttccttatgtcacactctcctcctccttctccttcccctttttcacaatccaacgatcctctgatttcatggagacaagattgatgagtgactcgccattgctaagctcgtggaggaggagcaaggtggccggcaatggtgaagctagctcgcgaacatcaattgcgttgaccgcacaatctcattggagacaagcccatcgctcgctgaatggaggcggtggaggtgcacctggtggaagaggagctagctcggggtggcgaggagctccgggtgacggtacattgactaggcacagatcaacccgcacctacagagacaacggcatgaggaaattgaagaagcaagtagccatgccgcacgcacgcatcaacctaccgctatatgtctagccgacccggagatacttcaccgtcgtaggaaggagctcgtggtggaggcagggtttgagctcctccccacgtgactggcttcggtgggggaaactcggtggacctcctcggatccagcaaccccttgccgagagtggagaaggcaggtcggcagggccgcctcgagctcgactcccttcatagctgcttctttcccatgtcgctggcttcgctgccttcgttggagcatgctgcccgcattgccgcctacactggagcatgccaccaccttcgccgacgcgtgccatgctgctcacccctgtactttccctacgccgcgagtgaagttggagggctcatggaggaggtggcggcgaagctttccgctgggtgtgagacggtcctcacctgtagatggatgtgtcgctccgaaggggagaggaagagtgggtgagaaagggaaaggaggaggaggaagaagaaggctggactagcactagaattagaggaggatgcagctagcaagcttgctggtggcggcatgacaccagtgaggcaatgagaggtggcgtgtggggggccaacaaagggaggggagatgggttacagattatatccatgcatgaatttaaaatgtttcacagttagtgaaaaaacagacgattgacaaatagctagcccctagaaatagatattgtttacttgtagttttaagaccgcgactaagcagtttcaggaccttacatgtcgtgtaaattgtacaccttatatgtgaagacattgttaacgccaaaatttggtaagattctttagtggattaggttaaggaaagagcacaatcaatcgatggaaacttatccagaagagaccgagtttaagaaagaatcgtgaagaccatggcatggcagtttaattctatctattaattagacaggatttggtaatttccttttatctttaggaagtgtttatttagtgtccgattaggacttgtatctttccttttatcttaaggaaatatgtgtcgtgtctgatatggattagtatctacccatgggtataaatatatacacacaccgggtctctgtaatctatctctcgatcaatacaacttcagcgcattgccaccctttttattttcgtttttctcgatgagttcttatttcgagttgggctgcatcggcttcgatcaccgacgaggggtaaggcttgttatggctgtttgcatcagcagggctagggcctcgacactctaatcttatcgatgtaaacacctatttatcacatatcttagttaatctaagtcaatgtttcaatttagttgtattagccagatcttttttagggttttgttagtattagttaaattgtttcattggtctagattagctaaatgtatccaccaccctgaaaatcagttaaaggcttgattgtctagatattatatttttttcatacttagtgctgtatcaattgggtctgacctactaagtcgtgcttagaaccataatctctagcccgctttttgattgtcaataagggtttcatcggggtttcagctgatgagttatcaggacattgcatcggctcgcaaggattacatataagttagatttagccgatgacaacaaagagttcattgattatctaatcatatggatttaatgacattggacctccagccgatgtatgttttaaccttcggatcagtgcttattccatcatacctttattagtcgattggtttctactggtttatattattgtcttattacattatcatcagtagactatctttatatcattatttactcaagtgtcaaaatctacatcgaacatatagccgattgttcaaaaccctatcgacatcggttaacatgctatattggcttatcggccgatcgactctttgatcttcaattcatctatcttatcggttgcaggatcaaactgattggcacgcccacacttcatcgatattttggacctgcactggagctaagcagatctctcaggctgttgtgttcgtcgacttaattcacaccaacacatacctggcaccatcgatcgagcgcgaacttttcgtcaacggacatgtaaatggtaaatggcaacatattgggtcaactacaggagataaggggataactaggccagaaggagaggaattgaagccgtatgcctcactcatctccatcaaaatatatatgtgggtgagccatcctgatggtcacagacataaaagccgatgttttctaaaacatcaaggaaatggagttccgaaaaaaggcttgattctttggccataaacaatggaagccacgcttaagagtggtcttaggaaaagagtgtgccatgaaggacgaggccatttctagaggtactagccttacaatgcacaacagtttcacttggactccatacatttctatgtcgctccctctattttccgttcaagtactctttgcatagcttttttattgagtgaagtgtaccggcggtcctcaaacttgtcgaggtgtgtcatctaggtccctatactctcaaattgcactttaacgtccctaaactcgattatgcgcccattagtggtccaaaccagcctcgggatgacttttagctgacatggcatcgtgacgtggatggtgctagccagctgcgggggtaatattgcaaaggagccctcctttttttttccaaatcgtcacgcacatcttccctgtgtcccctcgagttcttcgcgtcagagacgagcggcggggaggtaggcgacgcaaggcggcgattgccggcgaatactccatccttgctccttgccgctgccgaggagtgatagttatagttagagacatactcaaaaatctgggaagatacttgtattttgtcttttgtttcatagtttcctgggatggtagaagtaatctaatattttgtttagtgagatggtacatgcaactcacagtggtttaagctccagtagtgatctggaatataattgtgatgcactgcaatttatctagtaatggcactgcaatttatctagtaatgtatgtcctgtctccagtagtaatctcagaattgtgatgggatttagttagctcatttttctgggattcagtaagctattttttttgagattcatgtgaaatcaggttaaattttctcatgagaacaatatagcagcaaaggccatttcattccattcagcaaaggccatagccatatcatatcattgcacaaattatgccattacatttaatccatgtcactacatttctcaacacagattcagccgttcctaaacaaagcatatatattgatggccaaaatacatacacagcaagctacaaaacatttcagtagcagaacaatttcactaccaatttctatcaaaacattcatcttctttactagctgcttgtcctcaatttgttctgcaacctgccttcctccaactccttcaccttcaccatgcaaatctatcacctgccttttgcctctcgatctagagcaagcttgcaaataccctctcttaatcaaatattgctcataatattcctcccaataccaaaaatcacatccagtaccattccgctgcacacaattgaacaaaatgaaacctaattggcagagtaaacaaaaacatattgaatcaatgtggactgacctggtgacttgggcaggtgtaaaagatgcgtccgtagttctcggacgtctttgccttacgccgaacgatcgtcttcaactcgcattgcgggcattgaatcagagggagcgcaggcttccccatccgccaagacgacaccgatgcagtatatcccccatccatggcggcaacgaaaggacctactggggctgcgtgatttagatattgacggctagggattcggcagcagcaaggagcaaggatggagtattcgccagtgatcgccgccttgcgtcgcctgccttgccgccgctcatctctgacgcgaagaactcgaggggacacagggaagatgtgtgtgacgatttggaaaaaaaaggagggctcctttgcaatattacccccgcagcttactagcaccatccacgtcatgatgccacgtcggctaaaagtcatcccgaggctggtttggaccactaataggcgcataattgagtttagggatgttaaagtgcaatttgagagtatagggacctagatgacacacctcgacaagtttgaggaccgctggtgcactttactcttttttatttgttagctgaaacattacaaaacaaacctaagatgacaaatttaaagtaataacacctctctctctctctctctctctcttcaaattctgcat

SEQ ID NO: 10619 - DNA, 1587 bp, Oryza sativa
taaagatcaaaatttttaaaaccgggactaaaaacaatctttagttccggttctttttggatccgggactattatggattttgccggaccgaccaaagatggtttctccccccagtggagttatataattttaattgaacatagtaatcacattttaattgtacatagtaatcaccctttgcaacgcacgcgcgtttgtaattaaagtcctatacaacaacacatttcatctaacagaaaggaactttacagatggtacaaagtcaatatgaccgtaggaagttatcatgtacccaagattcactagtttgctattgcaggcttacatgaagttatcatattacccttataaagtttatgaccttaggggcatattaaaacattttagtggtccccaagtaacatttgatgctactggtgagagcagttgacgtggttcccataacacttttctaaaatatatgctttgctggatggtacttttcctcaactccgatcgctcgagtcgaacacttgtgcctggacttaaaaactctcccatcttttagctcctcgtcacttcacttgtcttagccaaagaacctgctcaaacacaatgcctttagtgatgccaattcgagcaagtaatcttgttcgaacacattttccttggaacaggccttattgggcgaatgcaaatttttggtcagaaccggctacatattagaatttatttgagcaaagctcaaaaacactttcctcatcatgcgagtttttggccgagtataggggatggtgttcaccccctgctacaacagtaatggccagcgataactagagactgggatgcacataaacgtacagtatcagcacttaacgatggcattatcagtcttcggacacgcacatatctctaaactaattgtatggtgagaaaatcgaatgtaatccgagaagaaagatggcggcatatttatagcaattccgaaaataaaaaggttcagtttttagtacaatgaaaaatcctcttgagacagacaggccagcattttttttgttgaattgtcgtgtatttatttggtttgcttcatcttaacctgaatttattggagtccaatccaagtgcttttatttgtgggcgtcgtcgtcctcctcggcgggagtccaaccgtgccggcgcagggcgtcgcggacgaggtcgctgtcgtggtagccgtcgcggaagttctcgatgtcgtcgaccatgtcggagagggatgacacaaagatctccttcttccactgttccatccgcgggaagccgcagatgcgctcgccgtagtcgtcgcagcgttccaggttcaagaacatgtcatgcgtccaccgcttcggcaacccggcggcctccatgccgcgggtgtgctcctcgacggcgcgctccatcttcttcggcgacggcagcgtcctccgcccggacagcacctgcgccacccacctcgcctgcaccttgatgaacaccggcaccaccaccatggccgggatccccacgaacgacagcgacggcgcgagcgccggccggaacacgtgctcgtacagcggcccgacgcggttgtcgtcgacggtgacctt

SEQ ID NO: 10620 - DNA, 710 bp, Oryza sativa
atcttccgccgttgttttggtcaccggtgagttcgccgcgtcgccctctacgtgttggtgtcctccgttcgcgtcgtcgtgccgtcgttcgccggcgagtttgcgcgcctgagccgccgccggtggtgacgtcaccgctgacgtcatcgccgtcgtctctcgtggtctggccgtggaccgatggatcttggccgtccgttttggatgggtcaatatcggccgttcgtttccgtgagccgccgccgtgcacccggttcaccgtgaaccctagccgctgacgcaataattcccttttccttttcaaaaataattcattattgcgtcataattcaattaaaatctaaataaatgatttaatctgatttaatctttgaaaattcataactaattcatcttagctcgaatttagttggttcaagtttctaattttttctaaaatagagatctacatgttaaaaatatccacatgtactgttcatgcttgtttgtgtgctgttttggtgattttgctcctttctgtttagattccgacgtttccggagagtccgtttttgcaggagaagattttgaagagttccaaggccagcaaggcaagtcacacagatcccaaacatccctttgagcatgttgatcccgtttaaagctattgtttctattcaactattgcatttattttcgaatgtcattgggtggaattaacctaatgtttg

SEQ ID NO: 10621 - DNA, 1237 bp, Oryza sativa
ggcgcttccacgttcaatcacaggatcctagatattttatccaatcataactaaaatgtgccattttaattaatatactaactaataattagataatccctccgtttcgaaatgtttgacgccgttgactttttagtacatgtttgactattcgtcttattcaaaaaatttaagtaattattaattcttttcctatcatttgatttattgttaaatatatttttatgtaggcaaataattttatatatttcacaaaatttttaaataagacgaacggtcaaacatgtgctaaaaagtcatttttatgtaggcaaataattttatatatttcacaaaatttttaaataaaacgaacggtcaaacatgtgctaaaatgtcaatggtgtcaaacatttcgaaacggagagagtaattactactccctccattccaaaatatttgacgccgttgactttttaaaacatgttttgaccgttcgtcttatttaaaaaatttaagtaattattaattcttttcctatcatttgatttattgttaaatatacttttatgtatacatatagttttacacatttcacaaaagtttttgaataagacgaacagtcaaacatgttttaaaaagtcaatggcgttaaatatttagggaaggagggagtacgtattgcacccggtaatttttgttatatgttcgccactccaattgcttttgcgtcgtcgtcctcctcctgcggccgcggcgcgacgggagtccagccgtgccggcgcaggccgtcgcggacgaggtcactgtcgtggtagccgtcgcggaagctctccatgtcgtcgaccatgtcggagagggacgagaaaaagatctccttcttccactgctccatccgcgggaagccgcaggtgcgctcgccggagtcgtcgcagcgttccaggtccaagaacatgtcatgcgtccaccgcttcggcaagccggcggcctccatgccgcggctgtgctcctcgacggcgcgctgcatctcctcctgcgacggcagcgtcctccgcccggacagcacctgcgccacccacctcgcctgcacctcgatgaacaccggcagaagcaccttggctgggatgcccacgaacgacagcgacggcgccagctccggcgggaacacgtgctcgtacagcggcccgacgcggttgtcgtcgacggtgaccttcccgttcgtgtccaggaacgggaacgagtaggtgttgccggtgca

SEQ ID NO: 10622 - DNA, 6804 bp, Oryza sativa
taataattccaaatttttttaataagacgagtggtcaaacagtgcaaataaaaactcaaaatcccttatattatgggacggagggagtacctcctaaaaatacccttagtttagccgaaaggctacactcaaaactaacctgatgtatactaagaaagtaataaatgctcacaattcttcccaactatagagtaccattattattacatttactaaacaccataaaagaacaatacaactcttttttacaccaaaatttccccatattcccctatggccccacctgtcatccacacaaaagcccacctttcttcttatgggccttggggcccatataaattagaccccagtaccccaccccttcgccgtcatctctctctaacctcacgaaacctaacaagaagaagaagaagagaaattccggcaaggaagggagggagggagaagtcgttggtgcgggggagattgatttcgcgggagggaggggagctcgagaggcggtgattcggggagtcggcagggtggcgccgggtgcggcggcggcgggggcggccgtcggggggatggcggcggcggcggccgagaggcagctggtggtggccgtggaggggacggcggcgctggggccgtactggcccgtcaccgtggcggactacgtcgagaagatcgtgcggtaatgctgcgcccgtgctttcctccccccgccgcgccaccctgctttcttgttactagttgactgtacggccgtcgcggattagtgcatcttggatttcttgatgtggaagaattggaccctttgttgattgtttagctgtttattttgagacgaagggagtacatggaacgcgaagcggtagctagttagttcttgatagtggaagttagcagctatccgtgtatgtgtttgatatacacagttttttagttatattagtcggatatatcgttcactccaagcattagtaggagatttggagatttgttgtttgctctcaccttcttaattgcaaacattaaatggtactagttagcttcaattctgtttcacaatgcttattcaaagagtaagaatgcaagcgcatcatcgatgtgtggaaattcgtggtttcttgatgaactggttggttgttggctatatggtgttgtggcacgagatacatctttttttgctcctgattcgaggagactttgtatcactgcatatgtgcagatctatgacagaatgtagcataattcatcttctactttgggttttatgccttttctagttcctccttgctcattcagaagtatttttcttcagtctagcatattttagtgttttttttttcatgaatgatgaatgattcccatgaaaaccaatttcagtttttggctggtgattttactactcttctgtacaaccagtaatgtaatgatgggatgtctgtttggttatggttatggcttttctgaagtccttgttttcactcttgttaattagttgatgttctggtttcgcatgggtgtaattggaatattcatcacatgagtcaaatttcttgtgttcaagcctttcaaataaaaaaaataatgaaagtgggagctgtttgtattgttggtcaataatcagtttgctctgaattattagggtttgtttgcagttgctatcctcctgtgcttattatttagcttctgtggaaacagttaagaaaaacttcgtagtctgtttgagaaatcaaattaatgttagacgaattctgttagtcaatttaaactgttatttctctgacaagtgttctgtttttagaactgaaataatatctctatttgcaacttgattaaaagagcagcagttagccaaacatcaaaatttctataagctactgtacggaacaggattatcatagtccacctcaacgcaaaatccaaatggagcctttgatgttatgtggtgatccaccacagcttcactctcatatacttactatcatgaaacttttaagctcatctcttgctagaaatttttgtcaatttctgtagcacttagtaacctttgcatttttagtactactattcatgaagcatttcaatttatgcaggagtttttgtgcacatgaaatggcaggacaggtaatttgctctcagtatttatcgtcggacttactacttgatccatgtttccttgacttgtgtcaaaactcaaaagtgtaaattattatcgtgttatgcagaagctcgcagggacaccccctgaacttgcattagtcgtcttccatacccatggtccttatagcggtaaagtttgatatcctccatgccctaagctttttattatgatccattgcaattatttgtatttagttctatatcaacaaaacatgtaagctatgataattcgcttttgattccttgcagctttttgtgtgcaacggagtggatggacaaaagatatgaatgtgtttctttcatggttatctggaatatcatttagtggtggaggctttagtgaagctgctatttctgaaggtcttgctgaagcattgatggtattgacatattggcatcgttcagttcttttcactttttgcacataatgacttcctctggtgtttcctgtactttttttttttggttcaaaatgcataaattagaaactgtggcttactacttccaaaatttcagtactgcatatggttgcctacttttgagttcccgtgcaaggttttagcattttgtttggcttgtgcaatcatgcttcatttggcatatgaaatgatgtttcttttttgccaaatggcacatctttcatgttaacatcaacagtagcaacctttagttccaggcaagttggggtaggctagagatgaaactgatgtgcagccacaaaaaaactaagggaagtatagtactagtaataacaatatagttaaagaagacgtgaattaggtcatgattctgggcatgtggacctccaatttccatgcaactctatccaaaaccataattcatctccacaggaacgactgggatttttatgatggcttaccaatgttatcgcaacattcttcctttactcagcgttaggaccagctatgctgaagcaaaggcagagtttggtatcttattaacagagatattttgatttcctagatgaagggaaatacctcttttcatctctcactgcacctgaatttgggtccagttttgtctaaattagttgatctacaattttgtttctcatagtaagccctgtaaactattagttgagcctggacattatgtagaaccatgatacttaacaatacatgttctacccaaccttttggattactttattttccaagaattatagcttgttgtcttggtattgttatttccagtattctctagaatctgtcctttaatgcccttctgcacaacatatgattcatgtgagaaaattctaaggtggtttgcacatccacttatcagctattgtctcataaaaaatgtcttgatctggatatcagctacagatagccttaccttagtaaatagagtgtataactgtaatcaccatttcattaggttaatttttgtaaggaagattttcattagatcaaccctattaggaaactggatgtctgggccagtacccagaataagcagagtgaaactagtatgatcagaagtttaaattctatgaatgtacctatattagtatgttaattttcctatggtactgagtcttcaaaaatcaaaatttcagtcttcatccctactattataaagagggaatcgtcctcctccacctccacataaaagcctctttcctccataaaaactgtccaccctaaaaaaaactgtttactaataaagccaaccattgtataaacaccgaacagctcactgggcccaaatcctcccactaaacttaataaaaaaaaccattgcaatgcatgacagcatgagcctataactagttgaaaaatacttgggtctttgaatttgatatcattttatttcttgagttctctatgaattaaagtatttattgcctttatgattttatttcctgtgtgcaactagatactccaaggcagttctagtaacagtcagaatcatcaaagccatgaagtacaaaaacattgcatacttgttgcagcaagtaatccttatccactgcctacgcctgtctaccgcccccttgttcaaagtagcgatcacaaggagaacaatgatggagcaaaagaatcttgtcttgctgatgctgagactgttgcaaaatcatttgctcaggtcctacacaaatactgatatctagcatattgctgattacctgtgtttcaatgaagtggtcagcagtcattgttggttctaattaattttacttatattgatgtagtgctccgtttcattgtcggtggtatctcctaaacagcttccaactctgaaagcaatatacaatgcggtaatttcgttattttgttttgctaaattctgtaagccacaagccatctttaataatcttctcctggtattttacttgttcattgatggtatgatagttgcatcttgatttacagagggttgaaaaactcacttaagaatatatcttttaaaataaattataagcatgaacttgcagaactggccgctccactattacatatgttcttgtacttgtacacagtactaaacttcatattttcattaccattgaaataaaaagagtaaattttatcaaacaccacctattatggtccaagttgcacaaaaccacagggattttggcacatgacacataaccccatgtattatggccctaaggtttaacaagaccacaccgttaaccaattttacatactcctatatcaaagttttaaaagttttagttacattcatgtaacatttatatgatggataaaaaactcataaatttgtgatgtgattttataaatgatcaatagtgtggttgtgtgaaactttatagctataatacctggtggttaagtgtcacgtgccaaaacccatgtggttttgtgcaacttagaccacaacacctaaaggttaagtgaaatttactcaaataaaaatgaactcagtttggattgtactgtcattgtatcttatttgtggataagaaaaatatccatttatttcatttttttaattagttagtatcctgcctgaacttgctagctagtctttgtatggtttacagactataaatctatgaattggcatccttatctatcattagtttaatacaagcattttttaacttacatgatataaattttatcttctgcaagaccttcgacagtttgtactgatgaataatttgcaccaggtgctgatgttgtccatgttttgttgcaggcaaagaggaatcctcgagcggctgacccatcagtggatcatgcaaaaaatccacattttcttgttttgttgtctgacaattttttggaggctcgaactgctctaagtcgccctttacctggcaacttggtcacaaatcaccccattacaaaaatggatacagctgcaacatctgtgccagtaccaacttcaaatggcaacccctcaggttgaacaaatgctaacatttggcttagtcttgccatggtatttagcctttagttctgttcctcttttggacgaaaggttgtgacgttgttacgatgtttgtgaatatgtaggtgcttacacatagtctagcgtgagtctgctttaacaaatgcttgacacagctttgttaaggaaaaaaatgttaggctaaagtgaaataaaccattgccataattactccatgggctgaagcaacataggttaacaattatcgttgcatatattggtacgcctgactattttaatagcaggaaggattctggcaatgcccttatgccatccatttttggcccgaaaaaagcatatcattgagttttcaaagccttagaggaataaaatgtattgtgagctctcctctattatgaacacgatgtgcttgtgcatctgacattacatgggactacaatataatttcctatagtttatctccaatttgtcaagtacagatgccttgagctggagatgaagaaaaatggatgtactgaatacacaaacgtgaaaacctgcctcctaaaagcttgtaccattgtgttctatttgtccccttcccatctgggtggtttttcaattgtagtgccaagaaaacatagattattctataatgattgtgtcttcatggttatcattggcatggggtcacaactaattgtttggactctgagtgataatgctttcaatggcatggtgtcttcggattgatgaattctatatggataacaagttttgtttttcagcatcttaatcaaaattaacactgaggatacaaatatatcgcaattcctgtttttatacacagcaatgtggttttaaaggtattcgtggatatacataatttgttgtttttgtgagtgttgatgaagccccttcattgtttgtttcataaataaaattttacagtttaatgttatgaaatgccaaattcttattgtttgtattgtacattgctatgtactaatatatgccagattgcccatctacctaattaaagtggaacatatttcaagtctagccaattgctggttttatttgcatgatccagttgtgataaatctggaattgccttatatagaaatttgtttttggcttctggttatatccgtatcattactatcttccatactgaacatgactaactgttataagtatttttcagttaatggacctatgcttacccgccaaccaaatggtgttgttgcaaatattaaaacggta

SEQ ID NO: 10623 - DNA, 23468 bp, Oryza sativa
atgcagggatactgcctccgctcagctatctattccgctaggtctatacccatacgagaagtgcggttgtacgggggtcgtttcatgcttaacttcatggctcggtccttaattgaccggggacggtactagccttttccagataccttccaaatcctccgtccgccccaatcgaaaacagttgtttagttttatttctcctttcacaaatcatgtcatcaatatcatggcaatgtggcgctcatgtctccatatgccgcatctcaattaccttcccaaacgtaattgcccaagcataaagcatttgataaatatgagtatgcatgattctataacaacatttctaagcatttgtcataattgactagggacttcatacgtaaacatggttatgaaggaataaggggtaaacaataatcaaggcatggcataatcacaagtaggatgttcatcattgcatgcaattttatttgtaaacaaaataatttcgtaattgggatcaacatgttcaaggaatagtgatgacttgcctgctcagaatagtccttactattgatataattttgatcaaccttcacctcctggaagctgcatacgttgccttacgactaaccgatacacaaattctataatacgcgagaaaaaccaatattcagacaacaaccaaatatgcacaaacagaatgtaattgttgggggtcgaacctagggttgctcatattactcgcacttgctaatggattccaatcatgctaggggctaaagcttcttaatctttctattgtcatcgtggtctatttaggagttaaccaacatagcatttatgggatacatatatatttggctaatcagtggtttagtctatcaaatggctatggaaggattatggctatatatgcatctatctaaataggacggttatatactagaggttctgttgttagatggatttaggatcaatcaaataatgaatcatttgtattattatttaattgatggaggctttactttgattatgaacatattttacttgtcacaataaattataaaaggttaataattatccatgctttgtatgtgagatttgtttaggttaatcatattatggttacggattatctcttaatgaacaatcctaatttacagttgaactataattataattatatgaggtcaagatttataattagtatttatctaacatacatgtttgtcatatactccctctaatttaatatatgcaacatgcaaattaatactataccgtacactataatgggatgtatagtatatgtgtaagcaacaatatcttattattggatcatatatttgagtagttgctttttactgaaagctatgcaatacatgttgattttaagatggctctgtttggttaactaatggatgtcaaccgactatatatatatattctacttcacatgacattgtatcgactaacttttaagtggtccaaatacaactagctctgtgattattctcctaaaaaagttaaagattcatctatgtgcgtttatattttagttacaaaatatgaggctaaactttatgtaaataatttataagtcatggatttagttatatttggacatagactagtaaatggcactaatattttcctatatacccattaatttgaaggattgattataactaatttatgtggttgctacagtgacaaaacatattaaagataattatgccactgtacaatatccatttttatttattggcacactatttaggttaactattatctaatcatttgatattaattaattaataattataaatatattttattaaatagtgaattatataccattggaaagcttatgaatttagatgaatttaggatcaagtttcattcaaatcggagttaaaatgaataagttatgctagtgtaaagattcaaatttgaataattgtgaaacagtactgttcctatttcatttatttttattccataatttacattgactgacccgtgggaccggcctgccatggacacaacatatataagtgaattttcatagattttaatcatagggaccgcacatgtaagggacttaactaataaagatcaaggggaggattactatttactaatcacgtggggcccactctaacctctctcctccattctcttttctctctctcttgtctgttttctcctctctctctcatggctcggctagaaccggcgggtggcgcggcgcgacgacaagcggtggggaagggggaggctcacctgaccggcggcggggtcgatggagacgccgcggcggggtcgacggtggagcacggcgcgacgacgaggcgcagcgcggcggcggggcgcgtcggctcagcggcggcggcggcggcttccaaagaggcagcgacgccggggatggaaaggagaggggaaagggaggggaggtggtgagggtagtgtgggaagcaatgggcagccggggaggggttaatataggcgcggggaggggtggtcggcctgatggcgatgggacggcgtggcgcgcggagagcgaggcgacggtgacgcgcggcgacgcgacaacgcggggcttggagcggcgacgcgacgggcgggaaggtgataggcgagcggcggcagcgacgggcgcgcggcggctcggggcgtgaggccgacgggacaggtgtgctacgacgggacgtcggcggctatggatggcaacagcgcgtggcgcgggagcggcgatggaacgcggcggcgacggcggcacagcggcagcggcagagcgaggcgatggcgacggtgacggcccgcggcggcgcggggcgcgaggacggctaggcgcggtgtggcagaggaggggaaagggctaggagaccacatcgaatacctaggccataatgaacattgactttttcctatttattcacttttggggcctttttcctattaaaacttgtcccataaattctagatttcacacaaatggagtttacccaatatatgttttaatttagatgaaagtttaccaaattttaatattacccatattttattcttatatatatatttctattgcattatttaaataaggtctaattctaaaattaacctagataattttggaggctttgagggttcccaaattaattaaaatatcctaatgtggccattattattacaatagcacattgaatgaacttatttgtataacaatgcattttacgtgtgtctatttattctataaatataaattgagactcagaacaacattaatctaattgtttaattaaacactcacatattcttatttatatataaagcttaatttatttatatgactattattttatatgagtgattttcatgtcatgaggaactcggcgaaatgttctaagtataaatctatatatcctcgtgaattacttatttataaacacgatcattatagtggtaatcatcatttcatgtgttcttatatttcatgtgagattggattcaaatgaattagatttgattttactatttcttttagctaatcatggcatcaagccatcagcatggttcgaatatttaatatttgatctgtgatttataatagaaattaatatttgacttatactttatttggcttgctttcttgtacactaatatttgtagggttaataataaataacatattctcgtaaattatatctattgcttaaatttagatttttctttactttctttgtgatcatttatggtttggcaagcaatagcaatcataacaaccagcatgatgtaaaagttttaaaaagttcgaaattttagtgatttttattgttgggaattttcaggatgttacatgctataagttgggtatgtgagtcatgctggccacatgagatgcacatgtaataactactagcgcccctataggtgattaagagatgcctactcctggttatcgaccagacagttgtagcgacatctcatcgcctatcaatttaaattcacttgtggaccattaaactgcatatatcattgttgaagacttcatgtctatttggtcttacaccgggatcgaccaagtgagtatggcaaatattgataaggggagtcgcgcataacaagagatgcttttacgaatacggtttgtttatgtatgcctatcagttgcctataggtgatcgagatatgcctacacctggtcctcgaccagtagatcgtagcgatctctcaccacctaaaattcatcttcaggtgatcgagaaacgcctacacttggtcctcgaccagtagatcgtagcgatctctcaccacctaaaaattcgtctttaggtgatcgagatacacctacacctggtcctcgaccagtagatcgtagagatcttttactatctaaaaattcatcttcaggtgatcgagatacgtctacacctgatcctcgaccagtagatcgtagcgatctctcaccacctaaattttcatcttcaagtgatcgagatatgcctacacctggtcctcaaccagtcggttacaacaatctctcgacatctaacgtgacaatcaacattgtcgtgatagcaacaatcaagaccgactagatcggcgttgtcaccaggacgacaacgtccaggactaacgacatcaggacgacaacggacaaggttaacaacatcacgacatcacacgatgatgacgaaactcgaggtccccagagttctagagggcccgaggatgaggtagtaggtccaagagccaaaactccgactacgataattcctcattgtcttcgtcgtcatcaggaggcagttctcgcaggtcacgagaatgtcgtccatctattactatggattcccttcaaatggtcgaggtacgactacggcatgtcttctaccagcaacataacgatccttgcaccacgacttttaatggtcgaggtacgactacgattggtcttctaccagcaacgtagcgatcctcgcaccacgacttctaatggtcaaggtatgactacgactgggtagcgatcctcacaccacgacttctaatggtcaaggtatgactacgactggtcttccaccagcaacgtagcggtcctcgtaccacaactcccaatggtcgagatatgactacgactggtcttcgaccagcaacgtagtgatcctcgcaccacgacttctaatggttggagtacaactacgactagtcttccaccaagcaatatagtgatcctcgtaccacgacttccaatggtcgagttacgactacgactggtccttgaccagcaacgtagcggttctcgcacctcaatttctagtggccgagttatgactacaactggtcttcaatcagcgatatagcgattctcccactacctctgtgatttgttgagtacaactgtacacctggtctttgcccagtgtggtggttgtctcatcatcaacgtcaattctgtaagtatttatgtgtgcaatatttatctgttgatctccttttcttatatcgccttgtcttgaaggcgttcctatcgtttctttacgctattctgataagcttctgagaaacctaaaggaatttcggcctggggacacccagagcagataaggctttgtgaaatgctgagagccaaatgaccatgtcaaacctggtcatgtaagagtgctcaatggatgcgtattaaccaagccgtgtaatcggaaattaactttttcaacttcacagctagggactaggatttgtcaacttcagcatggtttgttataagatttaagctacctttgtggaaaatagtttttccataaaaacagttgggggctaggaagagtaccaaactccattcgctgagggcaaccctagcgagcatactcttttattgtcacacgcagatgcaatttatttttaattttccatacatattataacatgttaccctttgagggttcgctcgggggctatttctatttaatattctattctgagtattgatttcagaaaagttccattcaacgttgtcgaggactccatgtctatacggtcttagaccgggatcgactaagcaagtacaacaaatgttgacaagagaagtcgcggatgacaacatgagttcatttaagttgatggctttgtcacaaactctacaccctctcaattacccgagaacggttgttggatttcgacaaggaatatggaatgaagcgatggtatacccaccgagatggaatttcttgacttccatccaaattcccgattacagcaagacgggagacttagtcgcatgctccgtaccttctcggtcgatattgggacctagacaaacccaatatagtgcctgtggaggctgataaggggaatctagcgctatctctgatctcaccaagaacggtcaagtgagcacgacaaccgctattccaaagtcttcggtcgagaacataaactcgttcatttgcattgaagtcgggggcaactgttagggttttggataccacatacctagggagaggaggaggctgggaatggagttgtgtaacatccggcctctcctaggcaaccgagaagaatttcctggtcggtcacctatcccaaattgctccaggacaaacacgcttaaccctggagttctttggagattggcttccggaaaagaagttgcaacttgtagatatgagtattctattaatcctattaagccctaggtcaggatgtcacaatcctcacctcttaagacaccgatgtcctcattggtcaaccccaggccaggaacatcccctcatagccacatccgtgcatccatgtgtgaccactctgggtcccctcatagccctaggccgggatgtcacaagttggccgggagaggagaggagtgggggagatgagtgggagtgagagagagaggagcggagaattaataaaaaatgttgaaagagtgagaacaggaggatttttgtacgttgggcacttacacccgcacgcaaaaatatgcttattaccgcatgcagatctgttccgggggtcgcctgcaaaaatataaatttgtaggcggtcctctgaaggatcatgttaacggaaaattttggtaagtttattaatagatttagtcaaggaaagagatcaatccaccgaaggtagtttatctagaaaatatcaagttcaataaggaatcatgaagaccacgacttgttagtttaattctatctattaattaggcaggatttactaattttccttttacctttagcaagtatctgtctactgtccgatcaagacctgaatcttccttttttatctttaggaaacatgtaccatgttcgataaggacaagtaacatcccaagggtataaatatatacactcggggtgtttgtaatctatctctcgattaatacaactactctcggcgcatcgccaccttgttttttgagaattttatgaccggcggaacttggcactttgacgcggggctacatcggcttcgatctctggcgaatgggtaaaccataagttctgacggccctggcaatttaacagctacattgatgttgttcaaggctgctttgctttgatctcttgtatattgctatagttcgattggtatattttgcctacctgatcaattctctctttaatttcattgtgtttagagacgcaacggtttagttgggactgcctcggttaggtctgatcttctgtcttagccgatatatctctacaatcacaatgttgttttaaatatatttattgtatccatcacattagacagaattatcggatcattgagtattagattattttatacaatctcgtgctgcatcggttagattcgacctactatattattattattgataaatcaagtcttgttaagtcgatatataggttcatgctaatgtttcatcggagggttatacgaggtgctaaattcctctttgatggttttactgttttgttaaatttaatgcttgaccactctgaacggtgtcatatcagcttgcttaaatccattaggtaattatcaaccttatgctgcatcgattgagttcgacctatagggttgtggttgtaaattagatttattcaagtcagtaggcatcaatcattgtttcatgcatcgaggttttagccgatgatttatcttaatgttgcatcgacttataaggattatatacaagttggttttagttgattacaacaaaggtttcatttattacttgataatttggatttaatgacattggattcccagacgatatatactttaaccatcagatcaacatttattttatcataccgctattggatgattggtttctattagattatattgttgtattattacaagttctcactgcttgtccgattgcctttatatcattatttatccaagtgtcaaaatctatatcggacatttaaaaccctatcgacatcagttaatatccctaaatcggcttgttggctgattgactctatcatcgtcaatttatctatcttatcagttgcaggatcaaactagctagctaggacaccaacatctcatcaaaatttaggaattgcactggaactaagcagatctcctaggccattgtgtttgccgacatatttcgcgtcaacaaagatttagcaccataagccgcacatggatttttcgtcaacataaccgtatgcgaaaataggaatcgattttagcaaatgcagacacttattttccgttagcaacctactgtggtgctcgttcaggaaaatcatttttcactagtgtacaagactttttgactttttttttctagtctatttcttaagtgcggttaaatttataaaaattatgacagtgaaaataattaggtgttataagagtttcttcatttatgtataaacttagttaaattttgaaaagtttgagaaagaaaaaatcaaatggtcttatttttaatatgagacggagagaatagttaataatatactactatcttcatattttaatgtatgacgccgttgacttttttccaacgtttgaccattagtcttatttaaaaaatttaagcaattatcatttattttattgtgacttgattcgtcatcaaatgttctttaagcatgacataaatatttttatatttgcacaaaaattttgaataaaacgtcgaaaaatcaacagagtcatacttgttacttgataggctacgcaaagttggtaggcatatggcacagtggcctagctagattgtaggcctgtaggtcttgaccgcatatacggcctgcacaacttcacagactaggccagtaatggcggcgagcagcgcgatcgccaccagcgggttgctcaaatgccgccgccgcagcagcgccatccagttgaccggccggctgctgtaccaccgctccatcctctcccacgtcggctgcaggtagttccggcgcgcgtcgtcgacgtcgagcgccacgcccctgcacaggccggcgaacccgtcggcgacgtcctcgtcggtggccatgaagtgcacgaccacgcctttcctcgccaggagcgcgacgtcgctcgccgtgccggctagctgcgacacgaagaggcagtaggccgtgacgtggctgcccaggtgtgggttgttctgctccagcgccatcaggttgcgcaggacccgccacgtgttgttgtccaccgtcagcgtcgggacgtgcagcgtcgtcagccgccggagctccacgtcgaggacgcaccgcgcgtcgccggcggcggcgccgagggcccgtttcttgaacctcacgccggcggcgtggtactgcgtcgccccgcgccaccggtaaacggtggcgcgcgcgcgcctgttggggacagcggcagcgtcgtcggtgtcgtcggccggcgacatcgccatgggtgtgaagtgcatgtggagtaagtggacgaggtgacaggggcgtgtgctggtgatgtccacctccacattcgagtagccctggtcctggagcagcgaccggagatggcgcaagaatccatccacaacaacggtggaggaggacgacgggccgccgccggcgatggctgtagctcccggaggctgaggaggcggaggagaagtacacgtttgcgtgcgttgatcttgatcctggccggaatttccgacacgcaccagctcgtagaccttctcgaggatgaagaagggtatctggttctcgagcaggtagaacacgtcgcgcacggcgaagatgtagtccaccgcgctcccgccgcggctacccaccgccgcagccgcctcgccgccgacgttgaagatgtcgaggacgaaccacgcgtcgagcaacagcatctgcacgaacatctgattctccctccatgtcttggcgccgtcttcgtagtagctcctcgcttcgtcctcaacgccggcgattgcctccaggcaccgcctcagcgtggacgcccgctgctcgccgtcgtcggggaggacacggcggagtgccgtccacttcgccagctggtccgtgctgtccagcggtttgtggtggtaggcgccgacgagcaccacctgcggggtgtactgcgagtcgtcgacgcggcggacctgcggcttcaccttggaaatgaggcactccggcgagcggcgccatcgccggccgccgtccaaatccacattgcatagctttgtctcgagatcggcggcgagacgttggatgtctatactgcagctccctgaaaattttcttggttaattaattgcatgtatcatgcatagggtgaaacattcagaatttgttattcaaatgacaactgatatattagtgtggcagcacatgaaatcattcggccgtttcaccaattcaagattgttattttttttatgaaagtaagttaaatacgaagaaaaacctgcatatatagatgcagtaagtaaaactcataaaattgcataccacatgtacgcagaatttgttttggccatctagcacagaaattcattaatttgaatgtgatggaggtgagaaaatttaaggtaatccataaataaacgagtgctagagacagtaatatatatgtgccaaactaaacgaaaaaggacaaatcaatatagaatatttgtgcatacctgttggctcccccatacgtaccgttaatcagtcatgtttccttcgagtagcatatgtgtttcattgtctggaattaatgcagcaaacttaacacattacacgtatatttatatctatggtttcagaaccgtgcattgcatatctccagaccctttctcggcaacagtttgtttccactagatgagcacccatctgcagtgtgcacctttcaaaacatggaagcaaaggtaaagtgcaagcagataactttaaagcgaaatatataattggagagctttatatggctttgagtaggggtcgtacgtactgccttatatatcttttgcaagaaaatcctttagtttgtaccttggctgaatttttcgtccaacagatctacagcggtatagattgactaacacaccaaaatatatggagctaaccctaattgtgcttacctccaagcatggatttcaatttcgatttcgacgaaaatttcagccatttcggcaaaaccgaaatttccaaaatactcagcaagatatatacaaccatggttaaattataagatagtaagatacagtatgcattttttgacaaatcttaagcatatataaaatatatacttcataatgcaaacaaacaaccgattcaactcttagtataacatattaagtataagcaaataaaaaaaataatttggacgtttatcttcggcatgatgttctttttatagactttgcgtgatattatgttctgtcatgcaccatgggccggaatggcactatactatatatttactttgtttaaatcttgtcttagtagtgcatatcctttaggcttctctttttagcatagaacctttatgtccacttctatctaaccgatttcagaaaagaaaaggaagcacgtcgatccttgttgtaagaaaattaagttgtacgatgaaccaggaatagaggctggaaaaaggaacaatatataccaagtaggtagctggttaatttatacttcctccttttagggtctggttggatcaggtacaaaattttagtccctgtcacgtcgaatgtttgacactaattagaagtatcaaacgtagactaatgtgataaaacccattctaaagccctgaactaattcgcaagacaaatctattaattctaattaatccataattagattatatgatgttacaataaacatgtgctaattatgtattaattaggcttaaaaaatttgtctcgcaaattaactctcatttatgtaattagttttattattagtctacgtttaatacttatagttagtgtccaaacatccgatgtgacagtaactaaaatttagtcccgagatccaaacaccaccttattcatatatgacgcttcatataagtagaaagatgcaccatataattaagtagaaagatagactattatacaccattattaaaaatatgagaacgtgtaataatttggttatcacttactacggaactttttttttttgcaggcagggtgccctgcttacaactataaagacgcatttccacaggctccgacctaatacaacaaaataaatctaaattcaaaacgttatgtgttggtatatatgaataacatgaagaaataagctagattaaaaaaatggcctaaatctccctcctctctccaaaaatatatgtagaaattgacctacatgttaaactacccctatataggagtaaagacctcaagtcaaggtgaaacaccccccccccaccccgccccgcccctctattttcctttttatctgcgccgaaaggtcggtctgaaatggctagctcgaggaaggatatacagggcatgtacaatgatgtctaataacgggctctgtttgtttcgttgtcatgcaagtaaatttggtgaagtggaagaaagagaatgaaggaaggagaaacatcgttactatgtatgacaacggctcagagtcgactcttagtatttattaacggaaagtttgttgtacgagggtggagaaaaaaggaaagaagtataataaaaaatatttatgcattaatggtttagaaattttattgtctctactattttaggaggatagtttccagtaacattaattaatatagagagtttatattagactctatctttgtacatgctcttatatataggtggagatttctatagataaaaagctgcctttgagaatatttttctaggtggttgacttaaagctccaactataaaaatatatacataatttccacatacggctggtattactgttccccaggaaaaatgtgtgcatttccgcagatgcacatgagtaagtccaggtgcttgcggaaatgggcctacacagcggcccttggtggccaacgacaaagtctttgttagagtttgtcagatttgatttccacttaacgattcataaacttttttagaaacataatataatcatatagacgctcacaacacgtgcacactgaactctcaaaacacacacgtaaacccaacctctatgattacctccaaaaaactggaccggtatatattgagatgacgaagtcaccactgataccatgctattgacggatacattgcttagcactaaaggaataactagctataaataggagcacacgacttgaatccatgtgggttgctggtttcaccacaaaaaatcctaccagttgagttatgtttactttgccaacgattcccaaatttgttaatcagattgtgataaaatatccaaattcgacttcagatatcgttgaatgagtattcaaatgtcaaatcagatgttcgaagttcccctcaaaccttatcccagaatgctgtgaaaacatgcatgcatatacgtacacttctgttctttctgtgtctcactctcacgttttgggccagcccgcaccaaccctgcaagagccacaggccactgcctgctcgattctcccctcattttcctgggccggcctgggtgctgcctccgctcgaagtaggcctctcgggctggccaccctcaaccatgccgtgcgcgtacggttacaagaaaagagaagagtctccatgtggactccatcaaatatgattcgaatctaagggccagtttggggagcttcagctgctgcagcttctctcaaaaccagaagctctcacaaacagtatagcttttaatccagattctcagaagctatagttctagaatccagaaaaagaactagaagccagaagctggaaaacctagcttttctagattctcataagctggctacaaccagctgcctctcagaatcttaagttcccccaaacaggccctaatataattttcatctctcaaaaccggctcattttatctctctaagtggtttggatggtgatacttgtcgttctacgtgatgcctatttgctacgttgactttattttcatcttacattgggagcacgtggcatctacgtagtattacagtcgatagaaaggtaagagaaattgaaaataagtgagccccacatgcaaatctctcggcggaaaaaataaggtacgacacatgtgtcatgtcctttctctcatcccctcttaactccctctctccccttcttcaggcgataggctgacagccacatggagtccgagctttctaaggtttaggcccatgtggagtcaatgtcggtgctctagcaacctggttgtatgtagccacatggacgggctgcatagatggggcaattgcaagcccacacacagatgagcttgcacgtttgcggcaactaactaagatattgaacaacttcagaaaacatttgggtttttgtaccattcgcatagtataataggtttagttatttgttttgatcatagatctaactactttttcagaattgctaaaaaacttccgtaagttttttttccctaaaacatttagatttgtagtcattagattgcctcaagatctgtgcatgaagggaaaaattgttacaaagaaaatttcacacatatcacgtgtaagatcccgatgctaaccaaccaaaccatagttaaatataagttttatataagttatatcatagttacagtgtagttatattgtagttacagtatagtaacattgtagttacaatgtaattatatttcaattatagtatacttatatatgaaagtttttcactcaaaaattgcggcagttttttagatactatcatatttgtatgcaatatgaagattacacgagtgatcaaaacggaacattcaggtacatatatgtccatacatattcatatcatttatttgaaatttattatttctaaatatcacaaatatatgtccacatcatgatcttatattcagtaagaatttatttcttctaaaaaaaatccaacgacatttttttacacaagctttcaccgtatattgatccatttaccccagcaaagtcagcaacaggtaggttaggaaaggaggttgaataagaaatttgaggttggaaccaactgcaattaacaatctaacacatctactactactattaccacaataaaacatgtttcactgtcagttcataggttcactgtgaaccggcagtgttagaacaacactgccggttccgatcggtgagcagtgaatggtcctatcgacttcttgggcagatcacacggcagcctcacaacgtcgccggctcaacaggagcggagaaatttgattgaaattggaagtttgattgaaattgaaatgatgtgttggaaaagttggaagtttgtggataggaaaattttaatatgatagaaaaattgaaagtttgaagaaaaagtttggaagtaaactcggcctaagataatttaggcgtaagaaagatgaagaagaagattgctgtggccaatagcccagctggccaacagacagtagttaattgtagcatgcatggatatatatatatggattgcgactttaccttcggtactactattaaagttagacaatctgtatcaagtcgatcatacatatagatagatatgcatcacgcggactagctaattaatatctacgtcacatcgataataatcatatcgtttcgatttttcctatatctacctgattctggttttggatgcatgtaagcacaggagtcaatgatcgcgagtataacgacgacgtacgacgacgacctgtagtgattttggctctaagcactggactaataagctacaagccgaagacttaacaacggagagatactcacaaaatgacgcaccttgctatcgacgggtatgtcgtctaccactaaaagcacaacgccgttaaatcttagaaaattcgctcccacggggagtcgaacccaggacctcaggtgctactgagactcttgtaattactaggctacaggccctttcgcaacaacggagtgacttatgacgtacttcctcaggtcgttgcaatattcaggatgttttaataacttttggaatatatttaaatagtttgaagacactaaacaacgatgtatatatagagtatgagtgctaaagggtattgttcagtaaacatcattactggtttttgacgtgaaacaacaggagagtcttctactctgctatatatatttaatatataaatgtataactaatgttcagtaaacatcgtaacatcattactgatcgagcatctttatcacaaagaatcatcagtgatcgagcatcttcatcacaaaacaaaacactgaatcaatcacaaatccaacaacaacatctaaaatcttcatcaccaggcaatcacaaattgttcatcaaacaacgcacaaacttaactacaaatcaaaaaaataaaatgaaacacataaccagacccgcctcaccggggaggggatatcgagcggctgtagttgatctcattgtccttgtgtaaccatggtcatagtcagtcatgccatgcctatcaacctgtggccgtagttgatctccctcaagtagcatacagcatcaccatcatcgcagggctccgactcccttcgtttatgttatagatttggcataccctgtatgcccgtattcattatcatcaggagtaccgcatacctattcttagaaaaaagtatctccaaatatggacaaatgatatataggaggtaaatgttatccacgtaagaaaggactttgtagtctgacttatattagttatgataaggctttgtctttctatatcctattgaggatctcaaagttctacttaggtaagggattatatttacaaatatatggtctagtaggagtggagatcattaaatcataagccttacaccaccatcaatttcacaccaggaggaaacccttttgcttgtcaccggctacaacttgccattttgctcttcgagattagtttagttgctatcttgtttgttctccctttgtactagggatgctacacgcacatcggggccctaaacctttataaaaatccttgtccactactcaatttatttcatactcatgtataccttggtatcaatcgtatgctgtatctctaaatatcatggttgggtcatataacccgtcgaattcatccacctaaaagatctagtggtcggatgggggtttgacagtggggtggagaggacaagtaaacagtggcagaggctctcctctcccttcagttctgagcgcgccaaccaccattgccggacggcaaacgaggcatactggcgagtggcgactacagagatggtggcaaggaggagcacgtaggtggtctgggaagagggaggcagcaataaaaatagttaggaagagtgagacgacgaagaggagaagtagcgatactggcggcagtggcagtggagagagaggcagggacaacgatagggatagtggcagggcgtgatgaggagatgcgaggcttaaaaggtattttcctttgttggctggacttgtaatctcagcaattttcttgttggtgccggttcaattaaaaaacatacattgatttcctatacataagtgccatttttttattgaactgacattcattaagaatgcgtgcaatctaagggggtttggaaccactataaatgttagtttttggataaccgatactaatgaggcggtctggatgtggtgttctatggtagtgatcgatttttataatatatccacttaattattgtggtatacttcttccgtctctaaaagacttctttttcatacagaagcatttgtcccacaaaaccttattgttaggcgtgcacgtggttccactaccctctttattatccttgttttctctcccttagttatagatcagtccaccatcgcgcacgttcaaccttcagctgcaaacgccgttaattagagcttgtgtgtgccaaaagtctagcctagcagaatcctgcaatggtaatgaagggtgaatttctttttacacccataatactaatttggtagtttggctaaaaataaggtattttagacatggagcatataagagaattgattagggatcagaatgatacaaatatatatactgcctctatttctaaatataagcatttttagattgttttgcaatatcagtaaattgcacatatctccagaaaaagtgcatcgtgtttcgctttacaccagatttagtatatactttcactttccacaaagtttttcttttgcggggacattttgcacaaagttgtattaaaataagtttcatttaaaatcaggatgaaatctataaaaatatcatgaaatttctttgaatatgaaaaagaaaacgttgtgaatcataatctaaattcaagttgttccataagttttactcatattttacaatattgttatccaattatatgacccaacctagctagtggaaagtgaaacttattttgatttagccaggtgtaaaatgaaactatttgttaaacctggtgcaaagtgaaacaatgtatactctacatagtgtgaagtacaatttactcaaaattaatattatgaagaaaagattccctttcactcatctcattggtcaaattttgaattatttcaatttcccacaaacacctaattgactgaaaatatttagatttccagtgtgtattaatggaaccagggttcgacaaatgcttatatcatgtactgaatcctacagatgcatgtatatatttgaaaacttgtagaattgttaatcgttacttgtgaatatcttggcaagtgtgagaacaaagtacgtacttagcttgattggtcttcttgattgattgatcagttcaacgtggttttgccgatgatttttaaaattatacaaataagatattcttttcattaacatgtgcccagttataaataagagaagtaaaaagtatgtcaattaaaaacatatgattacatgggatgataaaatcatgaagatcaccacttgaaactgggttatatcgttttttagtgtattaaaacggtatttagtttttgagggggggggggggtaaatatttcatttcaaagtttaccactgatatatcttcactcgttcggtgatgaagatatggggcactggactttgcaatatacgcattaaaattagtttatgcaaacgacgaaaatgtgttgcatttgtttaacagtacgctgaggtaattaaacatactaatttgttcatgaatttggaacaatatcaaaaaggacaatggcaaatgtgtgatcaaacccatgctaaacggttggcatatacgaatattaatttagtaacatgtttttttaggaacataattaagctcaattggcattaagatagagtgtaacattagcattttccaggtatttgtagctcatcttttttctgtctgttatgggcatttagcagtatttattatatgatgaaaccatgacttccgagttgaagttcgatcgtacaacacaaggatttgagcaacagtacagagaaaagtagcgaaaaattatgaattctgtatcaagattataattgaagtgaatccctgtattgtcgtctggtgtgtgctgattttggagatgaacactagctagctagcacgtagtttgttgtactacaagggaagaaatattgtaattaaccttaaactgaattttattaacaaatatcatattaatttattggtacctcatcgtgctttcttggaatatttaggtgtagaccattgattgcgtaaaactcagggggattagtcatcattatttccacaaagaggacgaattcatatacaagaaaaaaactaatctttttcgaacagatatatactagtggttgctgcatgacaaattagaacgacttgtttcgaactaggtcagcatctctcaatcaattagactgttcttgtgattttgatcgggcttaatttgttttataaaattgtgaacttcatcacataaagcttaggtagaactggaattgcataatcgatctcgctagataggcttgctaagtgctaactgctcgatcgatcgatctctagctacaaactacaggaagctataggtcaactatggctgaaacccaaaacgaaggcatgggaaatttgccccagcagccggccggtgagatctacacgatcttcacggtcgatcccaatgacaggaaatactacgttgccgccgtcgacagcagcgacgaagtcatcgttaaggagaatacagaaggctcccgcgtcttcgatgatctccaggtaaggttttaaatctctagctatagctaccgctatctcgaggcaatgttttaaattttaggtaagaccgtgtgttaaatgtcttagccgactatttaaattttaaaacactaactccagccatgctcgatatatataattaacacacacgcatcatcatcatatcattcatcagcagcagcagtataaactttttaataacttctagttaattgtaatacatgtttgttacatatatatatatatatatatatatatatatatatatattgccttgtggatgcagctgtggtacatggtgacggccgacgagccgcagcagcaacacaagcagcagacgtccgccgccgccgccaccgccgccaccgcatggtcagcagcagcagcagcagaagccgttcatcctaagaaacaagaaacggaactgcgccctcgtagtcgccagtaaacctgcagcagaagcagcaggaggagacaagcaggggacgactaagcctgagcagatcgtccccggcgccggcagcagcagcagccggacgcatcagccgcagactggagaacggcggcggtcgacgccggagacaggcacagtaaatctgcaggcaagcggccagctcgccgcgaagaagggccactgcaggtagtgctcgggaagcacggtgcagaaggagaacgctggacaacggatgggacgccggccacggccgacgccgacgatgaccggcgactgatcagcaggagatgctacatccagagggcgagcaacgccaatctcgtcttcaaagccgttaacaccggcggcagagacggctccataatcgagctgacagataagcccatggtgatcatggggagtgatcaagatcagttgttctgctgctggacgattgtcccggttgccggggaccacatcatcgcaggtacgagcccctgctgatttcttcactgatccaattaattataagggttatttagatacgtgcaattaaaaggttgcaggttaatttggaaaaatatcattaaaaggaaataattgatgtctatgcaagcccctaaagcagaaatttcatatccccgataagcaatatctcccccaaaatatttggaattttctataaatttggtttaatatattcaaattttagtaaaaaaggttaaaattttaaatatttcgtgcaaaaaggacaaaaaaaattctgaaattcacgaaatttcggtggtttccgaaaatgtgaactctgtcggccctaaagtaaatctcatccattaacatataagaaatcttcctagctagcgctgttaatatgcttcagtatgtgcagatggaggtttgtcgttgagatccttaagaatggatcatccaagacttgtggcacaatcaggcctgctttccaatcaacatgacacaagatgtattacgccaggtaagaaacggtgttgacggcgattaatttcaaactctagctagtaactacctaattcatatactagtttatactatcgtattaattcatgccaattggtgcgaagcattcgtttttatttagttttcaatcaacggtatatatgattgagttctccctccgtccaaaattgaattatgcttctgcttttgtctacaaattaattaacgtacagactttagcgtactactgccccgtccctaaatatttgacaccgttgatttttttaaaacatatttgaccgttcgtcttattcaaaaacttttatgaatattattcaaaaaatcgagtagtggtaatatatttaacaatgaatcaaatgatacgaaaataattaataattacttaaatttttttaataagacaaatgttcaaatatattttaaaaagtaaacggatggagggagtaattcccaaaccgtctatctaaccactacacttacttcgctcagtagtcgtagttacaacgtcagtcctgatatttgcagtcaacagtaactccactcaacatcaaaataatttcacaatagccaagaagcccttataaccatggacggagggagagcacgattaaaagcatatatatatatatatatattctttcaattgaatatgcatgaaatgagtcaatatatcgtatgtcagaaaacaactaattacgtgatgcatgatggcctaggtagcttgcttgacttgctcattttttctttgttgtttttctcctcatgcagacaagagcgcgtcactcagcactcagcctcgcctcgaagctacagggtactacgtacaaatgagtttgcatttgcgatgttttagtacttatatgaacacaattgatcgagtgcatgcataaaattaatttatccttatatagtgtgttgtagccgtcttatatgtcgtgcagtggttaacctctgaatttgtgcttaattggacatatgcagtgaaacactgaaagatggtaataagcaaggtgataataagaaaggaaagaagaagtgagtcgtcgacgacgacctctgcatatatacagacaaactccaatagtggaatggctggcaaacatcggtatctacgcttacgtataatagttgggtcaaggatcaaccgatcgagacctaacaacaaatgaatatgtactgttgcttaattgcagttataattaagtattgtaataatttgtcgtcgagctgtatagtatgtaagaacaaattagataatgtattgaattctccaagagaaatatagggatatatatagggcttcttgccctagttaattaattaataacgtcat

SEQ ID NO: 10624 - DNA, 26668 bp, Oryza sativa
  unsure (1)..(26668): unsure at all n locations
atctaaaagaagtcattagatgcaggtctaattcggcaacataaggattttcagactaaacatgaaaaggtttatatataaatagttgagtccgtttatacaacatagggttcaaaaaggtattcgaacattcaaaataggcaacgaatttaacttgggccgaatttaggcctccttcagtcctttggagtggatgaaattataggaaattactccctccgtctctaaatatttgacatcgttgattttttagcacatgtttgaccgttcgtcttattcaaaaacttttgtgaaatatataaaactatatgtatacatataagtacatttaacaatggatcaagtgatagaaaaaaattaataattacttaaatttttttaataacacgaacagtcaaacatatttttaaaaattcaacggcgtcaaatattagaaacggtgggagtaattaataattctaatttatgtgcaaatcctcgactcagtttaattactgattattgtgtgcctaaattattggcatatcaaccacgatcaaactttacattttaaacttaattttcatagttgattttagggatttttttcccattatactgtattttgaaacttaattattattttttagaaaaggctatatgtactaactttttcttactaaattcttactaacactgatgtgtcatgctatgagtgcatctagattttttgtaacttccatctacttaaattaaacggttgagatgattgttagtaaaagtttagtaagaaaaatttagtacatgtagcattgctcttatttttttgctttatttttagatcaaccgaccggccgtacttttcatgattgatcctatttattttttggtttttatctgtgttaaccgttactagcccaccgacaaagtgcacaaatacagttgtagtggtttagtccagttaatcttgcagtcaataatttaatcaagcagccttacatgtctgcccatcttgcagccttccacatgtacttacttcctatagaggttattttcttctttacagaaaccaaggcagattaccacgcaggtcatgcttgcttactgcatgaaaaaatagcatgaagacgactcgaatatattatttccaagtggagaaagaattctgcagaatccttcttgtgaactcaaggttgtttgaaatttcaagtagatggacacacatcaaaataatgataggaaaacagtatactgttagtatgtatttacactctcctagctttacaagagtagtggttacccttgccttccaaagaggcaagaaaacaaagggaaaatccataggaaaatgatcaaatgctgttacatgtcaagcttgattctcacccaccagaatggcagggtgaaaaaagatgaaaaatttgcaaacagaagagaaatgagccccctgatctgatcaaatgatcagtcactccagcagagaagcatgacgacgcagcgtcggatgatgtagagcctggccttctgctccctcaggacattctgcagcttccccctcttcttcttcaccttctccatggctgccaatgcagtggaacactgaaaaatgcaatgcgaatcaaggttcagagcgctctctctctctctctctctctctctctctctctctctctcgcttgccttcaggcgaatgccgatatgcgggtagagaatgagactgcagtgatgcaatctttgcttatatagaggagccaaaggatatctctagagcttgcaccataaccacccaccacctcacatgcaatttcagtacttattttctttttttgccttggaggagacacttccaagtctaaatgcatgcccctgatattctattgcttatgataatggttaaggagggtgagcacttacttaacaatgtgatcatagatggacccttgatgggtgctgaggcacagtacccaggggctgctccatgattgaggaccatgcgccgcgccgcggacaggatcaagtggccatacatgcctgcaagcaagaaaggcaaccatggttccattgtttagtgcccccaagggaggctgttcatggtcctcaaacagtcaagcctaccataatctctgcaattttggtatctcaatgcagaagcttagcccttaaaactactaaaagggcactggagacactgtagcaagtctgaaaatatgaaaaaaacccagtgaagggactggataagagatttcttttctccttacctgcagattgctcatgtgcattgctcatactgactacaacaactctaatcagatccatgcttgcaagttctttcagaatatactagagttttcctcgcactagaaagggacacagcacagcacagacatacctgggttggaaagaaatgagaggttgtcaagcaaaatcaattcagagattcatcagtcaacatttacaagaagagaaattcttgttgatagacctatcaatctagtaccagcaaaaggtaaataatacttattcatggatatgaaagatcctaatgtgttcattttttctttttgcaaggataaatactactgttagtgtccgtgctcgccatcggtatggtctattcttgacttaagtatacttccaagattcattccatgaaaaacaaaccaggttctttccatgacaaacaaacaatgtttggattgacattagctggcactgatgaacagatcaaggtggggggctaaactccaatcatgagataattccaaatggacaacccttgaactgactgaagtgacacaacccaggcccctacactagccctgcaactacttggataggcaatcacaaaagacagcaaactaacaacttgaacagtcaattaactacaagccagggcactaggcaacgaatcaaagcactaaactaccagatgaccaatggtaatcgtgatccagaacacaatttgtagatctttaacattcagatgccatgcttcatttcaaaccatccttataggtcataaccagggttcaactatcagaggtggtataaaatttcaggggtcactgaaattccaggggcccaaaataccttaagtctttgttgtcagtatacatgtaaacgaaacaaacatctcagagaataaattttgataattttcaagcagaagttggaaaatttgaatgcctaaaactttttgacctttatgaagttctatacggagggactgaaaagtcaaagtcataggaatttttcaaattccattctgaaatttcaaaccttggtccgaactgctacaggtaaataatgtaaattacatttttgtacacggcacacctataaggtagctagtgtgctccttttcctcagacaacatgggtactctgcatgtgctcaataactcttaactatttgtgttaaatttctacctagtaatgaggaagcagttaacagaggcaactaaaaatgatagtgaggttatgatcaactcattggtcgagaccaaaatgttggttaacatgagacagcgcctgtgtgctacacgaccagcattgagacatctaatgtcacatgcttgactagcattcatacagaagattcaatgcttggtcagacaatgttgcatgtgctaattattatcaatcatatatattcataacacattaaatcaaggtcaaaactaaaatccagcagccttaatccaacttggcctcaaaaaagaaaaacgccaacttaatccaactatatgaaagatacttcagaaagtttaaacttagcaacagaaaggtaattactaatcaactcatgatagaaaataacaaagagacacacaaatgaaaacatgggagctctctacaagtacaagtggcaagcagcagacaggccctatataacaaagtgcccagtgttttgactgggaattagggagacatggaaattcagtaaagaacagagcatcaaacggctacattgtccacaagacaagaacactccaaccaaagcgtgcgcgcacacacaaaagctatttcctggtcatctagaataagtacactacaaagtacttttcagtcaaaaaagatatgctgattgcacggatgatcagtgcactcgtcccatctttcctagcagcttccgaacgtatcaagaggacatgaggagatctctaagatgcttgaacactggtttttaagaacttttgcaactctttaaccacacaatctaccgacaagaggatatactacagtactaaaacacattgttaattctgacaagtccaagaagatctgggggatgcaacaaaaccataattaattcctccaacgaaatcagatgggcaaattacagtgcagtgagatataccaagtatctccatggagaagaaaagcaagataagggaatagtttacgataccagcggcgcatgagcagcactgccagtgccagataccaagaaccttcatcggagccatgctgaaccactgaatctgcagatttctacacgtatgcaggtggcagcaggatgagctgtccgttatctgaaatgatcatatccatcaataaaatcaagctttttgtcggcgacaagaacaataagctacattcaggttcagagatttgtctccctagattaaagaaagcaaaggaaaactaaagtattagcacgattgcatgggagcagaggtgcgacatgctttgcctcctctctataaatcattagcctccttccaagttctgtaccacagcagcaagctccaaacgtaatcatcagagagcagagacacctacattcatcaccattgtagcttctgtttcatcaagcaaaactgaagccatgaagactgtgaaccaaggcaagcagagaggaaggatgaccagagctctgaaagagcatagagccaggctctacatcatccgccggtgcatcgtcatgctcctttgctggcatgaatgaactccagtactgcatgttcttccattggatcccatcaaggatccatggagagtctacacacatagctagggaactatatcagttagaagtagaaaccaggaaggaactccatgtgctcatgctaggttgaggttgcattgaagcaagcttggcaagtctagagttcctatcatttgtttcttgagtttttttttcttcttttttttcccttttatccagttcttttgtcctgctgctatccctttggcagtgggatatggtaggtctagctttttgtacatgctatgtattgtagcaagcagtctacctaggaatgattcagcagaagaacagcaaagttgatcgaattctatcgagtgaaactgaacttttttttacatttctacatcaagtgagtctatatctgtcttttcttgacatgatgactaagcaaataacttgattaatggaatctttactgactataatgtcttaagcagaaagaatgaagcctactgaagcctatcatctgttcttaattacccacatgcaacactgcatccaggcagcagggctctagcctctagctaagacctaagttagccaccagatcatatgatattatcacccacagataggacaaaatcactaaataaccagctgcagtgcagtcacagatacagagagaaacagtgctcaccaggaatgcaggggccttgtcttctgggaagatctgagctcctcctgcatttcttaagttatcagaacaaaagaaaacaaacacaggatgcagaaccacagcaaatgcagatgtgaccaaacaaatgcagacaaaagtggagcaagctgacaaacgcacgaacacacgcacgcacgcgcgcacgcactgaggcacgtgcaggacatcttctgagcaatggccaggagggagtccatttagtctgcttttgcacccaggtcaaaagtgaattctggctactaggaatgagagcaccggtgcccacaatcctttgatggactgagaaaaagcattgctgatagtagcaaagatattccagtggcattgttcagtcaagattcagaaattcatattaactctgagtaaacttccactcagaaaaaaaaaactcgaatacacaggaggactgcgtaccattgcattaagaaggagcttccactcagcacaaagtaatagtgttctctttgtagattgctggattccatacctctgctacattggtcacacaaaacaaattgactgtatttctctaagacaagagaatcaggtgcctgagactaacatatgaagcaaagaattaggtaagagctttgtgcctccttactgtatgcacaatatattactttctcttgtgtatggtatacagatatttgtaatatgcatcaagttcaatggtgcataagacttcacacatatagatagagcattaatagtatgacaaaaagaaaaaactaattccatttttttccatcgaaggtgcaaagtacaaagcatctgatacaaatcactgcaaacatttaaaaagtgcagtttcgaaaaaagaagtaaagtgccatcactcaatttcaagtcttgcaacttgcaagtttccacagtggcgatcatcatcaacagcaaacggaaccatcaagttgtagggcaattaagaagtgattttccatatcaatttttctcaagttgtacaagagggggggacatctcaagactgtagagttggatctctcacaagctagagaaaaaggacatctcccaaaatgaaaccttcagactacagagcggtacattgccaaactatacagagcaactacacctcagttctagctaaatcctaccaaaatggcagagccaaaaaaaattccatccagaatggaatggaaaacaaggtccgcaatggacatcgatcaatcgctccagcggagcaacatgatgacgcagcggcggaagatgtagaacctagctctcttctccctgaaagctctgttgagcctccccatctgcccccttcggccttcaatcttcatagtctgatgagaatgctgggtgcagggcaaaggatggaagagatggagatagacaagttgtagaatgtaatggctagtgtgtggtatgagagggaagctggagtgaggggcctttatatagtggcacaggaggggatatgccatatcaaaagaacatcatacccccacatgcaggcagtttgtttatgcactaggaggcacacttctgaccctaaacttatcataatcactattctatatttctatctgtatagagcttaggagctagcaaaaacttaaaatatgcatggccactaacaagagaattactgtggtaaaaccagacaagataaagtggtcaggcaggtgcagattgtttactaaccccaagaatgggactccaaaatgtcctagctccttagcaggaagcttccaggaaggtcaccttgatgcatagaataaaactgatataagtgtatcaccaacagatgttaagacctggttaactctcattgcaaaatgttgcaccatcagccaagctggggtgaaaacttcagatttctatgagacttgtctgatttcactttccatgaactggcatggggctataagtaattaagattatccctgacaaacactaagaacgaagtattgcagctatgacttagaaattattatctacaagatcataaaaataaatcttggacttctaggagacctgtatgctaaaattcccaactccttttacattccatgcactgagatggaggtaactccaacgttatactttcatcagtaatgaatctcaggtaatggtgattcagtcggcaacttaggaacagaatagtgctataacctataaggaacttttgatggcagattgaacatatataccctggaatctggataatttttcagtaggagagcccttgaaaggtgttctctatctactcaggacaatatccttaaaaacaggccgttcagttgcatgcaacttaacaactgcataaatttgaaaagagcatataacttgatagcttctgtcttttgttcttactatgtaaatttttttcccatggaagcattagaatacagatttgaactatcaatgtccccagactctcagactgttctttgcagtacaaaacttgccttctggtaaggtgacaagttcccaaatgttaatatcactaattgcctttatttcttcttttcctgacagaatgttttaacctatgtgtttcataaattccagtgcctaaaatgtatttgcttagattttcataaacttggagtatatagtgattccagctgaaaatggcttgccttagctcatttaccatcggaaatatcttgtatagctcgtgtggttacacaagcatcatcagtgaagtcactacaagacattgttaagtccaaaagagtgcaagaggaaaccataaaaatttcaggattgaacaataatcatgcactggggaatcaaatcagaagaaaatctccatatgcactgaatctgtctctactactgaagtcatacgctaggaaaaaatgctgaggatgacaaggtagattgaacgggcaccagaaagaaacttcctattttgaagggtaatgcagcatgatctcagtctttagtttcaatcagtgaaagggagtggaaccttttgttatcagcaaaattaattcaagtctttgatgttcttttctcttttattgcggagattttttgcatactaatttattaagtttgaatccatgtttctagctgaagtaacataggcccccatgctcgttttctactagaagctaaaaggtgtgccttctactggacaataatgtgatcgagccttcttttagcaaacataacaaagaaagataaagtcctgacattattcaccaccttctagatattcaatattttcaggtatagctatatttggaagtacaccttagttcagaaaattgtaacctttcttaagggaaaaattaaagtcatgcatagactagaaaacgattagcacaagatgcatcattcataaactcaacagaataaaatctattctggactacagtccgaacatatcaagtcctatcaatcggagcaatgcacaaatatagtgaaactttctaatgcaaacatacagcatcttaggggaaaatcttatagctaatgaaagttttagccgtccatataataatgcagtaaatgtttttttcggacaatccacaccagacagcgcgaagattcattgaatagagcaggaaaaaaattacaaggctagaaccctgggaggccatagccaggaaagaagaaaaatatccaccagcgacgcaccgacagcacctacacacaggccaggagaaggcgcacctgaccggctgccgctaggccaacaaaggaactacaaccaagatcgcccaaaacccaaccctaacatccgaacaccgaacaccactctagccacctctttgggattgaggagagagggtgagaaagatggaaccactctcccctctaggccctccaacgtggccagcttgtgtaagctaggacgccaacacaagaggacatgacatctagagtaactgaattagtgattattttggggttgttcagattgatgccatttcaaaccataccattttttgataaagttgccaaatatgtgcatccatttagttttttaccaaactctagtaaatacataagaaatgctgccaaaacttgccaatgttgccaaaatttggtaaggtttattttggctataatctaacaagccctttgtaagttgttgctgtacggatggtgaacgacaaacaatattatttagagataattccttccagtaagaaaaataaataggaaaaatagacgagacaataatttgcacaaatcaagaacataacacacactgttccctgatactattccttaagaatatagtgcccttgttattagtaggaagcccgacaaaatgttaagtggaggtttcaaatgattccctctcaaaatgataattgtacgtttgtagagcacatacctgccattggagctagaggaacagcccatcgacaaaagcaggcaagttgcattactatcaccttagaaagaccattgagtccattcaatcctagttgtgtataatatccctgtactcttgactagcagtactgtcttggtaaaaccaacttttcaatatcttcaatgctacaacagaacatcattgccaggatgcatgcatgagaatcagaaatgagtgagaaccaagacagtccatgtttactatgaaaaagttccgagtatcaatactcaacatccaaagttgttctgaatatgatacattaatcggagaacgatgagacaaagatggtaacttgtgtatcttggagaacctctaaaagagctacagcatggaccatgctacatacaatttgcatagcaaaaacatgttatgttataacatcagatccatttggcaatagaaaatgtggaagcctagatgcaccgagataatttgaaagttgtacctttagaactaagaataatactcgaagggatcagtacatttttaagacaggagaccatatccttcagttttcgaggagttaaattaccgtaaactcacttacatagccttcatgtgaagtacttgcaagctgcactactccaaggataaaagaaaaaaaattaagcgaaacaataaagtcctcttattcctacacagtacacaagaagaagcaccaaatccttaaagctgctcaaaactgtcgaaatatgcataagatcctaccaacccttcatacagattgtaaaggtgagtaaacctccccagagagatctcaaaagtagctcagagaggaaaataaagcagaacaaacatataatttagctatccaagaacagccttgtctggtataaatgaactcttgtggagcaactctgtaggaatcatcaaacaattctgcacactgcaacttgcatgttattataaggcttttttttatggcaggaaagggtttaaacaagtccacctataatccaatccaaattgcctgaactaaaagcagcttttttgtgatatcatgaatgctcacatggtctgatgcacggtatatgcttatggttaacttcagcgaagtataagtttcagagtccatggcaaattctcaactctcagcatgagagagaataagacatataaagaatgtgagctttgtctcctaagttgcattcaacttattcaacttggttataatgcatatctgcatgtgaatgagttcacggagtgtcctataaaaggctcctacctcttcacatgataaccagatctacataaactcaagcagcaaactcttacattgcttcgccttctacttctccaatcaaaataagtcagtaagtcactatcagccttgtgcacatgaaagcagagaggaagaacataagaagtggaagattcattagaactcggaaagagtgtcaaactcggctgtacatcatccgatggtgtctggtcaggctcctctgttggcatgattgacttcaaatcttcaacgcatttgtcatcaacatttcttcaacccacggtctttttccttagcctatataaaatatttcagggaagtcattatgtcaaggagtcaatcgaggtgttacaacttattgaagcaagagctgattgagagatctagctgcaattacataactgggatttttgttggaattatgaaagcaacttcttctccagtttgttagttgagaaaattttgtaattcttatccttttcttgcctggttaacatgacattttgcttttgtattagatcacattggatgtacattctttctgctaattaaaacttagtttcttattaaatcacatcagttgtaaattgtttacaagggaataatgtttcttgtagcaaataatgaaaaggcgggctaaaggttctgaattatccggctgttgtatataattaaagcaattgctttccacttgatcagttaatgaggaaacatcaaacctgcttcagaatgcgtattataagaactattattcactttcatctcctttcatcatcatgcatcagctccacagatcaatgagaatatcagaaagtgacaataacagatcttctattgccattttcagagaaatgctattgtaactgaaatttttttaaaaaatcacttttactaacctttgtttacacaaacatacaacaacagtaacacataataacttctgcagtataagctacatgaagtatatcatataaggtaagcaagtgtgcatattatattacctgacataatgaagccttcaatatcttcatagatggacagggttatgcaacataaaagcataaagcaacaagtttcttatggcacctctagccttgtccaattaagagagagttgctacctatccatcaaggaattcagcatcataacagatctcaaataaacattataatctaaaaggactcatacatgcccataacgggaagaaaatcttttactgaaacagagctttaatagaatccaccttctattgttaaggaactgaaccggtttcattttacttgtactcagatatagattcatgttttcaaatatatgtcaaattactaaattgacattcaccagatgtgttgacttttgcaccctctgtaccgaacagagcttgcataacagaatgcacattctatttaagaatcgaactgcttgcattttacttatactcagatatacatattacttctattcaaatatatgccaaactactatattggcatgaaacagtaatacttaatgaatagacttgtgcactgcttttaccaaacagagcttgaataacagaatgcaccttctattaaggaactgaactacttgcattttacttatactcagatatagatcttgtttgtattcaaatacatgtaaattacttcattggcatggaatagtaatatttaatgaattgacttttgcactgttttgccagacagtcagaatgcaccttctattgttgaggaactgaaccacttgcattttacttctaatcagacatagatcttacttgtagtcacatatatgtaaaattaattcattgacatgaaacgctaatatttaattaattgacttttccattcaacaattggcccttttgacttcatgttctttgcagaccagtgcttcattttacttatacttaagtatacatattacttctattcaaatatatgccaaactactatattggcatgaaacagtaatacttaatgagtagacttgtgcactgcttttaccaaacagagcttgaataacggaatgcaccttctattaaggaactgaactacttgcattttacttatacttagatatagatcttgtttgtattcaaatacatgtcaattacttcattggcatgaaacagtaatatttaatgaattgacttttgcaccgttttgccagacagagtcagaatgcaccttctatcattgaggaactaaaccacttgcattttacttctactcagacatagatcttacttgtattcacatatatgtaaaattacttcattgacatgaaacgctaacgtttaattgattgacttttccattcaacaattggcccttttgacttcatgttctttgcagaccagtgcttctttatgataagatctaaggaccaccaacaaagagtcaaacattacaatttacttgaatgctgcagtcaaggagacaaagggtgtaacaaaccaggtattttggctttgcttagtggttaggtagcaatctattgagcatccaatgatgcctgatattcactttaaaaaatgtctcatctaggaacatgcagtcaacaattacttcaaaagtcaaacttgagaactgttttctggtatgaatgaaactgctgaagaatactgagtgtagcttgaaagataacaccgagtaccataggacctgcaagactgcaacactctcctaaaataagttctttttttttgctggggatcctcaaaaattgtttgacatcagcgctctccacaaatactgaagaactgatatgttaaaactaggacagaagaaacattatgtatatcatatcaagagccaacaaccacatttgattccactgaacaaacaaaaaaatacgatgattaattgcaaatcacggcatgcgcttgtcagatctttcaaggtgtataacatctagtgatttgcagtcttcatcataatccataagctatgcaatttaaaatgtgtaactcacaaaatataggagacattcctaattgagtcctagggagaaggaatttggtaggatgagatcaaacagaggggaggaagaaccagtataacgagatgaagaggaatttggtgctgaaatgtgttttctcattgaacaaatgaagccttatacttccaacagttagccagtcctacatattacagaactcaatactactcacactttgttaggaaccttgtagtcctctagtgtattacaatatggtcccaaaaaaaagtgaaatgatgtatattggccaggaaatcaacaatgtgctatatgtaccatgtaagtaaaggcacaaagaagggacagaaatttgccttattataaatctaatccttataattacacttaacaaatagagaaggaacagacaatgtcagattattctattaggttacttcaagtacggaaccaaatatgttgcaatcattttatcattggtcaatgcagcatctacccaagttaggtttattacaagatatgagtccttgaagagaaagtgactgttcattgaaccatggctgatgtattgaaaaaaattgtatgtggataagaaggataaaatagcacaagatatatggcaataataagctgatttagagtctttttggttcattttggtagggaaccaaacattcttcatctccaatttaccaaactttggtaatgccaaaacctgcccatgttttggcattacaaaatgtagaataagtagaatagatgcctctcacaaagtgtggaggtgaaatctcatatatatatagctgagttacagttagtgctacaaaagaccaagagttacacttaatgctagtgctgagtttacactaaattctataagttacataagcccaaaagtctagaagagaaacagtctaaggattaataaataatcctaatacaaaattatggtaaggtagaaaatcaaaccagcctttaagtacataagatctaacaaggtcagactatattagatggataagtatctatatttcattatgcttatcacatactccctccatcccaaaataagtgtagttttgcactgttcatgtccaacgtttgaccgtttgtcttatttgaaaaatttttatgactaatacttttgattgttattagatgataaaacatgaatagcactttatgcttgactacttttttaaatttttttcataaatttttcaaataaaacaacggtcaaacgttggacacggatacccacggctgcacttattttgggacggaggtagtacatcacaccaccaattaaaatcactgtgactaatatcccatcatataatgcacttatccacatgttattccgcaagcaagtgaagaacagcaattgtcacatgttattccgcaagcaagtgaagaacagcaattgtacaacttgatcataacttacaacagcaatgacctcaatggtccatatcatatctactgctatttctttcaagtgtccacagcttgtataatcatgaaaagaataatagaacaaactaacgccttacattaggagattatccagaccaggaatatcaaatggtagctttataatgccgagggcaatagacaggaggagcagccacagaggaaagatcttcatgcacagcagcaacagggacttttgtgctgaaaagaatagcattaagaaaaaattcagcctactttttgtacaatgactaaaaatggtgtaaaacaaagaacatcacttataagctgtaaacaaatctcatcgaaacgtatttcgtattttatttgtcagtagcacacaagaaattgtgcttcctagttgtatatgatggcctgtattgaagtggctagtatcatgcagacagtacagcagttagatagtaaaagttccactaataactgatacgcaaatagcaacgtagagtcttaatcaaaatggcaacacttacagccagcacatcttttataaggaaaaaaaaaagcgattacaccttccacataccatcgaatggtcacaatgtattgtctagtgactagtgaatagtgataattattgtacccaggcactcagaatatgtaacatcagattaatccaagttacagattaacataaacagtgcagcatattaggccctgtttgattcagcttaggattattataatctggattattaggagtaagctgaaacaaacaagtagattattatgctagattattataatctataagccagattactataatccaataatctcctctagaggagctttttccagattattgagtggctaaagacccactaccctcagatgcctctaataatccagagaaacaaataactcgtagattattttatgtcagcttattataatccagcttagagtaatctgatttaataatctagattacaacaatcttaagctgaaacaaacagggccttaattgtcaagtattgagtagattacccagcttcttttcacagattaagccttttgggtagaattgtttggcacgtatatgttaacaaataaataattcttgcaagctctactaccttggcaggcgcggtcctcggtggtgtcgacgacccactcggcggcctcccggaggcggcgctcggcgtggccctccggctgcccgatcggtgtggacgcgatgagctccatgaacgcggactgcctctccccgcggcgggaggacgccgaagggtcgtcatcgccgaggccgatggcgcgccgcacctccgcgacggacggctgggtgggtggggccgacttgaggggctgggtcggctgcgggccaggcgcgcgacggcggatgcggcggacgggctcccccgcggcggcaccggaggcggaggaggccaagacgacggcggcggcggcggcgaggcgcggggcgcggggcgcggcgacggcgaggtggcggcggcagcagcaggaggcggcggtggccatggcggacttcggggagtgtgtgtgtggagtggaaagtgtgtaaatggataaagtttagagaaagatctttcattttcttcttttttccctactgcgacacctgtcactatcacgtaatatctctccaccccacttcacaaatctcaaagcacatttgacacgtttggttcagtccgactaaagccattcacagtgcaagcagccaagcacccactgtgagttaccacgagatgacagctagaataaagaccctctcttcacagtgcaagcactgcgtgtgggactcagaaatatctgctagtgggacccacaaactcccaagtcccaactcctcaccggctcctcctccctcgtcatgcaatccccaaatccactcatccccgccggctctccccttctccctccgccggcgccggctcccctcctccctccgccggtgtcggcgccggctctcctctcctccggggggggggttccctcctccctccgccggcgccggctcttctctactccgggcgtcgccctcgaagaagcggcagcgttgtccttggggccgagctgcggcggcgccctcgaagacggcagtggcggcgtggatctagagcgcggaggacggtggaggcgcgggacggcggcggcggcatggatctgggctcttcctctctcggccggcgacgaggagacggagccgctcgtggtcgtcgtcctcctcgctttgtctccactttccgccgccgccgatgaggagaggaggacggcggcggcggcgcggatctggagcgtcctcgccgtcctcctcaccgacggcggcggcggcgccctcggcgacggtccttggcgacgtcgcatctcctcgccgtgtggggcccacgcccgactttttgagcgaggttgctcattcctctcctgggatgagaagaacccagtgtagctatgggccctaccaaacttttttcgccacatagactaggtaacgcgccatgtaggactagataacgcccactgtgaccggcctaagagcaggtacaatagcaggcagctataaacatattttaaagagataaaggaagaaagagaagagcagcgggctacagatttatagtcagctgcagtacggactccaagatgtaacatgtgtatgataggtgggaccaggtataatagtatagtaagcaattattgtatgaattggctattatattggctatagatgaattggagctagtagtaggctatactattaaactttctctaagggtgtgtttgcaagagcaagttccgaacactcccctctcgtttttccgctcgcacgctttttaaactgctaaacggtgcgttttttgcaaaaaagtttctatacagaagttgtttaaaaaaatcatattgatccatttttttaaaaaaaattgctaatatttaattaatcacgtactaatgaaccgctccgttttccgtgcatgggagatggtttcccaacacccacctccgaacacaccctctgagcaagtttaatggtatagcccactaatagctctaattcatttatagcctatttaatagccaattcataccatagttgcttactacttcctccgtttcacaatgtaagactttctagtattggctacatttgcctagattcattagcatctatatgaatatgggtagtgctagaaagtcttataatatgaaacggagagagtatactattaatatatggtcccacctgtcatacacacattacgtcttgtagtccatgctgcagctagctacaaatctgtagcccgctgctcttctctctcatcttttatctcactaaaatatatttgcagctggctaatagtctgctattgtacctgctctaagagcaaggttaaggtgttcacaacacgtcggctcagtcatttcccaaggaatgttcaataggaacacgtcatgttaggctcacccacctaaagttctcgctgctaaacttggtcacatgttcctcaatccaacctaggggtagcgccatgcgaaacgaggactgtaggcctgttgtggacgcttgtgacctcaccgtgttgcattatggactatgtatcctctgaaagtcctcggcctacttggcagcctaggcctagcaaatgcttggacacattgctattgcgctagtagcattgctggctgccagcggtagtatacgtctaagtcatgataatatagcagttagattatataacgagttgtggccatagcatatctctatagaagcttaagtgtatttaaatatttgtatggatgcattgatttaatttctttggtcaaatctacgctccatcctttcaaccacctatgttgaagaacaaaatgatgttagtgcacatgggatctaggaggagcgacccaagacccacaagctgcatcaattagtgctaacactggcggcaagacgatgatagtgtcctctttcacatgctactgcctgacgctcctgcaagcgcctcctccactctctctcctcatttctctctcgtccacataagagtacgttgatgtgtatttttaatcgttgttggtatttcttacgattatagataaatccgcaagcgcacggatattgttgtagcatttcactcatgagtattcccaaggatatcgtatttatatttccgcagggaaggcggcggtatgaaaacatacttatgcctccttaatcaatctatagtatcatccactagtaattataattattgtattttaaaacttatgcaagcatgcttcaaaatctatgctaggaagagaatatactatggttacaaagtgctaacttacgacaaaggcaaacttatatactatggttacaaagtgctaacttacgacaaaggcaaacttatctacaaatcatgacaatcagttttgcatgggtgagtatggaaagtatgataaatgtctcctttcgaaaaaaaaaagtatgataatgtcaaacttagcaggtaaaccagacaaattggaattcgcttgtactcatttttaaattggcaaatgggagctatgtggatgttgtctcatcctctatttatcctctattgttgtaacttgtaaacatggagatacaattatatgttcttaagtttgagacttatctgaacctaataaactcatgacttccctgtcatatgaagccttacagtatgaattgtataaaaagaaacccatctttcaaacacttttaaaaaagagagagagaaaatatacatacacaataatggaacatagggaatcaagagaacaagatagacatggattatttatttatttcccacgaatcttatgcacaactccatttgagtcccatcgtttcacctgcaaacaattataagctgcaatgtttattagaaaaaaaatgacggctattttatatatgtgttttagtgacataaaaactaatacttaaaaataaaaaacgatgaaaaaccatcaaaatcaactctaaagttatttttaaaaatttaaatcccggctgcggctgataaggtacactggtgaaagattaaaagaatgctaattttgatagaacatgcatacattaagaatctcgagaatccctccgtctgggcacctggccaaaccaaaataaatcgagcgctctgtgatccaccatgcatgtgcacacctttttctctcgcaagttagagcatgcatataagtactgcatgcaactctcatacccattcttttttcacgaggaatactaaccatttcattatcaaattttaaacattttttaaaccatttatcctatctacgatccatcattatattcgttgtaattaaacctttacaacaagataatacatggaaagattttgatgaaaaaaataaatgttccacatggttttattgaatgtttcttctagtattttatgatgtttcactagttcatttacaaatattgcatatggtattgttagaatgttttggtaagtatttttatgatgtttcagcagtcataacttaatatttcatatatgatattgttgatatttcttaacgacatttactagaaatataatttccagcaatggtgcagaaatacttctggtatattatggttatagtgttcatccgcaagcacatggatataccattgtaacatttcacccgagagtattccaagggtatcatatttgtttaatcccgtgggaagattataatagagagaaccgtactaataatttatatattacttgtaataaccatagtctaagagggattaatataattcatggggtagagtgacactaagcagaagcatttatactcttactcataattatctaagtagaaagaatatagaaagatctattcctatacttctagtatacatattatacatacatcctagttataatattacttagctaataccctctttccgatgctgtaacgccccgattttcgttcgggattaaaataaatcatttaataatgcattctctagaaattaaataaaagttaaaccaatttaatcaagtggaattatggaggaaattaaaatttcctttaaaaatctttggccgggaatattttgcaatattctttgtgccctaaaatactctccggatttttccgcaaattttcggagctcaataaataattttaaagtcacacagatcatttaaccaattaagtaaaaaggaaacaaatttaattctccttccttccccttcctccctttcgggctcggcccaaattcctccccctccttcctctcccgcggcccgcgcgcctcctccctctctcgggccggctcccttcccccttggcccgctcgcaaaagtctgttttgcgtccctccttctctcccttcgccgacaggtgggaccggcggacccacccgtcagctccttctcctacctctcgccggccaaccccaaccgccattgccgtccacgtcgccgcaaaatccggcaccctcccacacccgagctcgcatcccacgacgtgggcacgatccactccacgtcctccaccattttccccgctcgtcccacaaaaaccggcgccggccgagccgccaccaccccacgtcggcgccccacttccccggcggttggccgcccgactccgcctctcccgggctcgatccggccttccctcccctataaaaacattccccgcacctccctctcccttttcccctctctcccgagccctcccgtgcacgaaaaccaccccgccaccgtcgcaccttccgccgccgctcgccaacgaccctccagccggttgccacagccgctcccaccaccgtcgttccgcgcgaccgccaccagcggcttctccgcgtcgtgccgcaccccggcgtccgctccatttcccctccccgcctccgaagcaccgtcaccacgcgcaccaccttctgccaccgccgccgccgactccagccgccgcttggcgccgctcctagccaccccaagtcacgctgtcgccgccgctcgcttcgcagcgccgaggagcacctcggccgccgcttttcacggccgggatcccaccggaacatggttccccttgcgccggtgcgcatncgccggccgttctcacctncgaccagcgattcatgccgctgggagccctctccccctcctaacctctcccccatcctccccaggtccttccggccgccgtccgccggttcccgttcgcggaacgccgccgggccgccgttccgccttcgtcccgaggagcgccgacgccgagctcccccgcctttccccgccccttgtcgccgccctcggtgagcactcctcccctcttccctctttcttcccttggctggccgcctcccgtgcttgcgcgcgccgtgccgccgccgccggtggccgcccagcccgtgtgccgccgtcgctttggtccctgccgccgccgccgccagccttgtgtgcgcgctggccaggccgcgccgctcggccgtccccagtcgtccgatcggccctggccgatctgggccatccacgtggtggacgcgcacccgaggccacgtgtggaccatgtccaccgtgcgccctccccctttgactcgctgacgtgtggggcccacgtgtcggcgccggccgcccctttgctgacgtcagcgaagtccatttcctttgtaaaaataaataataattgcgcaataaatcgagtttaattttagaaattcatttaaatggctcaaaacttctaaaattcatatctaattcattcgaactccgaattgagccattcaacttgcaaaattcatctaaaattgagctctacatgtttgtttactttttatgtactgtttccttagtttttattagagtttttcctcgttttgcgtgccagcgtgtagttcccgtcgtttcggaagatcgcgttcgcaaggataagagttcagaagatccaagtgaagaagcaaggcaagtcacacattccccttgaacatgttgatcccaatttataaatggtttaccgtttacaaataaatatgcatgttttgctaattacatgggatccgggtattacctatctgcttgcttgtgccatgtttacttgatatctgttctttgtcaaccttgggtaataaatcgactagctcatattacttatgtgacctagctagaactatatgcttagccatgcttaattagcactagctcagttgatgggataattacagtattagacctttttagtatcagaatgagctgcgtgctcgagacatctggccatgcttcatggtcgtaattatccaactaaaatgcgactgaatgatgggctgtgggtgcatggttttgctagtcgcacccatggcaattaaggaccggttcgcgggatgccctggaagaacttatcgtacttaccacaagccagcgtgggcaacggctggacttgtagtgtagctttcctctagccgacgcatccaggcaagggtgggcgtgatggagcggggcgggccctgcgacggtttctgtcgcttccggattcacctaggcacgagaggggactgcccgttgcccgctggggacgggggtgaaacctgaggtgtggtgtgcttggctagagggggttatgcgaagggtcctgtcatggcctctttccggtatgtcgtggtggcatgtcggcacacggaaacgtgttgtggggctgtcttgtgggtatagttgtacacctctgatcagagtaaaactattcgaatagccatgcccgcggttatgggcggtcgaccagattcaccgtgattagtcccatcttaataaatcgacccaatacactgtagttcaggtgggttggttgggcctgttcaacgtggtgtagcgttgatcagtggagatttattgttactttaattactcaacagttttactgttttgcttaataaaatattttacaactgcctttatgcaaatagccacaaacccctccttgtatccccttgcacgtctgcatcgttggtgtggcttgctgagtacggtggttgtactcagtcttgctattattccccctttttcagaagtgtagtgcttctgagctgaagatggagttagaggaccaaggctcagaccccagttgagttttgcctgtggagtggagctgaagccccgctaggatcgcctttttccgctgctgtcgttctgtttaggtgtgaggactaagtgcctcttccgtaagtattttacgctttatttacgtttggaactgtatattacttgtcgttttgtgtaccctggctggtcctggacagggatttaatacgcaaaatagtctgggaatttgggttaaatttctgggcgtgacagatgccctcctgtacttcaagaagccacccctgattaccgagttccttacaacaatccatcatgaccatccaactggggctaaatacggaggagtaccctcctcagaaaattaacttaggattatatacacgcgcggaggaatacccgtactgagctgtcaccatcagcggcccgcttcgcttccgcaacatataaccccatataatgatatctagtaatctaaacaccacgcttaaattaccaaatactactataatatcatcgtcatgatagagtcatcgtaaatacccacactattgcatctcccagataagctagcatcataatgaatataacttgggtatgtaataaatctggtattcatatactcggaaagtaatacaataccaaagtaatataaagaagaatattctaaataaagtacaagtcttataaaagaaggaaaagctactagagccatacccaaattcttccgaagactccgaggactgaagattctattctatttctattccactatactctagaaactatattaaacttgatagatgaaatgaatttcttgcttgtggtgtgtcttgaaatggagagagtgagctccttgtatagcctcccaatgacggttgtgacggttggaatggtcggaaataccctccaaccgtcattgggagctaatccataccgtctagccgcaaccctgcatccaacggcgccaggatgggttcggccgaaccaggggccgacccattttcggctagcggcctcgtcttctgttgctcacttcagacttgtgaattttggcccaattggtcatgtcatttttgcattcttgacctattcattgataggtctgattctcgacattgtctgattgaatgatcacttgttttgatgtcgattcttctccacttagtgttcattctctgcaagaggttagtaatcctagtgccagtggaatatttattattttgacataaatatgcattgcaagcataactagttctcttttatttaagtagtgttgacggacgaaactgatcactaacgaccgtcaacaaatataaatgtgttttaacaatatccatataagtatatcgtttatttcgtacgagtctttatatgagttcactggttgggacttgatgtttcgtgcagaggttgatgatattgcagtcattatattttgaatgttgcatttatctggaacatttttttagcgaattgaaacaattttttataagtggtgaaacatcattaattttttttatatgtgagatcttgtttgtaaagatttgaattacaagaaatacaacggtgcaatcatattatagattggattaataatttaagagaaaaaacatttaaagtgtgttaagaaaagcaagatttgtatggagagatgagagatagggaattatggaatattgcatgtagctgatatgaggcaaggaagtagttgacatacatgctgcatgcaacaaatatgtagggtgcaacacacgcagagatgaggcaaggaaatactccctccgtggttgctatattctgagacggatgaagtagttgacatgcatgatgcatgcaacgaatatgtagagagcagcacacgcaggaggtgcaggaggggggcacccgatttttctcttgaaaatcgggcacccgattcttagttactccctccattccataatataagggat

SEQ ID NO: 10625 - DNA, 502 bp, Oryza sativa
gacatcgcgggcaccgtgttctgactctgagctagggtttcctcttcctccctctcgattcgattcgatgcgagttgtagaggcttaggctgctggaataaaataaaaagaaaatcagaagatgatgggccgggcctacccagacagagttaaagcccaaatccatcgccacctcttgtctctcaagagaaacggctccaagttcttttcctttttctacttactattattattatataatatatataaataatcctcacctacccgacaatctctctcccaccccacccctttctcgtttcgttggaagaagaagaagaagaagaagaaggtggtttcgctggaagaagaagaaggtgaaaccctagatctgatctcggatgacggcgcgatcgttgttggccggtaggatggtggcggcggctcaccgcgccttccgcagctggcccctccacacaatcacaaccaccaccaccaccgacgccgccactgccatcgccac

SEQ ID NO: 10626 - DNA, 705 bp, Oryza sativa
tcttcctacttcttggatgctggcatgcagtgagaccctcaaagcctccagctctcccctcagcttcaatggaaccaggtttttccactgtaagaaaaatgacaatgctttataaggcacatacgtacatatatatagtacaagcttaccaagtaaattataatgttcgcatctattttttatgtatctttaacgatgatacaacagtgatattaaacatacgtaatggccacgctactactgtctaacagcataacgtcatgtcagccttcacacataagcacacgcatacatacgtccaacaagcaagtaccagcgagcattctcccaaaagtttttcttcttaaaggtggggtaattgtcacgcccagaaattcccgaatagaattccaaacagaatgtgcattaaaatccccgtccaggaccggccggggtacacaagcgacaaagttgacatatagatccacgtcttacaaacattataaaagtcttacataaatgcagcggaaaacttaaaggataactggagctaagccttgacttggactgcagcgggaacaccactccacaggcatcctcgacagcacggacgaagcctactcctcggagaaaccatcatctgacgcatactcaaattctggggtttggggaaaatagagcaagactgcgtactacccactgtactcagtaagtcataccggaata

SEQ ID NO: 10627 - DNA, 934 bp, Oryza sativa
tagataataagtagattagatgaacaattagcgcagacaaagggctatcactctactgatgatttctctactgtacaaccaccagcctgccactaatcttccctccattgcagcacctccaggcctcctctccgccgtcgttgtcaccttcgccgccgccgcgccccttgggcacggtgacgacgagctggccgttgacgtagccggccacggccatcgccgggcagctcgcctccggcagccgggacctccacttgtcgagctccatgtcgtcgtcgtcgccgtcgtcgtgtacgcctcctcctccggcctgcaccaccaccctgacaaccccggggtggatcctgacggtgcgcacgcgcacctcgccggcgagcgcggcggcggcggacacgacgaagtggaacgcgtcggggccttcgaacaccgcgacgtcggtgtccgccgggaacggcagctccagcaccttgctgtagacgtgcggcagccgccggagatccttcttgccgccgcagctgccgccggcggtcgtggctggtgatgggtggatcctcatgtgtatgtttctttctcctctttttctcactgtcttctccttttttttcttttcttttcttgctgctggtttgttggtttggttgggcaagacgaagggtggagagggggctctggatttataggtaaaggccaagcagaagcaggtgtcacaaggttgtttctttctctcttttcttgggtgtgttcagggagcttctgcagctatagcttttcttaaaataaaaaactctctaacaatttctcttaaaataagaagttttcaaaaaaaaaaagcttttttttaagattttgatgagttatagttatagaatctagaaaataaattaaagatcgagagctgggaaactcgatttttttttaaattctcataatctaa

SEQ ID NO: 10628 - DNA, 17743 bp, Oryza sativa
tttttttttaaaaaaaaataatacaaggttgtatcaggacagctaatactggtctagacattagcaagccaatacacctagtcaatcttatcacatggcatatttgcccaagcaacagataataatgagaaatgttcagcgctctccgatccatcagtttgggcaagatataacaatggtcctgctgattcacctgctatcaggctatggcattcctgggttaatagtactgttacactgaacagaaatagatgacttctaattatcatttagttggaaataaaagctccggttaagcgggccttcgaagagtcagtatataaagctgctgagcttcctgccataaaaccccttaattttcttcatgcatttatccaactaacatgaactatatatgcaacaagtgcttgcacacaaacactacactgtccatgtaagaagtttgagatagcaacgtacaagtatacctgaaattttcttatccatttctttattccccaaaccctcagcgcggccatctttcttcctccctgtagcagtgttgtgaatgataacagttggtggccatatgataaggtcctccctacttgcttgaacaaggtcagggagcaatgactggtatgccttagaattttcagggacttttgtataatcccatcccataaggacgcatagtgccttgtgcaaaccaagatggtcaatgaatgaatccacatttggtgggttgtaagcatgcatgacaagtccatgcacatcagcaaagtccttagaagacctggaattgtgcacattgaccagacataatcacaaacaaattaagatttggtgaacatgagctgaatacttgcaaacttaatgcagccttcattacatatgttatctgaccgtgtctacacatgcccaaaaaaacatcttaactttattataccaagccacataatatacatataaaaaatatgtcacatgaaagcaggaagataggattctaatgccaaaggatccatggtagcaaaaataatgctgacaggtttgtactgtttaaataacccacaccagctgctgtgtccaaagttctaggacacccgatctttgtatggcattaagcagccaagtcacagaagggatcctatggagcagtctgaggttgaggcagctagtagcagacatagtaataattattgctagccgtaatctcaaggtaatttctactttctactccatctccttcaagatggttcatttgactattgactattcaaattgagcactgacatactaaactatgtgctcacgtgaaacacatcaaggaaaaagcatcagaagctgcacaacacatgcaccgttaatgcctaggtgctaaagcacacacctcctagcataacaaactacagatagcaaaattttaaaactaattattggaagaaaaagttaacaactgttttgcaatgatattttcctgatgtggcattttgactggtgtttttcaagaggatgataatcttgaggaacagataaagaaaatattctacatggaaagtacggctcaaccatggaaatgaaaaaaaaaagattgtgtaagaaatccgacttataagtccaccgcagctaggcgaaggaagcctggaagcgttgcttaaggatcagtgaatacatggagaaggtatagaatagataagcaagacaggcatatggctgaaaaagaagcctgagcgactatgaggggaccactatctaatattccaatgcaacttatatacctttttcagcacaataattttttacctaaattttctcgcattcattttttttctttattttcctatagaaggaataaatcagaagtagcagccaggttataagtggtccctttacaaacatttgtttgacctttcaaatatcaaaagttcccattttccgctactttcttttgaattgctttatggcattatgcaccctcactataatattctagagcgatgttggtgatcaggtcctcagtacataagaatatgaaaatattctgtgcttggtcacagatgcaacgcccattttaagtgttgaatccatatagtagacaagttggaccagagggtgaaccatctaagctcttggttcatcagtctggcattcagaccggccgattgggcagttaaaccatggaccacggttcggaaacattcatctaaaatgcatgtttccttctacactgcaccaagttggtggtaggatggcaacgtgaggctgccccagcgtgaagacctagggtcgaatccccacccgacagcccttttcagcattattttttgcaaaacagattatgttgcaggccttgatggaaggaagtgggccttggtttggcgccccactcgcaattagaaacactctttgagccccacccagtccaactgatcctagtttaatgcctagttcacctgaaaaccgtcaggtttgagcggttcaaatcagtccgagtacacaattagtcttctcaagcaaccaaaccaagctgagatcgacttctaggtttttttctgattaaaacgccagtatgatccatccttttcaactatggttgaatcttgcaatgagatcctttctacgtcatactgattttttttgtccattcaaaatatttcgtctattggcccttcaaaatattttgtctatcagtgtatataacatgtctcctcattagacatcagatctaagaaggcgtgctattttactaaaaatattctgtattgtgcaccaaaagtttgttgattgattatcgagcatattcagttcatttctaatgtcgccataatgtttcggtaaacacacgtaaagtcagatcatcaaaatcagggccaaactttgggtagcaaaaggcattctcaccagagtctacagaaaaggcaatccacacatgtgcagccatgaataaacattgaaacttgcctaaatatgagtctaataaagtatgttacgagccaaacaagcctgaaatgtttagttgggcagtttgtctactgttggcatttgaggcaggaggttgaaagatcgaaaatcagtgatcgcagcgtattttttctaatttaggtggcatgggagagaggacaatgggtcaacctggtttatccataactgtactccaaaatctaacggttcaaccaggatcatctcacctatcacaagctcattaccataatttaccacaccatccataaaagttcagctagggataaactaacttaacactgagaatacttatccacaaccaaaactacacgatattagtggcaaatctttacggtacttgccacttgctaatatggataactaccctgcagcaagaagtggaacaggacatgaaatttatatgattatatctaatatcagaacagtgttctttgcagtacacagaatcagaactcttaacacagcaatgcagctctcaaaaaatgtagctatgtatggatacctcacaaggttcacagtaacataaatttcaaacaacagtggcataaaattactaaactgaatatagaaaagaaagcatttcggttctatctataattctaatcacaaaagtaaaataccactttactctgatcttctgaggccagaaagagccaaaacaaaccacaagtgttagctgtgggggcaaggtccacaaacagtcgaaagtacaaatgaactctataagccgcagtaacaaattactagtccagtagaacacagtaatgtcaactcttaccacagaaaaaaaatcttgactaacgggaaataattttaggaaccataagggtatgatgctatactagaactacagctcgcatcaacattcctagtatcactaccggtatctagagtagtcatccattgcccagctatataattcgtgcaaagtaagcagcatggaaaaacacagtcctatcgggtagcattttccaccaaaatgaaatacggtggtgtggatatctccattcagacaggcagaacatagtatgaacgtcagtttatgtcaaaaagaaacaaacagcaaagcagtaaagccatgccaagtcaaagagtaagagtaagagcgagctcaacgatggaaagaaaccagcgcaagaacctgactacaaacaatacaagaaagcttgccaggaaggaagtgacaagcaatgcgggatcaccaaacctgccgcaggcaaggcaggggacgcgtccaccttcaaggtagctccgcctctgcgccgcgctctcgttgagcatcttggcgtacttgagaaacgccctcctgagcgcgtgccggtccaccgcggcatgcggtggcagctgctgctgctgcggcggtgccgcctcgaaccggggttgcttggggtgcctgctgtggaagccctcgtcgtgctcggcgaggtgcttccgcttggcgtcgtgctgcgccagctgcagctgctgctgctgcggcggcggcggcgggtgatgcggcggccagacttcatggccggccccgcgcgggaggtgcgggagctggggcagaggggtgagctcgaaggggtaatcaggcggcagggcgaagtaggtgcgcacgctgccgtcggcgaggagcatggtgcggcggtccaggttgtggaagccgtacgacggcgggggaggggtctccacccgcggctgctgtgcggctgcggcggaggacggaaggcggcggccgacgacgcggcggggttgcgcgcgccagggccaggaggaggcggatgccgcctggggtcgccggccgtagacggggtcggggtcggggtgcgcgcggaggtggacgccgcccccgcccccttctccccggcgggcggcggcgggccccagcgcgacttgcggggcgccatcgcggcggcggcggcggaggaggaggagtgcttggggtgaggagggttagggttcttcatcggattcgcgatggattggggaattcggggaatgggggggattggggatttcggttttggatttggagcttcgctgctgcggagcacgaagctgtttcactggaaaaggcatggaattggaaggcgtctccacgactttacgccatccatcgtggaaggcgaaggcgtatttctgtggtcaaccagcttaagtttctctctcctttttttttcaaccgatattttttttaaaaaaaaaaacatggtactcgtgtgtacactcactctcataaacatacgcgcataatcatcttgttatcgatatatatgttgtctatcacaattgactcgcttttttaataaataataatgtgtgaaatgcctttgcttgatgccgtttgtcaattgtaaagcaaaacattccctgagcagcattgtcaacaactatatagtgtcaaacacattatatatggcctgtcaaacacattctgaaaaattggcgcatcaaatggaaaagtgattttacacaccatgaaaaaaaaagattaaatatatactatgaaaagtgcttgccctattcactatcatatctgtcgtttttatttctggctttgtgtatgaagttcggacttcattttttatggaggttatgtcaatataagttatattgtcaaattttaataaattttaataacaatttgtattgtatcctatcttactataaagttatcccccactaactccttaaacttaacatgcaaagatgtcacatcatcattcactaacaagatggcacatcatcatccactaattaacaagatgatacatcatcatccactaacaaatcatcacatttaaacattatgcaaacatgctatatttttatagttattataatttaagagcttttcaaatataaacatgttaaattatcatccaacataattcacataatgttttaatgtatatcttatatacttatatagttcatcctcacttagttagtgcttaaatgattaatctatggtccaaattatctttctccttttttcctctaattaagtcatatcacatcaattggttttagcctttagatgattaatctacagtccaaactatctccctactttttttcttccataaaatcataccaccttactttttacgtttcaatcaccatttacatactatttaaatttaaattatcataaaccatattaatttacttaatctgatgttatctagctatcttacacgttattttttttgttatcatactaaattcccgcagcaatgcgcggggtttcacctagtttataaaaggtaaaggtacataagataagaggacatctcctcgaagggtaaaaaaccacttcccatgtcaaacattagatacacaaacaaacctaaaatgatactatattacatataccttcttagcaaaactcaattacctactatatacagaccaagcactcaattagctactatgatcaaacatatggtgatatggcatctttgtttctctgaagtctgaacaagatgaagctctcacacttcagtgccactaaccaaactgatactgggatcctcctccatctgctgaagaggctccaaggtggcgacaatgtcgcgcatcaacggcctagccttggggttgcggttgaggcaatggtaggccagcatcgccgtcttctggactgccttcaccgggtagtcctcggcgagcctggggtctactatgccaagaaccttcttcttctgtatcagcattgggaatgcccagtctgccaatgtctgctccctgactggcctggacttgtccaatgatttgcgccctgtcaagagctcaaggagcacgaccccgtagctgtatacgtcgctcatcgctgtcagatgccctgaagtagcagaaaaaacagaacattggtcaggtgaagtagaagtatattagtctgttcaagattcagatactgatctagcaatgccctttgttttgttcagtgtcaagggatcaggtcatgtctacagtggcaggccaagttcagttggcattgaggcattgagctattggcatcaacctaaattggctaggatgttaactggtgataactaggcttattgttcatttagagatgcaagatgaagatggcactacctgtcatgatgtactccggggctgcataaccgtaggttcccatgattcgtgttgaaacatgtgatttgtcgccgactggtccatcttttgcgagcccaaagtcagagagcttcgcattgtattcctatacaccaaattagttcaggaatcaaacaagaaaatggcaaccatatggtccatgaaaaatcagacaacaacactttactatcaactataggacattttactagagaaaaatttctaattctaatttatgccccattatcattaaattcagttggcatgaactttcttgaataagaacatttaaacagcagaaccgaaacaagtgtaggttctccttgcaagttgcaagaaattttaatgttaggcaaatgagatatgacatgacggttaagataaaaaaaaaaactccatctacctcatcaagtaatatatttgatgtcttgaaatcccgataaatgactggcttctcagcttcatgaagaaaagcaagtccttttgctgcacctagtgcaattttcattctggtgaaccatgggagtggtaccattacccctgtgttagtaaatatcagtacttgaacaaataacaaatatagtggctgatttaaatgaacagataatgcataattgatcatcacattggttatgcagtatctagaaagaaaaaggattgtgattcataggtagtagatgataggcacaacctaagaacacgtcgacaacagcatattaaagtatttattgcatctgtcaaaagaaaaatgatttattgcatagtgtatcatataaaatggaaatcccattttaattctctcgtatctgaattctgttccacactcgcactgttggactcatgtaatcaaaagataaagtgctacattatgaaggtaaaattgaaattcagcaaaacaagcaacatggtttagccttactcgaaaacaggtgtgattccacacttcccaggggcatgaactcataaacaagtactctgtggtcatcttcacaacaatacccgatcaacttcactaaatttgggtgagagagctgcccaagaaatatgacctcagcctgcaaacaagaaaaataattttatatctgacaacaagaaagcaaagaatggaagaacatatcaagataataacttgatacaaatcatgcttttatcaatatagtactaatcagaaaggccaatcaccagccactctctatgcccctggaaactattgtctccatcatggaccttcactgcgactcgcagtggctcctctattgttaatccttcgcgaagatcactggtgatgtatcctttgtagactctaccaaatccacctccccctagtaatgaatcctgcctgaaattttttgttatcctcttgagctcctcaaatgtgaatgctatcagagggttccgagccgactcccttctcagttcctccacctctttcgcgttcgacggcagcatgctgtcatccttttcttttctctcagatgggctctgcattttaggtgattctgtaacaacaaaaagataagcatgtcactggcttgatagtacctaaagcatagattataaatgattaggaatgctttgtgaagataggctaaacatgagtttctcaagataaacaaaatttcacatggcataatgagaacttatggtaattgacttgattttttttttaaaaaaacactaacaataagtatagccacctaaaaggatcaaactaattctgcaggaacggaatagtaatttcattatgcattgaggcaggcatgtccttcgaattattaggatttcctttttgctaaaatcggcagcagtttcaattcattaacaaacagtgcaaatgaacatgtagctctctatatatttaggatcaaacaaataatagaaagtattgcaccatagagctgcaacttcataatcacatagaccaaaccaagaaaggacagtggtacctgattttgttgcattggaagaaaccctgttaaagtatggattccctttaaaccagcagttacccataatacccaattccgcgctttcaaaaaaaataatacccaattcctaaagaacaactcagctttctctgtctgacccagaacaccaagaagaggaggcagcaggcagagatgtctgcaatgagaaaatggtttgatggctgattctttgacacagaaggagccttaatactatcaggactagaagaagaacaggctctcttaaatagaaggcccagccaaaaatggggataaatctagaagaagaaaagaaccaccaagagaaaagattttgggctttttgttctcatatgagagctttctcagaaggaacaaaacgcagagatgaaaacgaaggtctcaaccgaaacatccctgtctgtatttatcatgtgtttaatgaggagaaaccgaagggtaaacgcaaagggggcaaaaagaacggaatggctgaacagttcaattctggtagtccgtttccttttatacataaacacatcctttacagcaacggcatggatcttgcatttaagaagggtatggaagatttctctttttctttggatttttggttttgtggaaggggataaaaaggggagtaggaaatgcagcaatcagacagcagataaaggcagtacactcaccaccaccaagaaagaagaagaggggtgcacttgagtttgagtgggacaatggagagtgtagtggtggccatctctcctccatgtctcttcctcctagattccattggcttttggagttgagacttgagaccccttgaccttggttgggtttggttgggtttgctttgccctcactcctttccaaactgctttcttggttgtggttgggagttgcaaggaatgcactcatctagcctccatctgctgcttgaatcttgatctttcagtgagatggatggatggaatgatggggtttcttggtggacttggatatggtggtgactagtggtgcccatcaccacccactaatcactactcctactcagtaactgcggccacaggtaagacttatgactgcactaatccccatttctttgctgctagaagaataaaaatccctcctttttcacccctccttgtggtagtagcagtagcagcattcgctttctttctttcttcctttcttttcctggtgatgattaacctttgttgatggagggccaagtggatgtctgaatcacagtgccaggtttgcaatccccaaaaaaagacttttttctccaggggggagaggagaggttgcaatcgccgcaagagtttgtgttctagtggaaatttttcttggacttggccgctgttctggctgggcatgaggatgagagagagagagagagagagacctggaccagtgccaatcttccaagcccaacacccaccaaagccatcaccaactagcaccaccatttgatgagttctgctcctttcctcctcatcccattaggtacaaaacatctgctctttgtccaatttgggggtgtcactgtctccctccatcctcttcttcatgtccagacaattgtcatgcccaggttagcctaatctttgccttagtttatgatcaagaaatgtggctccagatacagcacaatggggcctgcacccactaggccactagaggcagttacagttaggctgttcctacatgtgcatcatatagttacatcttgaattatctactagattaggttggtgatcctgtcactctattagattagtctttggagttctctgactaggggaggtgtccatgtccccttggggctcagcaacacaatgtgaaatgtgaattgcttgttgcattgtataggaacagtttctcgtttgatcgaatgctaaaccacgacattagtgaacaaataagcatgtcggtgtgaccaaacaatatatacttctatttggatcggtgtgggctgtctgcttgagattaatcttaatgcgcccgccaagtgttcgactgattgcctgtgagagtagtggtgctgagctctgtatgtttgtgggtagtgcgctattaggttgcccaattttgatctcaccagtgcttaaataaggctaaattctaggtgattggattgtgtgagctccagctggtgttgcacttcttcttggctgtccattttgtgctagtcctaattatgtcgacaccggctgctaggatgtataaattcggattgtctttggattttgtatgactatttgcaccttgagggtgctgacagattcgtctgtggctggtgtgaaagaagttaattgactagagtgagcatactttggtgtgacatctaggggatattttgtttaggttcgaatgctgcttgcagcaactcacagttggcatatcatcaaaatagtatgatatcattgtcatgctaattaacagattaacatctcaaaatctattactcatgagagtagccttcacctacaaaatatcaaagaaaagggacatgatagtaaagagctgattctagggaaagttaagatttcacttttctctcagccatcgagttggagtagttaaccatctatatgtcatggaagaatacactcttcggaaattcaacaccttaaaataaaatagaaaaaacaaaacctgagttcttctttgaagcaataaaatcaataactcctattagcacaagtctgtaaggctttgtgtaaagttttgttacgtcaaagaaacggggtccacttgggcttccatagttgtctggtcctagaaagccctaaaggcaaataaagtagtgcttgttaatcttgtcatttggcaattaaaaccctaatttttaactcttagtttctagtctttattatcagcgtactgtgtgctttttgtaagtcctaattgcaacctatcagctacaataggctgatgcatgctcttattcattttactttctatttttttattataaatcttctgtatttgttgatgattgttcttattctgttattacaatagttcattatgtagttgcagtttcagtgtttcagcaaattaatggtttttaccttgccatgaactcccaatatagtcaaacagttctttttacttactttaaaaggtatagttcagattagacttaagtatttgattcaagactttttgaagccagtggtggtggactaaacttaggtacaagtggccaagtgacaaaacaagcacagttaatacatttctgacaagccagtggtggtggactaaacttaggtacaagtatgcctgaactgtccaattgatggaagtctatttttctgaatcgtagcattgacttttagaaacttgtggaaattataaaaaaaaataaatgacattctcatgttcatttgcaattttgtagcttatataggataggattctggcttcactacatgatacagagcttgatcttactagacgcggcataacttgaatttcatgcataaccataatctgcattctctcagtttgttcctatagatgattatcattttgagtgctattgactttttaaggtcagatttttcaggaatactgggacactttgccctctcttcgaaaaatcttgtcaatgcgacttctctagatatcacagctgacagtgatgagtttgatgctttgcaaggcaggttgggaggacagttcaataaatactccacagtttccatcccatgtctgatgaaggttcaggagttcatgtgttggaaagcctacctgcaaggctgcaactggccataagaatcctcctgcaaaaaatgtatactcatttttcatgaactgcgtagaatggacagttgccatcatcaatccatccttgccagttgccacccagatgccagaaaatgatttggcatctgaagtttcataactatacaaaatatgcagaacttaaaattgatagtacaccatgcagtaagcttctacggtgagtctaaaaacatgtactcctgtatcaaaaccattgttctgacaataccgaccagcctcccaaatctcaattggatggaacatcatcaattgacatgaatgcaggcagccactgaacatgaatgcagatccaacccatatggaacccattgtttgctctgttgtatccaatgatgcaaatttacatattataatgcacagaaaaggcaagattgatggtcggtgaagcatggtttttctgtgaagtgaagaaatgtgattgattgaattcatgtcatggggtgttcggtaagcttcatactgtatgtatgtcggatacttcaggttcttctttatatacctgtaatgattctccatatttccttctgtaaactattatctttgcattactgaagtgcagggcacatatctactggatgtgattcaagatatcctgctaaaatcgtaccacacgatcaatcaggtttctgtttgcctccatgttcttgagtgtctataatagcatgtaaaaaggatatttccatcttattaaggccccctaaacagtttattcatcatcagttaaaaagttgcaatgaggttggctctataagcatgctctttaattctgtgcaatgctagatgatatgcctaccacttaattactacgcatgctagatctacacaaccagccacttacaagttacaaccatctgaaatatattagttgattgagtgcaagtggttgaatgcctgtaaagtagggcgtgaaggattataccataccaaaataagcatggtccatacagattaggaactatttttttccctcaaagtatgattgttctgtattttttttagatttgcactgccatgagtgttcacggattaagtaatggttagtgagaatgtaattattggcattagaaactgtacataaaagttgatagtgcatggctactatgttgatattttgttacctttttacttatgctataaatggttgacaaatactagaaaagagttcaggggaacaattactagatattttaggttctattcaagtattatgcatttctcgctgtagtttgctgaaacctcgatgctgatggtaggcataagtttatcttgtcattaaagtatatcttcaaggtctaatgatttgagcacaatgtgttgaagacaccttgtgtatttaattgaactctaaaccttagagtttagccttttagcagctatttaaactgaaaaccatgaggttagcctttacaggatctcaaaagctggtagatgggtgtctttttgccagttatgtctaacagagcactagataagatgattaaaacacgagttcaagaaggttaggcctctactaacaaaccaaaccccttaggtttgttatcttctactgcattgtacagtagctggactctctgtacttaaactctatagatttaatcatcgcatcaggcatctatagactagatcactagatggacaaggctgaggcatgatgcagcccatggaggattgtcagagccatttgttagctttggaaagcttgtcttgcaagcaccctacagcatggcacaagcacgtcccccacagaatcatatgttctgtcctctgtctacctctgtctatatatatatctcttctcccgttgcagtaacttcatcgtgtaaaggcaatggctgtttttctgcttcttctcattgtttcctttctctcatatcatcccattcaatccactcaagaatcacattcgcatgtagatttttcttgcagatgttactactgttttttcatctttttgtgaaatcatgtgtttcatgttatagttatacctgtgctttctattgtctttcaggttcatattgtgtacttgggccacaacgatggcctcaatgcttcccttactgcaagtcttcatctccaacttctatcaggagtctttacaaggtaattgattgtccttttttctactcaaattaaagacaaataacaaaagacacaccaggtatacttgaagttgaatgtgccaaaatagtcatatggagtgcaaaaacttcatcatctcacatgagctattgttgcgcaacactgtatctagattaaaaaaaggctaaagttgaattattaatttagaaaattcaaaccccttagcttagagaatctagatatatttgttcttatttggcgagaaaatgtggctgaagagtgaagcgtcacttgtgagctcaacttttgtaggtcggatgaagcaagagatgctattctgtatagctacagctatggattctctggttttgctgcaatgctcaattcaacgcaagctgccaaattatctggtatgcatttacctttatcccgttgactttgttctcagaatatacctgtatctacctagttaatttccatgaacttaccaaaaactccaatgatcattatatgagcagaagcagaagaggtcatatcaatattcaggagtaggatgctcgagatccatacaacaagaagctgggacttcatgggcctcagcctgcatattcagaatgaacaatcagccggaatgcaattgaaatacggagacgatataattgtcggtattcttgatacaggtaaatttcctgacagtttcatatacctgtaattccagtttcactctcatatatttgttgctctatattcccaaacatgaagtgcatggtgttctagccggaaaaacatgtggtccaaccacatcgcgagaagttcgagctgatcagctgaatggtgatcgatccctctgacctttgtgttcagacaaatgaaatgagcaaacttgagatgaaagataaaatcatgtcttgcatcttggcatgcgatgcgaagatctgaagctagcatttcttttactactcattcatgtactcctactgtgaaaatgcgcaggagggctcgaagctaaacaaacggtcattccagccgcgcgccgggcgtacatccccaagcaaaccttcgccttctgccaatccctcctctcctcgcgcctcctcctcccgtccgccgcctcccccacggcgccggcaccggccctgcccgtgcaggcgctactcaccaccgctggcctcctgccgcaccaccccgacctctccctggtcgcgctcaactcgctcctccgcgtcctctcccggcgcgcctcctccccggcccacccgctcctcgcgctccgcctcctcctgctcatgctctcccccgcctctcccctcccgccgcccgaccacctctccttccccttcgcactctccgcagccatctccccgtcccacgggaaccaggcgcacccacagcgcatggagcaggtgtccccgcatacacctgcttcgcaccggaccggaatatagttggcaaagcaggagcgaagatcggaaaaagaatcgtatcattcatttcttttagaatttgtaagacttacggtgcaaaactgaagctaaggcatgcaaacaaaaaagtgtgagttcttgcaacaaaaattcttgttccctctctaaattctgatgttagggaactattcatacattacagcatcagcgagcctacttattatcttccttcttctctaatggcctgagatcaatgtgtaatgtgttgataaacctcagctcccactagattcttttcctccataaataccagctgctatctcaggctctcagctctttgtgcagttgtgtttgataaaacctctagggaaaaatcagttcggctacctacttctctccgattctccctgtcacgagagcgcggccatggcctcctcctcgtccggctcctctcccatttggtcggcaagcagcccgagcacctcccatatctccacgcgctgcgggtgcgcctggtcgtcggcgacgaacgacctcaccacgccgtcgacctccaccgcgctgtacgcggggaccttcctgatgccgcggctgccgatcagcttcctgaccctccgcgcgtcgtccttccggttggagtcgaggtagatgttggagagctgcacatacacaccctcgtcggcgccgagcttgccgagctcggcggcggccacctccgccagctccacgttggcgtatgtccggcagccggtcaagacggagccccagacggaggcgagcggggccattggcattgtctcgatcagtgccaccgcgtcctccagccgaccgacacggcagagcatgtccactgtgcaggcgtagtgctcgtgccccggcgcgacgccataccggcggcgcatctccttgagcagcctgagcccgtcctccaccttgccggcgtgcgcacacgcggagagcgctccaagcaccgccacgccatccggtcgcacgccgtcctccctcgccatcctgtccaggcacgacacggcctcctccgccatgccgtgcaccgcaaacgcgccgaccatggtgccccagacgtagtcgttccgctccggcatgccgtcgaacacccgcaccgcctgctccaggcagccgcacttggcgtacatgctcaccagcgccgacccgacgaacgcgtccccgagcagccacggcgcgctcgcctccacgtaccggtgcacccactccccgcactccagcgcgccagcctgcgcgcatgccgcgatggccgtcgtgagcacaacggcgtccggcgccaccccatccacaaacatcgccctgaacacccccagcccctcgcccgccatccccgtgcgcgtgtacgcgccgatcaccaggtcgtaatgtatagcctcccgcctgggcaattcg

SEQ ID NO: 10629 - DNA, 1219 bp, Oryza sativa
tataggcaggccttgcgcatgactcgccgagctcctgtgcatgcatgcggtcagacatttttaaaccttgctttcctatctttgctgtctaatgtttactcttgaagttacaactaataactgtccttgaatgttctttgtccagatgagttgaggcaaactgtaagagctgagattgaaaaaaatcgccgttgcgacgataaacagaagattaagttcttgatcagtgaaggtctgcaacgattaaaaggccttgatgagatgcttgacatgacaggaaatagttaacctgagtttcatgtcggatatgaggttcaatttacacggaagctgggtttgcatgagctcctgcaaaacattcattgctctgtgacctcctacacctgatatttccagaacccataaggcatcaggccacatgaacttgtggcctcctggattagagtttgttagaacggacccattcagattctttgcctcgttctatccaggggataggaaagatatcaggctcagatatattatcatggtagatcatcgatggtgtgcgtgcatatgggacgaaaatgcagttaccgaggcatcatgcttgattttgcacacatctattcagtcaagatatgctagcgagctttagaagcaattgggatttctttagatgctatcttgagaccctgaatttccaggtgttacatctgagaaaatagcagctagagatggattaagctgaagaaaggtatctgacttgtcgtttaggtacgtctgctttgaggcgatgatgttcaactttttcagacccgatggcttacttttcatatttgagatactgacctcatgtttcagtcctgatgttcttaccatttcttcgttgcaatttcttagctggtatgatgaggtcattaaacatgtactttctttccaactatttcattatatgccacaataaagatacttggtaatatatgctggtcctgccgtgctggtatataaaaatatgctccatgatcttaagcttttgttttgttgtgatcatatcaaatgaagggatacctgctaacattacttccattaggtaacttattatgtgacaatcgctgtttttagtgctttccggacccaattgtggggatctcactatcaccatcgattgagctggtgctcacactgttaatctactctagattttggaattttggattatgttgtcttacttaaaaaa

SEQ ID NO: 10630 - DNA, 1140 bp, Oryza sativa
tggtaattgaggcataatttctgagcaaaactgaggccatatctttcatagtataccccttattacattggatctaatgctatttggtataatggtaggaaatttataagctttttcgtaaaaattagaccatgacaacgcccggggcaaacccgccctccccaacacctgcgaggatccaggaagaagcaaacccagccacggagacagttgccgaaggtcatccctcgacaacagcggtcgaacaacccgaaattcatggtaatttataggacaaattttcaccacatgaccacataaattttagctagcaccctttaccaaatgttgccttctgtttgtgctgcagaattgccgtaggaacaacatacgtcgatgtcgggcgggacaagtgcaagtaggtcgagtagaaatccccggtcacaaaatatatggccgaccacagtgcaagttataagagaggttgacgctagtggtaggcccacggcgcccaggactgtcattggaagatggtctaactgctgcgggctggcggcacgtgagaacttcgggatcctctataaagatatcggtaaggtcacagaagccgagaaagaacgagcttggacggcaatggagaaatggttcacatttccggctgaagcaaaggttaggctcaagcggaaggcattccataagatgtgcaaagcttggaagaattggaagtcgaagctcttcaccaagtttgtcaacccgcccagcaatcatacgccgttcgatgaataccctcaaataaccgaagcggtgtgggaggaattctgctctctcaagaacacccaagagtttagggaatcaagcgaggcacatcgcctactgcaacagcggaatgagcacccgcatcggctgggcaccgcagggtacatcggcaaggaggcaatatgggcccaagaagatgcatccgcagcagcaacgaatgtccctcccccgttttcagacatccctgaacaaagagctcgcaactgggcgcgggcaaggggtaaggtcaacccggacggctctgtcacatttgagaacaaaattgatgccgtcgtctatcaggaactggtgagttcactacttaacctaactaatttctgttcgtataaagtacaagttcgtata

SEQ ID NO: 10631 - DNA, 6445 bp, Oryza sativa
gaatttcggacatccatttctcaatctaacgatagttttcaagtttccactacatatatagtttgcactacatattttccttattgaaaagactcttcacagtagcaagctagcatagacatcgtgcgtcgttcttctccaatcctaaggttatacatacctttgggttcgtcttcaaggctcttaattggtcgttggttccgcgagtctttgagacaaagttaggtaaaaattttcacactttgcatgcaaattagtttgtttagtaatgcctcatagagtcaaagcatgaactattttctccatattttcatatatacaagcatattgcttgtgcgttaaatatacagtacatgttgtacaaacgttaaattgtaaatgttgtgtatacttaaatgtacataaaaatattttaaaaaattgtgagatgtgcaacatgcatgtacaacacgtaaaaatgttactcaaaattatcatatgcggcatgttttgacttagtttctacttatttttaagtctagctaactctcccttagtctcaaaataactttactttagcctctacctcgtgtcaaaataagtttacctttatcaacttacctatatcatgctctaattcacaattcgatgattttttttattccatcaatatcttttacctatccttacctacctatctacctatccacacatactagtttcctattagtgagtgacactttggtgttttttcttctatattgttttgaacatccaagtctaaacttaaagttattttgaaatggaaggaccgaagggttattatcttattaaagtgtaatagcaaagaaataagcttttatgtttgctctcaaattacatattaatatgagaaaaaaaatctaaaccattaattatagggtggatctaaaatatagctgtgtggatttattggatgcgctcttcatgaaaaacaaactccatatctccaatctatattcaattcaaataaaaatctcaaacgatgccatacacattacataaacattttcacaccacccacaattatatatgcatattactaattattatttatctaattacattacttagtttgttctacggaaggttaattatataattactcaacaaattaacaagcaaaacaagggctaaaccatcacttctgtgaccatagagccaaagcaacacaactctatagcagaccttatctttcgtggataataaactactaagccaatccgctcacctctaacggatcatcaatgacggtttatgaagttatctatgataaatagtctatgaagttattgttcggttttgtgcatatagtttttatatctaataaggcttgttcaggctaaaaaaattcatacgcacgtcactgtttgaatgcttttcatctcgagagcaaatagatgtttcttgctttatatatattgacattatttttaaagatactccctccgtccctaaatatttgacgacattgacttttttttaaacatgtttgaccgtttgtcttatttaaaaaatttaagtaattattaattcttttcctatcatttaattcattgttaaatatacttttatgtatacatatagttttacatatttcataaaagtttttgaataaaacgaacggtcaaacatgtttaaaaaaagtcaacggcgttaaatatttagaaacggggggagtaaaaaaaaatactagcacaaaaattttaacatcttttgcatctccaagctaggatggcgagcatcatcacccactcctcgcacccagaacaccaattacgaaagatgaagctcaaatatccatttacttgcaacttatgcaactatcccggtgctatcagttgctcacaacaatcacctatataaacacacacatcttactgtagcgcatttaggatgtccgtaatatcattgacaatcaaattcaccgccagttgccgggcaaacatgatcagaaacctcacgatgggactgccaccgctgccgccccagccgccgccgccgccgccggtggcaggccaacccctcgtaccagctggagcaccgccggcgccggccggcgaaacgcagccgatgtggagcatgaacaagcataggccgcaccggtaatgccagatggagcagtccaggcagcacgccgcgcactccccgcgcgccgggaccaagttgaggacgtggcctccggggcacccggcgccggcgcgcggccgggtggatggtcatcggcagcagcgtgcacagcgggtgcacgtcgaacgcgcactccgcgcagcggtacacgaggcgcccgggctggatcggtccctggcacaggtcgcaccacccggggttcgccgccgaggcggtggccgcggttagcgggtgccgcgggtgcgcgaagaagccgtcgatcgtgtcccgggcgaagcggtcggcgcaagcctcgtggatggcgaagtcgctgcagtggtggttgcagcggtagccgacgccggtgacaggtagctcgcagatgttgcaggcacggtggctctgatccgctggttgtatgtgcacctctgaagctggtgctgtggatgagcaaagtgccagcggttttccatggcaagcaagtagtcacacgacacccggtgggaagaaaattatgtcgggccgaggtcctaccctcctcggaaagacttgctcctttatgtgacacctgtcccacacgaatctcagaacagcttactccctcgtctttccagttccccattctcttcctttgctcggtgaggcggcaagctggcgtccgaccagcgagctttagcccgaccgttcgcacgggcgcaccccgtggcgtcgagcagcatcaagtccaagctcgcgctgtcaacttgcgtgccggtagtctgctagaagaactctcatgatttggacgagactgcgctgtcgacttgaatttgttacatgattattcactcattcgatttttcttgcctcatagcgaaattattcaatgatttgatttttcttgccattgaatttgttctgtatggtagtactgcactgataatcattgcttgtgttgacttgaaggatttcttctttttgccgggtgagcattttaggattatagcgttaatgtattgatgtttcttctcgacgagcgcctcatgcgagcttggatgctttcacgttactgatatcgtttgattccggcgacagcgacagcctgccgagcttcatgccgctcacccgctggtcggacgcgagctcgccgcctcaccgagcagaggaagagaatggtgaactggagagacgagggagtaagctgctctgagattcgtgtgggacaggtgtcgcatagaggagcaagtctttcggaggagggtaggacctcagtcctacataattttcttcccgcacggtgcaggagcagcgtactgtttttacgtattactgtacgtgtttctgctcttcgtgttgcgcttgatattccggggtgcgattgcgaatatatacacagtaacacaaataacttgtttttttttctttccgtttttcttttcgttttttttcttgttttttttccctggtttggcgtttctcgttttttttttctttcggttttttcttttcggtttttttctgggtttttccccctggtttctttcagttttaaacttatacgtatataaattttgtattcgtgcatatacaaagtttgtatatgcactactttacatacgtacgcatacaaagtttgtatacgtggtgcttttttcttggtttttggttttttaaatatgtatgtatttacgtatacaaagtttgtatatgtgctgtttttatgttttttcttcgttttcgggtttttaaatatgtatgtatttacgtatacatagtttgtatacacgtacacaaagttttttatactccagtgtagcagtagtactagtagtatactagtatagtaatagcaactgtgtacgatcagtagctagctaccagttccccaatccacgtcgctctcgaatcctcgcctgctacagttttttccttctcgattccggcggcctcatctcccgcggagggagggaaaagggtcctcccccctcccctagtatagtttaatagccgggctagtctcgttaggtcgggttcttcctgttttttcttctcgttggtgtggtatggaggttggagacagcggcggcgttacggatgtagccaaactcggcgatggcgacacgaatacgaccgaagatgacggtggtggcgcggatccagttcgcagcgacggcggcggcttggaagcggtctgcagcggaggcggtggctcggaggtggtccgcggcagcggcggctgctcggatgcggtctgcggcggcggcagtggctagaatgcggtgatccgctgcggtggcggcggcgtggatgcggcccaaggcggcggcggctgctgacgttgcccgcggctgcgctgttgctgcctttggcagtgatgatcgcgccgtttggcctacgtcggcgtcggtggtgtgagtctggtgcttctgctccaccttgtgcaagtccgctcttccccaacgttgtgctatagagaacagttcattcgtcgatggttgtgctcttcactgcatcagggtggctggatctgggatccttcttcctctttgtctccgggcagtggcatccacgctgggtgtgccatttgggttgagctcaagctcctcagattcaatggcgaactcgatccatggtgaagtttggttgagtccggtgaaacctacaccaaaatctacggctcaacagcaaatctccaatttgtgcaatttctatgaaggcgaccgaaggggattactggttcgtcaagcggtctgcatgctaaaggagacccaaggttgcaatcgtcgcggcttcgccgctgctccctgtcgattcgcgccttctgcgctgcctagtttcaggaggttgtttatgttcttggtccagttttctattctgtgcatcttgctgtttctgttgacgatgttcgggggcttgccctcttgatctgttgctctaatataaatgtttaagtttcaaaaaacagtgtagtagtactactagtagtagtataggagtagtagtatactgtagcatatgcctgaccgcgtgagcgactgggcgcgcgcccagtcacccattagcagtcccctaactagtgatctataaatagaggctaggaggggaatgaaacgggacttgaattgtaggccttgtttagtcccaaaaacagataaattaaaaactaattgcacaatttacatgaaaatcgcgaaatgaatcttttgagcctaattagtccatgattaaccgtaagggctacagtatcctacatgtgctaatgatggaataattaggcttaataaattcgtctcgtggtttccaggcgagttatgaaattagttttttcattcatatccgaaaactccttccgacattcgatcaaacgtccgatatgacaaccaaaaattttcttttcacgaactaaacacacccgtaatctaaatctatcactatacttaaatctctcctcctcgccaacttgtctctttctcgttcaactcctctctaaattctatctcgactctttcttcctctgcaagttggtaacaggagtttacgcggttcattcttcctctgcaacttggctctttcgctccgacctgattcagtttcgatcgggtacgtacacgacatgttgaaatgtggagacgtatacattgatttgaacctgtaaatactaaatacggaacacgccatggaacgtaacagaagcaactgtgacatgtgttggaattttctcatcgaaaattcagaaaatttacaacttgcgtggtttagagtagaaagtcgaatctgaaaccttaggcaccgttcctatcagctactcggttgagcgctactactacgttttctgtcagagtttcctgaaccagaactatacctctccgttcccggccatccagcggcgtggactcgggagttttagtcgtctccttcggctccgatttccgcttctgcccccacgcggattcggttggcagcgcggactcggggaccgctgtgacgctgtcgtctcccctcggtgccggccggagaaacgcgcgcaggcgatatggagcacgaacatatacataggccacaccggtaatgtccaggcgatatggaacagtccaggatgggaatggttaggatatggattgaacttaaactgttttaaaccgttttaagtgagttcattcatccataatttaatagagtcaatccatcatgagtctattatatcaatatgctatccatagatatccaaatggatcatctattctagtagtaaaaaaaaattcttattatatgtatgtaaaactcgggtccaaaattttaaaactcgcgttcacattataaaaactatatctcatttagg

SEQ ID NO: 10632 - DNA, 1446 bp, Oryza sativa
agagaatccaatgtcgcctgcgcagtggttatgtaacgttagtactaagaaccttaacttcaaaaataatatacacgaaggatattggcctcttactcttggttgtgtgcgcacatgatgtactccttgtcttgatgggcccataaacaccggttgacatagtcaaccacctcagtgaagctctgtcgtaaattaacctcgttcaccatggatggatcaaagaacccaacctgattaccaaggcgacgactctcgatccaacacaaccttaaaacatttacgtattagaactaatttaattaggagatatagtccaatcatatcacaagtatagaaggtatgcacttacaaggagtagcattttagaagaccagtgtccaacttccggatcctgaaaaggtcgaagaggtcatcaaatcctatagttatataggcaggcgacgataggaatggctggtggtcatgatgtccaactatggatgactccctcattttccgcttggcattgcttagctccatgtattgcttatgtagctctcggcaagcaatacccatcacggctaacacattgtcctccaccaatggcatgctagctcaaattgggccggcgccctcacgaccttccccgctttgctcaccggcatcgacgtcacagccttgcccctttttggctccggcgccaactccccgaccttccccttgccgcgttcacgcttctggcccttgacaagtggtggggagctattggtctttcttgtggtctttattggagccaagctttgagctatatctgccaagtccatatcagctccaccaggagaatgaggtactgacaatgccggtccacggggagcctcaattgatagcttagacttgggaggtgtaagctccgtcggtcgacttggactcacaactatgtcttctttgggccattgtatgaacgtcttgcgcgcatcgcccaaagtcatgatttcatcattggggggcacgggcagcggatagcctaaccaggtgtcctttactgaatcgatggacaccttggcatacccagctagcaggtctgtgccgtggaccttgtctgtaaccaagggcttgaaagccatgccctcagcgacttcaggagcgaaagttgggtggactctcgccagtaggacacactgtgctgcgccctgcatatgtgaaagtttgaatttaatattggaacgtgtaaaggttttttattagatatggatcggataacatcaattacctcgatgtggtccactgcagctagtggtgcgaccgggagaccaggggctggcacctctgggatgcacaactactcctatgctgtgacggactcgcgtcgtgttgtgcacaagaagttgaatgcccaccaggtgttgtccctcagggtatattcatgtcggcgaggcccttgttaaccctttcttccaccctagcatt

SEQ ID NO: 10633 - DNA, 8308 bp, Oryza sativa
ggtaaaactgggagaagacccaaatgactggcgaaccccgtttgttaaatatatcgaaactggctggcttccggatgatgaagcagaagcaaagcgcttgcaaatcagagccacgaagtataagttaatctcaggccaactttaccgttctgggatgcttcaacctctactccgttgcgtttctttcgccgaaggtgagcaaatggcgaaggagatacaccaggggctatgtggcgctcaccaagctgcaagaacggtggcctccaaggtgtttagacaaggggtttactggccaactgtgttgaaagtctgtgcagagcagattaagaagtgcgagagctgccagcgtcatggctgaagtcaaaccgcgccccactatgacttgcagcccattgcgccaatttggcccttcgccagatggggactggacatcattggcccaatcccttcggcacgaaacgggtataagttcgccattgtggctgttgaatatttctctcggtggggccaagccgaactccttggtgcaattacttcggcagcagtacagaagttcgtgtggaaaaccattatctgccggttcggagtaccaaaggagttcatcaccgacaacggcaagcagttcgactctgaaaagttcagacaaatgtgcgaagggcttaacctggaaataaaattcgcatcggtcgcacacccgcagtccaacggagcggccgaacgaacaaatggcaagatcctggaagcactaaagaaaaggctcgagggggcagcgaaaggcaaatggccagaagagatgctatctgttctttgggccctgcgaacgacccccacaagaccaacgaggtttagcccgttcatgctcctctatggcgacgaggcaatgaccccagcagagctaggggctaactcaccaagggtggtgttctctgggggcgaagaaggacgcgaggtgtcgctcgaactattagaaggagtaagagtcgaagcactcgagcacatgcgcaaatatgccgtaaacacttcggcaacctacaacaaaaaggttcgaccgacagatctcttgcccggtcagctcgtcctaagaaaaaaggcgaacccagtggctgtcggcaagcttgaatcgaaatgggaaggcccgtacctcatcaagcacaaatcaaggacggggtcttttcggctggcaacattggaaggcgaggggctcgaccactcctggaatgctgcctccctcaagcgcttttatgtctagaataggtggcacccaaatcgccaacttgtaaaaatgtatatagtcatgtaagccattcggcactatgtacgcctcccggcaaaaaaaaaaggaaaaaaaaagaggaaaatgaaaaaagaaaaaaaaactggatgtagggttattatccgccatggaggcccgaaccagtataaaacctctgtgtcctctaccttcttttttttattgtgtgattgataacttgtggaaaaaccccaaggcaaacgcctgatcagcgaaaaagccaggggggcgaaacgaatcggccgaagcatcgctcgccgaacgttgaaaccacaacagcttgtttcggaaataactaaccgaacgccattacattcgatcagcatgaaagtaaaagcgtctatcgaaaacggaagacgaaagctggaaaagtcgaagcctattttgctaatgtatgcaaaggggccgacatgttccgacccaacgaaagcacgcgaagtgacaatgcgagaatagcgaaaaggaagtaaagcacacttttattgattcaaaaaaaaaagggaggtatcgaggattacaactcaaacagtgcaatatagatcacaaataaattacatcttcgccctcgtgtcccctttctcccctgtcggctaaagaatgatcgggcgaacaaggttcgtcgtcgctaatatcatacaccactctaaggggagaagggggcgaaacgcaaattatgccataacggcgccgaaagatcgcttcctgccgatcggtcttctgatgattccgccaaaagcgaagccatgtcgtccaaacgtcttgaatgaacaagatcataatcctccagggttcgctcagggtgactccgaagccacccagcaaccttgaaaaccttatagctgtgtccatttatcagcatttcacgatacacaggccgaaacgggcatcgcatcttcggcaaatcttttaaagccacaaatttctcgttttggtttcgccaacttccaaacgggggtcgaatacacagttttcggcgaataccctggcagataatgcagaaatggcaaaaaaccaatcgaatagtgagaagtaggcgaaagcataacaaggaccaacagtaaagggcgaaaggtaggtctgttatacatattttaaatgcccaacgacaacttagtctcggttacaataaaaaggttagcggcagcctgccgaatatacaacggttcgccacccctggcgaaccccaaaaaaaaactatgaaaatctaaagaaagggcggagggcctcacacctctgggtgatcctgggcatcacctccacccccttcggcctccacgtactcttcttcgcgaagctccgccgcctcagccttcgccagctgctccaaaaggcgcgccttagcggtcgagcggccgtccctctgctagaattgttttcgccacgcacgaagtgcgggcgaaatgtcttgtgaactgatttcccaatcccctttcgcgtagttggggaactcggcgacatgctcacagccgaactgctgtaggaggcccgtggtaaaggccgcggacacgcgcgcacagcagtcgccgtacgcggtggcacagtccgaaaccgaaccaccagcctgctaggtccattcggagaagtcaaaggcagaggcatcttcggaagggacacctcgcactttcgcgcccatatcggtaagagcaaggcgaagcgtttggcaagctgttcgcgcggactcggtagttttcaccatctcccgtgaaaaccgccgcgactccgcagcagcgcttgcctcggccttgcagacttcctgccgaagagcctccatcttcgactcggtaaggttgtagtaatccacaagcacggcggagtgggccttttctttttgcagttcggccttcaagcgttcgacttcggccctagcttcattccctttttccagttccaactggagccgcttgttttcggctttcgtctccttcagggtgttagccaggacctccatctcaagatttttgcggcctatttcgtcatccttcgcccgaagacggcttttgaacccgtcaaggcgggctcgcacggttcgctctgttgaacagtgagccgcaaggatctgggcgcaaaacaagagcggcgaagagagcaagtgtcagcaaaagcaaagataagaacagagaaaaaggaggggaaagacgtacccgaaccacaagactttttatagcggagcacccctcattgaactcattaagttcggtgaacaggctcggggtgccggcaggcatgattagattgctcaccccttccacaaaaggaaggaggtctgcccgtgtctcgaagtcgccgggggcgaagcggggcaccgcaagcgaatactctgacgcggacgtttcgccagccgctctctttcccttcgcctcagtcagcggcgatgcaattggctgacgaggaggactgccgaaaactttcgccgcggccgtcacgatcctttccgcggaggccgaagccccagcggcagtgctaccacccgctccagtgccgccaagtggaggagcgggagcggctgagagatccaggctgcggccagcgggcgaagtcagagtcccgtcagaggactcatcgtcgctaaaaactcgagcgatatcgacaagtcctttctttttagccgccttcttgacggggcctcccttcgccgccttgccagaggagaacgcaaccagagccttcgccacgtccaagtctttttggcgaaggggggagctattcgactccaccccagtctcgttatggccaggacttggagtgggggtataaccgggagtttcggcgcgtccctcggtcacctcgaccgcggcattttcgaccgcggtctccgtctcttcttcctccccctctccctcttcgccgtcaagttcttcgccatccttgtcgtcagcgtcagaatctgatgaaacaggagccctacgcttcctaggggcaagcttaacctgaccgcgcggccgcttccgcgaaggccctgcttcgtcaccagccttatggggattcgcccgaggaggcaattcgccgttaaaaacccggttcgcccgaccagttgcctgccgtgtaagcatttggctgtactcaacgaccgatacgtcgccgatcatcttacgggcttcggcttcggcttggtcaagggttagcactgcaaaggaaaggaaaggagtcaggttaaaaggtcaagcagagagagctaaagcgcgaaagtatatggcgaaaacagcagacttactgttcattccctcagggaggaccagcttaggcaagccatcaacctcttcgctcaggttaaccgcaacctgccatgactgggagaggggaaagatgcgaagcatgcagaactcctccaccaggtcgcggcagctgaggcgggaacagactttccttagcagggcgaaccgggcctccatagcgccatccacggcgatcctgggttttcgattcggcgcaataaccctgcgccgacaccgaagagctttcgctgaatcagagccggcctcgaaggggatggtgtggtaaaaccacctcgccatccaatggcggtcccacttcgacatggcagcattcgctggccaaaggtcggaccgttcggggcgaacattgaagttcacgctcccgatcaccgtcttcttcgtcccagccggagtaatcaccgtcttggagttcacggtggcgaagaatatggcgccgaagagagcagcgctaggttcgaacccagaagtccgacaagcccaatcgaaaattgagatccgaaccagcgtcgatgggctcaattgggggagctctacctggaagaggcgaaggatctccggcaatagcacgttgcacggaaaccgtagccctgcctcaaaaaagacggcgaaaaccaccgtccgattgtccacaggcttcggcaccacagctttccccggggcgaaagcctgccccgcaatcaacgccccagagctgactagtttcgccagctcgtcgtcatccacaagggaggcccccaaaaaggtggtgttatcgtcgtcgacccggccagggtccggtccgaccgcctgaacggggtttggtttgcgaggggccatggcgaaaggcgtgtgggccgtggcgaaccaatagggtaggcgaaacacctacggattcaagaaacgctgtggaaggagataacgaaggaggagagcgcacgcagtaaaagtggcaaagtgtgacggtgaaagggaaaggggtgagaatatatagcccaccgagtcgacgtttcgcataccctccaatcacaaagagccacgtggcgcgagggtaggcgtaacggtaaaatcccatcatccgaccagcacagtaaaaagcccattaagggaaagcccaatactgttcacttcggcccggaaaaagtaatgatattttatttgcaggaacagtacgggtttcggcaggagcatcgatcgaaagggggcgccacataccataccacatggtttgcacggtctcggccgaagctccgctctcacccttgcccgcgaggggcttgttggcggatggcatgagtcccttcgaccgaatctgccgaaacccatggcgaaaaccacgagccaaggatgatgcgaggcgaagggtcgcacgagtgcacgccgaagaaggacgacttcgccatgccgaagaaggacaacttcgccaggaccggttcgccccggcatccagcccagagaaggacagcttcgccaggtccagttcgcccccgcgagggccaaagtagccttctcggcccaccaagcatagaggccatagggccggcgatcgcccgatggcccatcaagggcccatgagcccccctttacgttatgtaaccctgtaaacgtccctttcataagggcaactatgtaaattcctcagtacaacctagaccctagaagtgagaatctgtaacggggctataaatagccccctagggccatgtaatacaggggagaaaattcaagaaatcaatatacttcgtttctttccaaccactgttaagtaaccacgtctttcgacgtatgcggttgtcgtttcgacaacacagttaatagcggctaaattgtaaatgagagtaaatagctagactcttctcaaacaactatgggcatcatcttttcacttatgcttatcaggcaaaatttgaattttcaatattaaatttggagctgattttgagatttttttcatcgaagtttatttttcagcctttgcttttagatcgctaagaatacgtatataaaagttttattgataaattatttttcgtttacaaataagccgtttcgcttataccgccaataagagaaacaatggcttcgtatgtctctatatacatatataatatatatagcggcagctatagccggaaatttaaaacggcgaggaatctaatctaacggcactttcaagaataacgccatactatacatacctgagtcatctctatcttgcttgaaatagaggaatccgagcagcaatccagccaacgaactcgtcaaggcaagagcaccttttacggcgccatggccgacgccgagatccctctgcgcggagagggacgggagcgtgagccgctgcgcgcgagtgatgaaattttcgatctgagatcagggggggaaacggagagagactcacgagggtgcggagagcgcgtggcttcgctggcctagtccccgccgccgccgccgatcgccgcgcctgcgcgccgcgtgccgagagcctccggtcgaggagagatgcgagtgcgcggaggaacatgggcctcgaaatctcgatcgatcggaggagacgcctcgatttctagggttttgacggacttcgctgtgggaggagtgggaagtgcggatgcgcaacgggtcgaacggatttccgacaaaatccgatcaaattttgtcaaatcagatatttaaaatccagtttgattttcccgtcggtttttttgtaaacacctgaggagggtcgcatgggccgtgcgcacgcgcaaaattgggccagtatgggcttctacctttccttatagcgcgcgccggtgcaacttggacatccacgtcttgtgctctgccgtgccggcgacggcggcggcggcgctgccaccgtgaaccgcgatggcgggcacggcgatgaagaactccttcgcgccaacatggccgcatggctaacgaccttgtcatgagaaacaccggtctagacctgatgatcctgttttattgtgaatatatacgccactagactattagtaaaaatgcataatttttacaggcaaaacttgacatttattagtacacatacatcaactatattatctcatattagttcttagcgtacacatgttactttggattttggagaaagatgccaagtagctttcgaatttctgtttaacaatgtccggaatgtttaaacgcgtacagttttgaaggcaaatactatgtgggaataataatatcgaacgaagcacatcccagaacatataaatcaattcttgccagtcttcagtacaataggaacagtagcagcagcctactccatatttcagaattcagacagatcctagtttctgataccgcatattgacaggaaaacatttacctctaatcacctagcaagtactatagagaaaaatgaacagaaacaaaacttgatattggacaacttttgtagacagtggctctaatcatagtagtcttcatctgtcagaagaaaaagagaatgctttcattagtaatcttaacaaaaccaccagtagtccattttaggaagagagaaggatagatctgatatgaatagaagttcaaatttaaacttacgtgcttcctcctcttggttccagtcatcatcgtcgtcatcaaactcgatattctacaggaagttaaggtattagagtgctaaagagatgataaattacaattccaaaaaaaaaaaaaaatgattcatatgtgttccaacatgtgaagaaacatacacaccacatcattttgccaaaaaatgagccatctaatagccgtttttccacataaatgaaaacctcaaggtgtaccgggc

SEQ ID NO: 10634 - DNA, 2365 bp, Oryza sativa
caataagaaatgggatgagaaatttgattagttcgcagcaaaaaaagaatcatgagctaagtttaaaatcaaatactagcagtacgagatctaaattggaacatatagttatatcctgtttaaattcagaactagtttactaatttacatgatttcttatatgtggatacaaggttacaagtcaaattacaatacatttctgataaaaattacagaaaaaaactattgtaatttttggttgaaagcattttacctgaaattacaaattttagcagtgtacattttgtgaaaattagcaatacaatcaaaataaacttgtaatttcaaacaatgtttacagaaagaaaattataagggttgccaccaatcatagttgatagattatttagttgataaatttttggttgaaagcattttaaacacataaggtttagtatatttgaaatttgcaagttgataggtgctaattggcacactctaattagtacactagaatatagcagatcttggtgctaaaaagaaatcaaacagtttttttttttaaaaaaagtacgtttagttgaaatgccacaaaaggtaagatttgtggaaacatttggaagatttaaagttgttggaacaactaaaaaatacagttaagttgttggtaacaatatttgagtacatcttttagttttatcccaacaaatattcgattacaatcgcttaattatttgaacattacatccataaggcgtacagaaaacacaggacacgaacaagggatttggatccggtgcagttggtagtgtgactgcaacttatgcagtccactatcagctgttagatccggatccaagggctaacatgcgtccgggtactgtagataactgtagcaacattgtttagtactgcttttacattcactgtagctaaggatctagtccgttcatcaacaaaatagatggctccttttgcttgcagtagcttaacttgcagtccatatacaaactgcatgcgatcccaattcacgaagaagatatactaacagacttgccgatcgattcgatgagcatatacggttgacttgacttagcctataaccccggtggatcgaacaacgggttactacacattattggaggaaaagaaagttcaaaacggaattgaaacgacaggtgatcgcacacacatacatatatgacccaaacaggcctggtgatcatcgacgtggcaattaatcgaggaccgcttgaaggacgtcgagcaccggcgatgccagcccgccggttgctaggtcaatcgctatcatgaagcttttcttgaggagaaacttgctgacgctagtgctgcggctccgctcaacaacagcagtagtgttccgagcatcactggtagtttggttggcaccgctgctggtgttgccggtgccctggccacggctgctactgttgttctggttggtggtgctgccgctaccctgaccgacaccgcttggcgcgccagagacgcacccgatatgtagccgataagacggagacgtacaagggccacagatgtagtgccacacgggcaaacgttcagggcaagcattgcagtgccctgaagaaggtaccatgttgaggtcgtggtgtgggtgaagcgggctccggatcgtctgagggagcaacgtgcacagggggtgcacgtcgaacttgcactgtatgcagcggtacacgaaatttcctgggggacaatgctccatgcagaggtcacatacccatcctttattctcaggaggcatgcggcagagcgtaagggtgtgccacgggtgggcgaagaagaagatggtctccttgaagtagtcggcgcacgcctcatggatgtcgaagtcgcaggcgttgcagcggtagccgacgaggccggagagcttggcttcgcagatgtcgcagacatggcgcgaggcgctgctgtacggggtcttgagaaggcggtgttgtggatgggcgaagtgtgttatgtgggcatcagttgccatgtctttggctacgctcagaacgcccaatctctctcttggcctagtttttggctacagtactgtgttctactacttagtatttctatagatcgatcagactactccacggttagtgtctgcctgtctggcttcggcgtgcctctaggcgctcagcatacatttataccatcttcacaggctcacagtctactgcagtaattaatgatgtggtgttgtttgactcagtgcccatttctgtatggaaaaaagtccaaattacacccgctaaattattagacgagtgcaaattaacctcctagacacaaaaatcatacatttttcactctcaactattacaccctctaaattattggatgagtgcaaattaac

SEQ ID NO: 10635 - DNA, 7081 bp, Oryza sativa
cgaggatgtcgacaattctgagctagcagttgttgatggaggagtaacatacaatggcatcatcgatgcaatgggagaggatatcattgtgcatatcattttcaaactttctcttcggcattgcttactcaagttctaaccaaattatttgttttgttgaatgattgtaggttggaccgtaggaagagcaagaagattacggactggcatgctcatcatctccatcttattgagcggggggacaacatagcagctaacgtagtgcctcacggagtggagcacaacaagacatacttcgacgagtacctagcttggctcctgaggaactaccgccttttccttcggccggcatggactctagctgacatagctacagatcccgaggatgttgaggagatgaacgagtatgacacccacactcgagcaggggcgacggtcgagtacgggcctgtacgtgaccgagtggtaagtattaaggctcagagttgttcatttcacatacacctacatgttctcacaatattaaatccacttgcaggcacgtgagctgatgaggtccgtgaacgacgcgggtgttgcccttggcacacctgctgggtcagagaatgaagttgggatacttcggagcgcacttcaggtaattaaccaattagttcaatccatgaatcatttcacttgcctctaacttatttgttttgttcttgcagaggctaaaacaacgaagtcggatgttagcggcaagacttggttgtaggtccacaaacgcagtcgacccacaaccaagactaacgcggacacaggccggagaaacaagtcaacaaagagctgaagaggaagggtaggaagaacatgatgaaggggaggaagaacatgaggaaggggaagaaggagatggacagagtgacgaagaggaagaggaacaacccgaagaaatcgggtcatctcagcttgcaggtgccccgcagccatcgcaaccttcccaaggtcgcccgcatagaaagagagcaccggtggaccggtacacaccttccactagtggccggaggggtcggcactagtggattactttgtacttaacactctaagcagcgttagacttatatcaaactttagatgatggttgatggatgtgttgaactctatattttgtgatggttgatggatgtgttgaactctaaatgctgtgatggttgatggatgttcagttgctgtgatgtcttaaatactatgtggctgtcaattttatgatgctgtcaatttctgtgtggctggctgtgctatgccagccactgcttgacctcagcgccaaatagaatggcgctgagattgtgcaggtcagcgccagagcagttggcgctgaggtgcacaagatcagcgccaaggtctttggcgctgagatgcagcccactcagcgacccagccatccctcgggtggcaacctcagcgccaaatcggctggcgctgagattcagcccccccaaacgtcagcagacggccatacaccgaaggaaacggccgtcaagtactcagcgccgatgcggttggcgctgagttgttcaacctcagcaccgtcggccttggcgctgaggtcggggtccagatctggtgatagtttttgccagggaccaaatttgcaaatagttttcaaaaagggccaaattgtcaaattttcggttgatcactgtattgttgcaatatccctccacgatcaaaggcttactttgggctcggtcgctccaatcaattaagagattgactctgaggttgatgatatacaatgttcaattgcgagattagctatcgagactaacgtatatagatggtgatacttggaaaaagtctatcggtccctatctttttcaagataactagcctaaagccgcacgttcacgcgactataaccaccctcttttattccatgtgtttacatgtttacatcaattagcttaattttataataactactccgtattaacattgtgaataagtatgggtagaatataattgcatgaaggaacattaacaaatttatcataatttgtaactaagaatataatcataacaataaataatttagcatacattaccgtgacatttaccacaatctgctgaatttctaaatgtgtcatttgaggtcatattgtaaatatgttgtaatatgaaaagcccaacccatcttttggttgaacgaaacattgagtgcaatggctacagttatggtttttattcaccttctgtgccgctgttttgtcctgagcaatgctacacgtacaaaatttttcttactaaacatttactaacaatcatctcaaccgtttgatttaagtagatggaagttataaaaaatctagatgcactcatagcatgacatatcagtgttagtaagaatttagtaagaaaaagttagtacgtatagcattttccttttgtcctatctgtggaggcgcagccataactgcccacttcgctgctgcttgagctccgaccttgacaccttgttgccatctccccggctgttgcatgaccggatgaaccccttatcccctcttatattcaacagtaaacgatatactactaacacatagttaattaaagaggaatatgcaaatggtatcgcacatccagccataattttaatcactaactacgatttactttaaaaacgactaaagtaccactctagtaagaaaatgggaaatttagttgtgtggtaattgcaatgtgctcaaaatagagctaacatgttaaaagagcagaataaagtcagttcgggaggattattatttctatttctcacttcttctagctactttcttcctgtaagcagaatgaaacgattagtatttgctcctcattttttatagtcaaactaaaaattgaaatatatcgttgtgttaaaaaacaatgaaaatggctggtccaacatgatagaatatattgtgttcctataagctgcaaaagcattaacatatcttaaaaatgcagaacaatgcttctaatttgtaaactctaaatactacggtcattaattattatctgctatgattcaagagtctcacttcggtgccttctacctagagtagaaaaaatctgaaccgctgatctcatttgatccaatggttcagatctatttttactaccaccacacttaatggtagtagaatcgtggagggtacttttgcccaggaaaaattatctacggagggatattttcgtcctttccccccgaatcgcgcatctggagccgacacggagagaaccccgcggctcccatcaccgccttgacgacctcgcctgctccactgccctcgatgcctcctactccctcgcccccgccgcactcgccgcctcagccgccctcgacgagttcgcatctctgtccgggatcgccagagctgcgccctctcctaccgctcccccgcgtcggcccaccttccgacgagttcgcctctcggatctccgcctccgatcccagcaccgcgccaccggccgccgccgagacctcgtcctcctcgctatccccccttcctcgtcgtcggcctcctcccccatgcttggctccagccctgtccatctccgcccgccgttgatcccacagccgcgagggcaagcccccaatccatatcctcccaagcggaacccgcagcctccggagccaatgaccaccaatctctcgacctccgaatcatcatccaagactcctctcattggctgtagcgctgctctccaacggattagctgacatgagagactctttttctgctttgcaggtcagatttgatttgtttttcttgctgcttgcaggtttgcagatcgaacatctgcactgaatcttcttttttcgttggcctctaattctcgaacagtttttctgcttgtctgcagttcttggtcataatttttcctcctaaaagaagggattcaagttgaatgccagtaaactgaatccggagcaagtgagcttgttcaaatgactgagcatgacaaggtggacaagctaatgatcactacgtcaatcaacgcttgagagattcctggtgtgctatgtcctgtaattcctgtgaattcattatctcaagatggctttgggtggctttggcttgttacttatggccatgttttttttcagaactatagcttattaacagcttgtggttttgaaagtacccatctgtgtatatcatcgtttttgtggttcaatgtatattacttgttgtaattgcaattgtaaagtctatgtaaaaaacataccggattattcttccgttgccttgtatctgtcattgctggattggagtgtttcgatttgtccatcgtgtgtaatattcagatatataactaatatatttaaatttcatatgaaacaatcaagctgaatggaaaccaaatacctacagcaagaaacatctatggaacgcgatgcacaagcgccggcggtggccggacctcacgatctacttttctttttctttccctgcgctctcctttttgattaatgaggaaacggcgactctgctgttcgatgaagagggatcggcgacgcttgaccataggacgcacaaatgagaaaaaaaaattaagtgccagatttacccctattcggttttagcactttactaatctaccctttaaaataaacggttgagattaattctacttggagtagaatactgcaagtagagggcaacggagcgtctctcatgattcaaacatttataatttgatcttccaatttttcagaaggtaatttgtcatgtctaacacttcagcaactccttaatttccgaatacctattattagcaaggagaaagaagaacagggttacctaacaaggattaaatataatttgaaggacagatctttgcccatctctatatagtaaacagcatgtgtgcattcatgacaacctaaactttagtactgctatataaattggcgtaaagagattccacactgaggattaaaaataattttaaggacagaggtttgtccatctctaaatacttttaaggtaagtttatgacaattcaaagatcaattaattaatttagaccagttccaatgtcgatctatataattggcaagagatatatatgaatatagtaacacctattgctccaaacaaaaatgtgaaactctgaattaaggatattatatatctcttgcccttgactaaatcataggccacgatcagtgagctagctagtgagccagtgagcgtacacgtcgaatcattttttttttataatgaaacaaattttgacctttattttgaagaagctataaccattatgtcggatcgattagtagtgcacgtatatatgctcacctgtcaaatcttgatttggtaagtaacaaaaacacataaacataaattaatatgtcaattagcaactattcgcaataattaacctattggcttagctaggggacagaaagtggtggagctagaaaatttataaatcctggacaagcctaactaaaacggtaaaatcactaccacttatttaatgtttatatgctcatttcactatcaattgagagacacaacaatattctaacaaaaaaaacaattcaatatcatgctaacaatttcactataggctagaaacagcacccattattcctattataaacatacaccaattcatatccatgctaattcattcggtcacgtcctccattactatacacgcaaatcaacaacgctgtttaagccctaattgtatgactactgaaaattcacccttctcaacttgtcctgaagtacacgaatcgatcagattctaaaatacataaataactctcatctctatagctcagcatgcgcagcccgggcaactgcccatgttggccaggtagttaattaatctgttgctggacagacaatcatcatgggcaatctggcagttgacaattaacaatgcccactagcattctactcctaattatatagcctacttgtctctcccattgcggattttgctcaaaagtactccctccgtctaaaaaaaggcaaaccctgagtttccgtgccaacgtttgactgcccgtcttatttgaaatttttttataattagtattttcattgttgttagatgataaaacatgattaatactttatgcgtgacttatctttttaattttttcttaattttttcaaataagacgaacgatcaaatgttgtacacggaaaccatggtttgtctttttttggatggagggagtatgcatctatgagcaagttcaatagtatagtccaccactagctccaatttatctatagccgatctaatagccaattcatacaatagttgcttactatactattaacatatggtcccacctgtcatacacacattacatcttggagtccgtgctgtagctggctacagatctgtagcccgctgctcttctctctcatcttttatctcattaaaatatgtttataactggctagtagcccgctattgtacgtgctctaaaaagactcttcacagtagcaagctagcatagacatcttgtgtcgttcttctccaatcctaggttatacatacctttggttcgtcttcaaggctcttaattggtcgttggttccgcgcgtctttgagacaaagttaggtaaaatttttcacactttgcatccaaattagtttgtttatatagtaatgtgtcggtgatatgggaccgggagtattgcgcccggaggcttgaggcagatggaatcgcccacgtggcctggcaccttcggggacgtcgggcccgagggtgaggtgtccgccctcctcctgatttccccaagggggggtcgggttgctcctgccccggccccgagggacgaggtgccccgaccccctgtggggtttgcactatgtacataggttgggtgaacacggtagggctcacctaaccgcatttattgcggtctggtcaagcgtgtcacgctgcatgcagcgcaatgcagcgcgctcttttatccggtctgtgaccagtcacagaccggtcggatcaacggttaggtggcggctggcagtctgacgcacgcctcgccccgtcctgtcaagacgagagccactaggc

SEQ ID NO: 10636 - DNA, 2046 bp, Oryza sativa
  unsure (1)..(2046): unsure at all n locations
gatctcggtgcgcatgggggtgacgcggacctcgacgccggagtagccgtcctccgcgagctcgcgcgtcagcatctcgttcagctccgcgaagaacaccccatccgccacgaactgcgagccaaaaaaaagggcgcatcaaatctcgaaatccatgggtgacgagatcgagactgctctggaatggataggtctcgatcggagccttaccttgcgcttcttgctgatctgcgtgtgagtcgccattggagtggagagtggaggtgggggaggaggnagncggcggcggaggaggaggaggaggatgaaaccctagacttggatgagagctgtgaggtgggggagcgagtggaatatatagatgggagccggatcggacggtaggggttcgtcgggacctttttcatttcagtccctactttccttctaatttttgacaaagtatagagtcgagcggtcaagccgtcaaggtaataacatagggttaattgaatccatgtcattataaatgtatcggatttaaaaattatcattagtattcatgaaccaggtggattccattgtacttttcaaaaattagaaacatgtcactccgtcatgacttctatcaacacatcttcttcctccttgttctcgaatcttcttgtggacgcaaggagttggatgagactgcacgaagctatagggggttgagcttgagggcggatggctgtagggcaatacattggtggcaatcttgacatctacagatggcttgtcagagatcgcatgcatgcgaagcaaccaagcaaatcttagcaaagagtcaaaactctttctaatatccaactttcggctcaatatgtgcctaagcaaacaagcactataaaaaagacctcaaaatttctaaagaaagtctagcacagatgcgagcgagtctgatctacaaaatcccactcgacctccccgaggacacaggctcagagaaccaccatcgccagatgcgcaaatcgcagtgtgacgccctcagctccatgaccagtgagcttgagccacgttgtgcaccacctccacaaggcaagcgtgatttgagggccaagactgactgcaacaaggaaatgaggaatcttgtgcaccatcttgtccatcttgctcgtcgctgtcctgcttaccacaagccaccaccaacaccccattgttgccgccgctgcctgaccctagaacatgcgaggaggatgtgggtggggggagaagatgaccagtcagccaatgctcatggcccgttggatctgacggaggtattgacagaacgaagtgacatagctataatttcaaaataatgtaatggtatccaccccgatttcgttaatagtaatgacattttattcaaatcaataaaattgtaatggcatgaatccaattaactcaataacataaagttgcttaaggtattttctccaataatctgtgcgccttttttaagaataaactcgaggtcaccactcaacaaagagtagcttaggtaatttctccagtaaaatagttcgaattatatcatcgattcctcaccatctcacgaccaatcgaaatacaccgaatacaaaacctgaaatttcagagtgttacatcatgagaatacagtactacagttttcagctaggtccgtttatgtatccggtgctaaagcttttctcctagttctgtcaatgtgtactacggagtaatatataattaagggaaatcagcctctaggaaatttctaggtccgtcaatgtgcaggaacaattgctcaaaactactccctctgacggagcgtggggctcctcaccgggagaccgcgctggcccccctttgccggttcggccggggaccctgggtgagactctaagctcccaatctgtggaaggttcgcgagacaggaagcacacaagacgccggcgatgtatacaggttcgggccgctgagaagcgtaataccctactcctgtgttttggtggattcgtgtatgaaggaactacaaagtatgagccagcctctccctcgttctgggttcccaatctggaaaag

SEQ ID NO: 10637 - DNA, 656 bp, Oryza sativa
acgagcagcgcgcgcacgccgatcagcaagccgccactggctacttaaagccgtagcctgtagctcagctccaccgcgcataaacctagccagctagcaaccgacaagccaaggcgacggcaatggcgccgacgacgacggcacggcggcggcggagcaggcgccgccgccgcagcatacgaggaaggcggtggggctcgccgcgcacgacgactccggccacctcacacccatccgcatctcgcgcaggtatgaacagccaaccgtataccgctccatgctaagaggatctttgtcgtgctcgatgattgctcgatgattctcccgcgccatggcgccattgatgggagattgggagacatatggagcttttttttttctctccagagtttaagatgatctatcgtgtttgaatttgactgttactctcgtagcaacaatagtttacaggatgtccacatcgaattagtgaaaatcgccgtttggttcatggagttaatagaatctgaagctctcatgagccagcgtcacttgagctttcgatttttgttttccccttccatttccagtcatttccagccttctcatcggatttgtagattgtagttttgcatttgatttccctgcgagcaacggtgctcagcatttgcacatcg

SEQ ID NO: 10638 - DNA, 714 bp, Oryza sativa
cgtggtggggctcggcgggctcggccacgtcgccgtcaagttcgccagggcgttcgggatgagggtgacggtgatcagcacgtcgccggtgaagaggcaggaggccctggagaggctcggcgccgacggcttcatcgtcagcaccaacgccagtgagatgaaggtaattttaaagctagtttgatcaagtcaagagattattaaatgaactttaagaacggattacacgatagtaattacaatctacaactcctgtacaagtagtaaattaataggaccactttggactgagttaagaagagatcaatgaactattcagttctacattaatcgtgtagtcatatggaaggacatcctactgatgcagatgcagtaatatggcacatcacaaacatacaatttcaaatttgacttttacaagttgcgtttgatatgttatttttgttacaaattatagaagtcgaatttgaatttgcatgtttgtggagtgttatattagtagatgtcaatctattttttcaatttttttaatatttttataatcgtttaattaacatgcaataaacgggttaacatccactcaagtggttataatccatctccatcaatttattgatgtgctgcagtgcaactttgcaaggctatgcaagccgaagaaatctttgaatacaactgatgcacctcattgccgacagagcatctgggctgcaggaa

SEQ ID NO: 10639 - DNA, 528 bp, Oryza sativa
gttctaaactgttcctcaactcaaacgtgtgatgaactgtcatacttgttgtatctttgaacatactctaatgcccgtaaagagatagataaatttatgagtttgttgaagaaagtcataaaatttatgaactcataagcactatatactgtattgttacctaattgatatactaattatagactgcatctgccactgtgtgttttcatattggtaacttgctatctgaattttttaagcattttcttcattcttaggtgtatgatggagctgtatacatgcatcagggtgtcaattacttagttgaggaacttgatttgtcatcaaggacagcattctgtaggaaagctgatttgaagtattacacaaaaacacgagactacacagacatcaatgtccttggaggagagtttgtaagtattcaaaaggattgtgcattaacctcatatacattctgcttataatcgtctatcattataatattaatccctgccaaattttattattagcaccatttttttgtttaaa

SEQ ID NO: 10640 - DNA, 645 bp, Oryza sativa
tttaccatgttttcttagctaaacttaccaaaggtgaggccatcaaaatccaagccacactctagccaacaaaatgaaaccatgccacactttttagagtcacttacatgtgggacctagattacaaaagaggaatcttgccacatttgtgggagtcaaccaaacactaacctaacatgatcaaacttgcctaaccttaagtgtgacaaagtgtagcaacttatggctatcattcctataggaatttttcctataaagccttttgaatcaaaggaatgagctctatggaatcttatgaaattcctatggaatgcctcttcccatacaagttttggaggaattttaacaagaggtagaacctcatggaagaaatcctttgagtctttatctctcctcaaattcctgtattttttctgtggtccaattaaacggtcattcctatgtttttcctatgttttgcaatcctcttttttacacttacattcctgtcaaaatcctatatttttcatattcctccgtttttttattcctgtgattcaaaggggcccttagagtggttttgatcctacgtggcagactagtcaatattttttttaaaaaaatggtagtaccctgcgttcacgaaagttggtaggacccgtccat

SEQ ID NO: 10641 - DNA, 621 bp, Oryza sativa
aaggaatacgctgacttgaatgtctgccctgtctgtggggcatcaagatacaaacgagcaaagagtgaaggtgaaggaagtaatgtcaaagaggggaggcccagcaaaggtggtgtggtatctcccaattgcggagcgcatgaagagaatgtttgcgaatatggaacaagctaagctagtgcgctggcatgccgaagaacggaaagtcgatagtatgctgaggcacccagcagattcagtacagtggaggacaatcgataggatttaccaggaattctcaaatgacccaagaaacatgcgtttcgcaatgtgtacggacggcattaatccatttggtgatttgagcagtcgtcacggtacatggccagttctgcttgttaactataaccttcctccctggttatgtttcaaaagaaagtatattattcttgccatgctcatgcaaggaccgagacaacctgccaacgatatcgatgtgttccttgaaccgataatcgatgacttcgaaaggctatggaatgagggcacacgaacatgggacgcatatgcacaagagtatttcaacctccatgtgatgctgttttgtaccatcaatgattatccggcccttggaaactttct

SEQ ID NO: 10642 - DNA, 1231 bp, Oryza sativa
agacgacagggtcatggcgaatttctttcccatgggcctgaagggacaggcgcggggttggctaatgaacctgccgcccgcgtcggtccactcctgggaggatctgtgccagcagttcaccatgaactttcaaggcacctatccacgcccaggtgaagaagcggacttgcacgcagtacagcgaggggatgatgaatcccttcgctcgtacattcagcgtttctgccaagtccgcaatactataccttgcatccctgcacacgcggtgatctacgcgttcagggggggtgtgcggcacaaccgcatgctcgaaaagattgcctccaaagagccccagactaccgcagaactttttcagctcgcggaccgagtggctcgtaaggaggaggcctggacctggaacccctccggttccggtgtggcagcttcggccgcccccggatccgccgctcagacagggcggcgtgacaggaggaggaagaaaaggtcggtccattccggcgacgagggtcacgtcctcgccgtcgagggcgctccgcgggccacccgaaaggggaggcctgcgagcgacaaaaagaaagaggctggtactcccagcagggagcgcccagccagcaagtggtgctccgtccacaacacctccctccacgatctcgcggactgtcgcgcagtcaaaaacttggctgagcgaacgaggaagtgggaggaggacaggaggcaggaacgccgtgagggcaagtccgcggcagttccctccggtaaacggcgaagtgaggccaaacagaaggcccccgccgttgacatcgatgacggtgatgatgacctaggtttccaagaacctggggccaccattgccactgtcgacgggggagcgtgtgctcgcgtttctcgccggagtttcaaggccatgaggcgagagcttctcgccgcggcccctactcatgaggcgacgcgtcgggcgcggtggtcggaggtggccctcacctttgaccagaccgaccacccaccgtgcgttgcccggggagggcagattgcgatggtggtttctcccaccatctgcaatgtgaagttggggcgtgtcctcatagatggaggagcggctctcaacatctttcccccgcggcctttgatgctatcaagaaaaccggggatggtgctccagccgtctcacccgatcatcggtgtgacgccggggcacacatggccgttaggtcacatcgacggggtgcag

SEQ ID NO: 10643 - DNA, 2094 bp, Oryza sativa
catccaggagtatctgtcttgcccgtcacggcatgcccccgtaatgggagggccaagatcatagccacatcctgtagagtgatggtcatctcaccactggggaggtggaagctgtgtgtctcaggcctccatctgtccacaagtgctgtcaacgcaggagcgttgaacactggcattcctctgctcacgaccaaggccaccccgagcaacccggcagcccttaggtacgggatgtacctatcgtcgaacactgggggggcatgagctctgactcggagcggttgaagtacctgcattagcaattgtaaatcaattagttaatataatgtcaaatacacgctaccgatacttatgcacaagtgaatcaatgccgattcataccctccccgcctcgatcgcagccccgcgatgacgggcctcgtagtacgcctccaaggctgggtaagtcggcggttgtccctcctcggccatcctacatgaaaaagtaataaattcaccgttagttaccaatgtgacatatattaaaagaaaatgaatgcgagaacatgagtaggaaaacaaaatatttacctccctaacacttaaattttttttggacttcttcttttttggacgcttaggacacttagttttcttgtgaccctcctggtgacacaacgagcatctattttgcaccggcgcagcatcaagttgaacgcatgaaggtggtttccttccagaaccacccagacctgagtccatttcgttcttgaatcgtttcgatctcctcttccctcttgttttaatcttcaaatttgggtcagcaacaaattcttcaccatcgtacgatggccactgtgtggggtcgaggtatggctcaaagcgacttgcccatgtgttcacaacggctcttgaagagaactgatacggcattcggttgggagattccttatcaattgcatgaatcagataaacgtgtataagatgtgagcaaggcatatggtagagcaatggcctttggcaagaacatgagttcccctcaccttcaactttgaaggctcttgcgccgaatctaacaccaccacgcgttataccacccctctctgtgacctcgcatgtctttttctgcttatcgaaacaccttgcagtgtgtttgttcgccttactttcttgcaccttcatcttactgtcaaccttggtggaccaacgctgccctaactggactcgtttcaaagcttcatcatgtctgttcacaaagtagtcattacacttcatgaacgtaaatgatacgatggccgtcactggaagcttacgaacaccaactagcacgctattgaactgttcagccatgttggttgtcatgtaaccccaccggcggtcatttctatcgtatgcacgagaccacttatctttatccaacaactcatcttcaagccatttacgaggaccttcgggaatacgctgccttagtgcctcaacatccctctcaaatatccacttctcgtcaatctgaccattaatatcttttttaagggggaagagctcttttgtctgatgcttgtccgcaccggccttgtggaaattagcactgaagtgcctcatgtaccaccggtggtgaaccgatggcaatcctggaacaggagtcatcatggcattcattataccagcatgtcgatctgagataatacaaacctccctatgcggcccaaccacaacccgtcggacaagatcgataaaccagcaccagtctcgtgaattctctttctccaccaaggcaaaagctaaaggtacaagttggtcctccgcatcagctgataatgcagtcatcaaggcacccccgtatttcccagttaggaaggttgcatctatagctagtactggcctacaatgtttaaaagcctcaatggaaggaccaaagcaccagaatgcacgcataaaaattttcttggtcactccatcaacgttgacaaccctatcaggatgagtatcgatatggtagaccatactgggattcctctgcttaatggcttgcagcaaagtgggcaaacggacatacgcttcaccccattcaccgtaaatgagcttcatagcctcctctcgtgccctccaagcctt

SEQ ID NO: 10644 - DNA, 758 bp, Oryza sativa
ttgacttctattaagacagaattgtgaccacccctcaattcgacataaaagtaatcatctggattcacatattggcctgctacttctgtcgggaatcaagggttgactccgtacgacgaccaatgaacactcgccgacaaatgttcacttagatcaagcccctcttgtactaactcccttttcatcaccctcgctgcatccacatcatcagtaccgcaatgtctctttgatggtcctgcctcccataaatcatttccaagcaaaggtctcttcttctctccttcaccctccaagtcttctcgtaccaactcactcttacttgcaccccctccacgacgagaataatatgtcacaaaattcttctcaacgtaatgataagaatgagatttgtttagatccaaattttctacggtacgaactaactttgatgcaaacacctctagagatctaaactgagactcttttaccaaatcaaagtaaacttcccattccaactgacctatcacatttaatatatacttatgcccttgaccaacatcgtatctcccataaaaacgaatctccacattatcctcggtccatccaagaacttctttcactcgtgaccttagttcatctagagttgggtgggtgggaaacaaaatagtcttcaatgacatatcctcaaactcaacatgtccaccaacataaggttccaccactctaccaccatagtaaacacgaacaagtctatccatctacaccaaaaaatcaaatgt

SEQ ID NO: 10645 - DNA, 1349 bp, Oryza sativa
tttggccgctagccggagcgccagctcgcgccttgaccgccaaagtcggtttccaaaccgacattgccgccccctataaacccaggcgccctcccttccccttttcccctcccaatcttccctgtttctcgcccgcgccattgccgtccttctcgccgaccgcagccgtcgcgtgtgtgccggaggagccggtgcgcactaggacgcggaagggaacttcggccgcgccctctccttcctcttctccggcccgaggccggagagattactcccgcgccatcggcctctcgtcacagcgccccgacccgcacggtagtgcccctctccgttcttcctcctcgctccatctcccccttagtcttcggtggtagcacgagtagactccccgtagctagccggcgccgccccaaccattgccgtcgctcgccgtgtgctcgccaccgtcgccgctcgagctccgtagcacccgcacgtcgccagcctcgatcggcgtagctccgccaatccgacgctagcatcggattcccgtggccgcgtggatgctctcaccgccgggaatcggcccctcgtggcctcgtcgccgtttccctcttccctccccgccgggttgtcgccgccgcgattcgccgccgtcaagcttcctccggcgaatccgagccgttggctcgtctcccctcgtctcgtgcaaccacccggcgtgctcgctttcgccggtatcgccgtggttcgctccgccgctcgccgctgttgtccgccgtccgttccggccggcgtcgtcgtctacctcccgccagcccacgtggcagccacgtaggcgccacgtcggcgccagctcagccgaggtcgggacgggccgaccccggtcagcccctcccgtgcgcgcgttccaccgcgagccgtgaggctgcgcgtgggcccgccgcatccgttcctccgcagaccgcgcgcgtgcaccacgtccctcccccgcccgcgcgcgtgcgccgcgtgctccctccgcacggtgagccgagccgctgacaagcgggtcccacccgggaccgcgcacggtgagcccggtccaccggccctctctctcctcccctcccgcacgcgcgcacttgggccgccttgggccggccggcccatttagctcggccggtccgctccttttcccttgggccgcgccctaagccgcccgaggaaaagtctataatccctccctctttccttttcttttctttttcttttccaaaaaggatttaattaaatccttttcctttagaccaaaaatccaataatcttagaaattcaatatcttcccaaccgtaaatccgtttgactccgttcaacttccaaaattcctcaaa

SEQ ID NO: 10646 - DNA, 2543 bp, Oryza sativa
ttgcaaccacctgaagcgacttgaattgggagcccaacactatatccacatatgtgatccactccaactccccattcaaatctaccatgtacttgtgtgaaatgggtcctgctccaacatcatatctaccttgtatagctatagactgattgctccaccccatcacatcctttgtatgacaaactaactcctcaaaactaggtcctccaccaaatatacggtgtttaacactcatcccctcgaaattgttaccactgttactttgctctaccacccaaccaccatattgcaatcgacactaatctatccatctacaacattaaccgacatattagcatattcgcattctttaaaaacttgaatttgcaataaaaaaaaaactaacctacaactatgtcccccaaccaaattgcccataaatatctaaacatacgcaaacttccatttcgaaccacccatcctaaattcgaactctcgcattgtgacgaaaattaaacaaaaaagaagtgttctttactaatttgggggaaaaattagggttcttccctaagtgccgaaaatcttcactaaaaattagggttctatgagcatctaaccattacatcaccaacaacaactacaaccacagagtagagaaccaactaatttgggaaaataaccccaaatcacgattctagggttcatccatcaatgagcaaatccaagcaaaaaaatgcgaaatgacgagaggattctgaggagaataccttgccactatgtcctccaataatttcccctccaaaatgcgacgatttagtggagattttttcgattttttggaggggaggagagagatggttcggcgccgccgcgcctcagtcgagagccactgaggaagaaagaaggcccgggctgctgggcgcggctcggccaagggtgataggacctccgcgccagacccgatggcgctgaggtcccgaagctcagcgccaagtcggtcggcgctgacattgcgccgttccgtccatcctccccttagggccgtcaagtactcagcgccgatgcggttggcgctgagttgttcaacctcagcgccgtcggccttggcgctgaggtcggggttcagatctggtgatagtttttgccagggaccaaatttgcaaatagtttttaaaaggggccaaattgtcaaattttcggcagtgatcaatgtacaacttgccctatgggattgtgatgactatatgtatggtgatgcatgtttactgaccagcgtgacgatctccatgcatccccgaacttgaagcagagtactagctatatgtgaaatcactgtcatgattattatttgtgatgaataattggctgtgcgaatgatttattcaaagaattggtttgagagtttgtgtgaatgttggtgtgagtgcgtgtgactaatgtgggtcaggttgtgatatctgtgcccaggaacggttgttttgtctgattgtgtgcaggtgacttgaggtcggccttggtcaatggtgaggaccgggactatgctcagggaggagcagaggtctagtgtggtcgggataccatatgagaaggtgactagagtcaggattcttggaggtcaacttcggtcaacggtggagatcgggactagactcagggaggagttgaggtccagacggttaaggataccggatgacgaagttggatacgagatggcacacggtggatggatatcgtgtgggagagatcttcgcaacgggcttcacgaggtgtgcgtgcaagcgtcggtgttcgcgaaggaaattgtgtgataatatttggttactcgtggtactgtagcatggtgcatatgcatgctgttgcatatgcatgtgtgtgtttgcatgtacggtgctgtacatgtgcagcttgctgcttgctggttggctcggcctgggaggacaagccgcaggagcgagttagctgggacgagcgtaggagaccgagtcgggctcggttgacggcgctgagatttgctatatggctgggattctatgtggattgaattccggtttagatgagtttggaaattaaggtttgagtcctattgtgaataggagtcctacgtctactttgagtaggagggtttttcatgtataaatagaggaggagcgtgaggcttcccgcactacgccagatcctcacacctctgacgggatatctgtgacgggcaaacgatttggtcactggtgaccatcacctttgacgggtcatacgggatgccgtcatcggtgaggcatccggccgcggcccgtcataggtatcccctcacctgtgacgggccgaaaggaaaactcgtcacaggtgagtcagtgacgagttttgcttccaacccgtcactggtatcctctcacctgtgacgggccgaggcattataaaacgtcacaggtggtgggcggcttttttttctggcccgtcacaggtgaggggataccagtgacgggcaactggtcatacctttgacgggcttttttaatctaaccctgtttgaggtgtgtttggtctataaatacccccaacccgccaac

SEQ ID NO: 10647 - DNA, 534 bp, Oryza sativa
agcataggtgattgttttaagtccgttgagctgccagaaaccttgttttgttgatacatcatctcactatcaggtgataagtgataactgattgctcacaattagtagaactcatcagtgggacattttcttgattcagcactatcctaggtgatataataaagtggcgtcagtcgcatgtttggtggcatctttcttcacaaactgatcactatttagtttcattataatgtgttatttggttctaatcattatgtctcgtgaatgcagaaagcacttggggccaatatttcagaaatgcagaactagagaaaatgttgaaccaagatttgtctcggctctaccctgaattgggaaatttcttccaaacaaccatatgtcagtccatgcttggacgtatactgttagtttggagccttaggtacccagagctcggttacaaacaaggtaagccattgatgtgtacacttctcatgtgacctaacaatcacagattccatctaaagacacaatcttgcaatatgatgttcctaa

SEQ ID NO: 10648 - DNA, 891 bp, Oryza sativa
  unsure (1)..(891): unsure at all n locations
gcaggttcattagctaacaccgggcctgtccctacagggccatggtaaagaaattcgccatgaccctgttgtctcccccagcggcctcgatcccggtcgtatagacctgaagaaactcggtggggttgacgctcccatcatacttctcggtgatggtgggccggaaccttgggggccagcgcacattccgaagactcgccacaaaggctctacagccgacaccaccaaccgggggcacggagggctggtcctcacgtccatgtcgaggtgacaccctggacgaagaggcaccctccgttgcgcggggagcacgccgatcactacgtcggcgctcgatgtcgaggcgggcatccggctcttcatgctgatcctcccgagtcggaggcgccgacgagggagtggtagccgaatggcgtgcagcagccgccgctcgccgcgccctccgccttgatgacacagagccggaggtggcggcgccggaggtcctggtggtggcggaccgtccaccagcacccaggcgctgctgtgccgtcatgaccaagttggccacgtcgtccagccatcgctgggctggagactccgggtcagggacgacgggcgggtgacgtaggagcgcgccagcagcctgaagcgctccctggggcgtgctgccgtcaccgtagacgaggaggcgacgctccccgtctcgccgctctcctgcatcacctgcgactggtgatgctgtgggtttttcaaccctctcgagcgccttcccccgcttaggacttttgcgcggaggaggtggnggagtaccagctcgatggcgcgggtttggctccccgtcgtcgccgctcacacttcgagagaagtcgtgcgcctttgcttgctcggccattangctggacaagggaa

SEQ ID NO: 10649 - DNA, 7031 bp, Oryza sativa
aggtaggtgtggcctgtcccatcgaagtgtcattcggggggcaaccataccaacctccgtccataaagagaagaaaagtccagtttggaagggagagggtacatgtggtatccccttaagatataaaaggaggaccatgcccacaaagagaggggactggattttcccgggagaggagagggctggttgatattttgtaacttgctcttacacagatccacaaaaaacacaggagtagggtattacgcttcccagcggcccgaacctgtatacatcgtccgtgtctcgcgtttcttcctggcacgcgatctttccacatacagagagagcttgagatctcaccctaagcccccggccgaactggcaaaggggggcctgcgcggtctcccggtgaggagccacgagctccgtcataatgcctcatagagtcaaagcatgaactaatttctccatattttcatatatggaagcatattgcttgtgcgttaatatacagtacatgttgtacaaacgttaaattgtaaatgttgtgtatacttaaatgtacataaaaatattttaaaaaaaatgtgagatgtgcaacatgcatgtacaacacgtaaaaatgtaactcaaaattatcatatgcggcttgttttgacttagtttctacttatttttaagtctagctattatcttactcccccttagtctcaaaataactttacttttagcctctacctcgtctcaaaataagtttacctttatcaacttacctatcatgctctaatccacaatttgatgaattttttttactccatcaatatcttttacctatccttacctacctatctacctatccacgcatatatactagtttcctattagtgagcgacactttggtgtttttttcttctacattgttttgaacgtccaagtctaaacttaaagttaaagttattttgaaatggaaggaccgaaagactattatcttattaaagtgtaattgcaaagaaataagcttttatgtttgctctcaaattacatattaatatgagaaaaaaaatctaaaccgttaattatagggtggatctaaaatatagctgtgtggatttattggatgagctcttcatggaaaacaaactccatatctccaatctatattcaattcaaataaaaaactcaaacgatgccatacacattacataaacattttcacaccacccacaattatatatgcatattactaattattatttatctaattacattacttagtttgttctactgaaggttaattatataattactcaataaattaacaagcaaaacaagggctaaaccatcatttctgtgaccatagagccaaagcaacacaactctatagcagaccttatctttcgtggataataaactactacgcaggatccgctcacctctaacggatcatcagtgactgttatgaagttatctatgataaatagtctatgaagttattgttcggttttgtgcatatatatagtttttatatctaataaggcttgttcaggctaaaaaaattcatacacacgtcactgtttgaatgctttccatctcgagagcaaatagatgtttcttgctttatatatattgacattatttttaaagatacttcctctcaccctaaatatttgacgcaattgattttttaaaatatgtttaaccgtttgtcttattcaaaaaatttaactaattattaatttttttcctatcattcaattcattgttaaatatacttttatgtatacatatagttttacatattttacacaagtttttgaataagacgaacggtcaaacatgttttaaaaaagtcaacggcgttaaatatttagagacggagggagtaaaaaaaaactagcacaaaatttctaacatcttttgcatctctccaagctaggatagcgagcatcatcacccactcctcgcacccagaacaccaattacgaaagatgaagctcaaatatctatttacttgcgggaaactattctaatccctcgaggggatgttttctcgtttgctcaaaaaccatctaaacagttatgaaaaattctagaaaaatttgacaacattcatacaacacatatatataactccacaaaatcttaagtccaaactcaactcacacgtcgagatataaaaaagacaaattcagcgtatgaatagtagcgaactgtttatatataaatttgtcttttttgtttctcgatgtgtagatcgaatttgaacatgaattttggtggactagtaggtatcattatactctacatttttaatttttttcagaatttttcacaactatttgcatcgaatttagaagaaaaagatgtcccctcaatccactcccacttacttgcaacttatgcaaccatcccggtgctatcagttgctcacaataatcacctatataaacacacacacacatcttactatagcgcatttaggatgtccgtaatatcattgacaattaaattcaccgccagttgccgggcgaacatgatcagaaacctcacgatgggactgctaccgccggcccagccgccgccgccaccggtggcaggccaacccctcgcaccagctggagcaccgccggcgccggccggcgaaacgcagccgatgtggagcatgaacagacataggccgcaccggtaatgccagatggagcagtcccggtggcacgccgcgcactccccgcgcgccgggaccaagttgaggacgtgcccgtggcacccggcggccgggtggatggtcatcggcagcagcgtgcacagcgggtgcacgtcgaacgcgcactccgcgcagcggtacacgaggcggccgggctggatccgcccctggcacaggtcgcaccacccggggttcgccgaggccacaaccgcggttagcgggtgccgcgggtgcgcgaagaagccgtggatcgtgtcccgggcgaagcggtcggcgcaagcctcgtggatggtgaagtcgctacagtggtggtggttgcagcggtagccgacgccggtgatgggtagctcgcagatgttgcaggcacggtggctgatctgatcccgctggttgtatgtgcacctctgaagctggtgctgtggatgtgcaacgtgccagcggttttccatggccagcaatcactatagcttgatcgctctcgctcgtatagctcgtgcggtgtactgtttttacgtacgtgtgcactgctcttaatttgtgttgcgctttgagttccgggtgccaatatatatacacagagagaagagcacgcttacatacatagacataagttaattaacttgttcttttttttatgttgcatttgaccttatgtttcatataattaatctatcttgttaattatttttcatatatttttaataactatttaaatatcatgtaagaaataaataaaggatatccccagatgaaaatacttttcttagggcctgtttagtagagctccaactcctaaatttagctacaggagttgggtctggagtggagttgtggagctgtgtttattttgtgagagagctccgtccaactctgctcccattttaggtggagctgaaactgtttagctgagctccaactctagaagagatggagcgagagctggatctgtactaaacagacccttacatacacgcatgatgcatccttggagggggccagacagtggatttgcaagagcttttacaaggtcagtcaactatgggttcacgcggttaattcgggtaataagtacagagaggaagatgaagatggagattaagagattaagtgtttcacagaaaaacgaggtggtaataacatgtgattaattaggttttaattattacaaacttgaaaaatggattaatctaatattttagaacaacttttatatagaaagttttcgcacgaaatgtaccgtttaaccgtttgaaaagcgtgtcatgagtatccaaattttcatccacttttacagaagaaacgaacgggagactcggttgtttcgctccggtctgattcagtttcgatcgggtatgtacaagagatgttgaaatgttaggaaatgtagtatatatacattgatttgaacctgtagtaaatagtactaaatacgtaccgaacacgacatggaatgcaacagcagcaaactgtgacatgtggaattttctcatcgaaaattcagaaaatttacaacatgctggtactctagtcgaatttgagaacttaaggtatcgtccttatagctgaactctggctagtcaaaaattctgaaaatttacttaactacatgcgtcgtgcgaaaaagttctacatattttccctatcccaaaatataataacttatagcatttaaaattgttgtaaaatataacaactttcccaccatattcaaacatccatatcgtttcgtttatgattatacttgtacatatggcttattagcaaaacaaataataatttgtgcttacaattttcatatactttcccttagcaatcaaaattaaatgttataatataaactaagataaaagaaaccacaaaattaattaagttttagtatttaaattttgcttataagtataagtatatataagcgaaacgatggggctgaatgtcttcctctacttattattctctatcaatcacaatattgtctcatttaattccacattgttttcttgatactcgtatctaaccttgcaaatttttacatttttggacgtagtcggtataatttttttttaaaaaaatcaaataaatctatttataagtttgtaatcgattatattcaactaatcactcgctaagtcactaatgacgtactatctcgttttgagtgtagcacaaataactcaggctagctggtacccgctgcttcgggcctgtttggcatagctccagctccagctccacctctccaggagctggagctcagctaaacagtttcagctctaccaataatgggaatggagctgggtggagctctctcacaaaataaactagagttgtggaactgggtttagacagctccacaactccgctctagactcaactcctggagctaaattaggagttggagctgtaccaaacaggcccttctaaccggccggctatgttcgatcctccataatctattttcatgattttcgtaagtatatatttctcaaactgtaaaacagtgtgtttttaaaaatgaattctacataaaaattacttttaaaaattatattaaattatttttaaagtttttttctatagctaaaacgtagttaatgggtcatcacatcatctttcgtgccgaagaggaaagatactaccacgattcaatcgcagtctaagacttacttcctccatcccataaaaccaatcctaatatgggatatgacatattctagttctataaataagagtacgggatgtaacggagagagtacaagtcaggtcatatctcatatctcatattaggtttgttttttatgggacggaagaaataaaagtcaggtcaagttaactctgattttaatgccaatcggctactccaagagataatgaattaattagaagtaatcttgcagtccgtgttgcaccgctacttttctctcttctcttttatcttcttaattaattaaaatatgttggtttatagtctgctattgtatatgctcttagcgggtgctgcgggtgcgcgaagaacccgtggatcgtgtcccgggcgaagcggtcggcgcaagcctcgtggatggcgaagtcgctgcagtggtggtggactggtggttgcagcggtagccgacgccggtgacgggcgcaataattcgcagatgtggcaggcacggtggctttcctactggttgtacgcaggtgtcctccgaagctagctagctggtgacgtgaggatgtgcatggtgccatcggttttacatggtcacttggtcagcaagcaatcacacgttgcactgtttttacgtacgtgcctctgctagctctccgtgttgcacttgtacgcgtacacggccgcatcgttggagggggcagggcgcggtggactggctaggtcaagtcgactctgggatagctggtgggagttcgatcacacggttctggtaaagtaatacagcgatggaacgacgaagacttgcattatggctgtttcgctccgacctgacagtttcaatcgggtttgtacaagtggatgttgaaatgttggcacatatacattgatttgaacgtgacctagcaagtccatggaacggttccattcgcggtggacttgctagggtctaaacacgacatggaacggtagctgcagcagcaacgacgtctgtgacatgcatgtgttgtagattactcctacatgcattgatgcttatgcattgtctgtcctcttccaagtggccggacttaaaaaggctagcttacaagtcaggtcaagtcaactcggagcaagtgtagtactccctccatcctaaaatataaatatttctggacttcgacacgatcttcaagatattttttttaccaacaatatctatagaaataaaatgttttaaataaaaagagttgcatattatgatagtttgtttaatggtaaatctagtaacgtcaattttacatggttgacctttttattttttatattgatagtcaaagttaaaaaatctttgacttaacactatgctaaaaatgcttatattctgggacggagggaatgaaaactggagcagtactacggtctggcatgattttaatggcaaccgcccaatcggctactgcaagacaacaataatatggtatatggaaaggtactcgcttcgtcttaaaatatgatttggttagatgtgacataatcctattactacgatattaagatttatagtaccaacatgtgtccaatctaaccaaatcccttatattttgaaaagcaattttgtcatccaacattgttaattaccttgagatgccacaaattattggtacctcgaggtactttctagtgtaaaatttggtacctagtaacttcatgttaggg

SEQ ID NO: 10650 - DNA, 5002 bp, Oryza sativa
tgtcatttgtcagaccaacccaacctttacctcctgaagtaagaggagtttcgctttgataccttatgctaaagctccatacacttatctgttgagatccctctccagaagcattcacgtactacatctgcaattatgcattgtctgtctgtctctacgataaaccttgacactccggacttccttggcaagttcaattgctctcgtcaagggacacgatgattttgctgacatgatctgtaaaagaagcaaagtcgtatcagtttgatgatcattaaggaatgaaaacaaaagtacaaattcaaatgcctgtcagcatcacctctttctttccgactaactggtgtttgtctgcaactcggtctgacgctttgctttgtcatgcattgcgagtagttcccttttcttctgttctcatccaaagaatgatcaaaattacacgatgctccaaaaataaatatggtgcagcttgttggaaagatataagtatgctttaagctaagccatcattcacagtaaaagtagatcatttgcatttggagctgcagtttaggattttagactatggtactacaaagactgaggcaaaatccaaacagcacaagtgttattcacatctactaattactgtacagtttctacttcgctatgagcctatgattgctgtgcaatgatgacttacaactagccagaatatcagatcaaactagttggtatctgcttctcgaatataacgaccaatagccagaacaattttcaccaattggatatcgaaaggctaattcgctaattctaaagcagcatttatcacgggaacacatagattaaaatataattgctggcttccaaaacaaaagatctgatcctctttatagtagccatataccgagcaatcgcagtgtggatgtgatcaaggtactcatcccagtctgaatcatcagccatagtgataccaagtcgctcaacctcttcatcggtgtagtccgctaattcggtaggggcagctaaagggcttcgcattccgcgcttgatgtttaactcgttgatgcccttcatagccttcttgaaattctcataccgatgagccttctctttcttggttatgtatatccggccatgctccttcatccagtcttcgaattttgccttcatggctggctcatccaccgcgttgttgccatcctcgtctgtgtcggcggcatcagcatcgacgatggcctcctccaccttgtcggaacatttctggtcatagtttggtttccccccgttcatctgaacgcggaggtaaccgtagtactcaggataggcgaaggcgccatctttccttgtgaaccttgccatgacggatggctcgatcacgtccctccactttacggtctcctcctccttcctggtatactcccaagctgccacaggtacaaacaggtagggaacgaaacaaatcagtgtattgaatagtaggctaagacatttaacggtaacctctctcaaacagtttgttggcggatggcatgagtcccttcgaccgaatctgccgaaacccatggcgaagaccacgagccaaggatgatgcgaggcgaagggtcgcacgagtgcacgccgaagaaggacgacttcgccatgccgaagaaggacgacttcgccaggaccggttcgcgccggcatccagcccagagaaggacggcttcgccaggtccagttcgcccccgcgagggccgaagtagccttctcggcccaccaagcttagagaccatagggacggcgatcgcccgatggcccatcaagagcccatgagcccccctttacgttatgtaaccctgtaaaagtcccctttcataagggcaactatgtaaattcctcagtacaacctagaccctagaagtaaaaatctgtaacggggctatcaatagccccctagggccatgtaatacaggggagaaaattcaagaaatcaatatacttcgtttctttccaaccactgttaagtaaccacgtctttcgacgtatgcggttgtcgtttcgataacagctggcgccgaccgtggggacctccgagcgaaaccactgagagcgaatgccaccgaagaaggtcgtgaaggagaaggttacaaggcgaaaggaaagcgacgccggggcggacatggccgccgaagaaggagcggaaccttcggcatcaatcgccgaagtgggaggagccccgtccgcttcggcaccggcaccgtctgcttcggcgctgatcacagcattgctgccttcggcccctgccacctctgagcaggcgccaagggtggatgaagtggcgaaggcggctgcagcggcaagggcgcttcagaccagggcggagatcctttcggcaggacagctgctggtgccccctgccgctccgtcgcagccaacagtggcccaagccgcactccctgccgtgcaagttcaagtcaactccgaccctgaaacacaagccgaagccgatatggaaactattaggcagaacatggcacgactccaagacatgcttcgccaaatgcaagaacagcaacaagcgtacgaggcggcgaggcggtccagggtcccttcggcaccaatcctccaatattcggcagggtatgtcccgcctcaagtctgtccacaagtgcagtcccagcccgttccgccgcaagtctcacaggcatcggtgcacttcgccgggcagccggcagccgcagcagtgcaccaggccccctatggacaagctcagcagatcgcggcccaagtgtagcctcaaccacttggccaggtgtcgcaaaccgtagcggaaggggcttcggctctgcaggcgcaattccaagctttccttcagcaactcaatcagccccacaacatttcgagtacagctccctcgactcgtccagaggggagtacaggtcaaggtgcacctagttggttgccgccgaaccagccgaatctgggggcttcgccatggagtcagacacctcagtacgacttcgtcaatgccgcccaggcgcaaactgttcggccgcaaggaccgacaccaggctttggaacaagccaagcaccagcccaagtcgccatgacatggtcgcagccagttttcgacccatccatggcgacccagcaagtattaccaatcgcaaccgggcagccgagcaccatggctcaaactcacgcgcaagccgtaatttcacctttcgccacgccgtacccgcagcaaggtgcagcaaacagagcggggggcgagaaggggctgccgctgagtgggggaattaagaaccgcccaattccaccccagttcaaattcccacccgtcccacgctactcgggcgaaactgacccgaaggagttcctatccatctatgagtccgcgatcgaggcggctcatggcgacgaaaataccaaggcaaaggtaattcacctcgctctggacggcatcgcccgttcttggtatttcaatctgccagccaatagcatttactcatgggagcaattgcgcgatgtttttgttcttaactttcgaggcacttatgaggagccgaagacgcagcagcatctgctcggcattcgccaaaggccgggagaatcgataagagaatacatgcgtcgcttctcgcaagcccggtgtcaagttcaagacataactgaggcgttagtcataaatgctgcttcggccggtttgctcgaaggcgaactcacaaggaaaatcgccaataaggaaccacaaacacttgagcatttgcttcgcatcattgacggttttgcaaggggtgaagaggattccaagcgacggcaagccatacaagctgagtacgataaagcttctattgccgccgcccaagctcaagcacaagttcaagttgccgaaccacctcccctcgcggttagtcagcctcaaacggcgatccaagggcagccgccaagacaaggtcaagctcccataacctggaaaaagttcaggaccgaccgcgcgggcaaggctgtgatggccgtcgaagaagtgcaagccctccgcaaggagttcgacgcccagcaagcaagcaaccatcagccggtccgtaagaaggtccgaaaagacctttactgcgctttccatggacgctcttcgcataccacagagcaatgccgaaacatcaggcaacgtggcaacacgcaagatactagaccacagcaaggagcaaccgtcgaagcacctcgtgaagcagcccaagaacaacccccggtcgaacaacgtcaagatgcacagcgaagagtaatccaagtgattacgagggccgacccgctcggccatttgtccaaaaggcagaaaaagatgcagatccgagcggtccacagcatcacttcgacgggggagggggcgccgcagtatatgaaccagccaatttctttcgggccagaagacgccgaaggagtcatgttcccacatcaagatccactggtaatatcagctgagatagccggctttgaagtccgacgaatcctgttcgacggagggagttcggctgatgtcatcttcgccgaggcgtatgctaagatggggttgcccacccaggctcttacaccagcaccaacgtcactccgggggttcggcggagaggcagttcaagttctcggccaggcacttctgctgatagctttcggctcgggagaaaacagacgcgaagagcaagtactgttcgatgtcgtcgacatcccgtacaactacaatgccatcctcggccgtgcgaccctgaacaagttcgaagccatttcccaccacaactatctcaaactcaagatgcccggcccagcgggagtgatagtggtcaaggggcttcagccttcgcctgcgtcgaaaggcgatcaagccgtagtcaacagggccatgcacaatgtgaagccgaactccacagccggccaaaacacgcgccaaaacccacacctcacgcccagatagtaaaagtgcaggttgacgataaagaccccacaaagctcgtctcgctgggagacggcatgggcaaacacgaagctgaga

SEQ ID NO: 10651 - DNA, 841 bp, Oryza sativa
  unsure (1)..(841): unsure at all n locations
atatgacataaatggatacacctttcacacggtaaaacaagacagcaaatgcaccatgcagaacagtgggttacgcatcgaggctgctagtgacggtggtcgtcgtgatcaatactatggtagagttgagcaaatattggagctagattacttgaagttcaaagtcccgttgtttcgttgtcgatgggtcgatcttcgcaatgtaaaagttgacaatgaaggtttcaccactgtcaacttggctaacaacgcgtacaaggatgaaccgttcgttctcgctaaacaagttgttcaagtgttctacatagttgacccgtgtaacaagaaactacatgttgttcgccaagagaaaaggagaattgttggattgcacaatattgcagacaaggatgattaccacccagaccgtccacggataagggaatgaaatacctctagacaggaggaagaagagatgacgtcaatatgcacgcgcgacctgaggaggattatttntgtatttatgacgtagttatgctacatgcctgtatctatatgactctgatatgttcgcaatgatcaatagtatattccttatgaaatagtcaaataaaataattaagtgaagcacccactagaagtgaaataaaataattaagcaagtataaccattggaaataaaataataaaattagtaaaataatgtagtgcaattactactgttagtgaaataaaataattaagtataacaaaatatgtagtgtatgtggaaatatgttaaagaaaataaaagaactaagtgaaataaaataaaataaaattgttgtaggcaaactcatctgtgacgggctctaactgtggg

SEQ ID NO: 10652 - DNA, 1942 bp, Oryza sativa
atttagttgataatattttcatttgaagtcatttagggtgttaaatatatgttaaatgattcagacaagcatagacaaaataataacattgggttagtagtcaatatgtgttaagtaggtgagttggtaagggagctctatatggaggttgaggtcttaagttcgaatctcacttgtagcatacaagttatattgtgtgaaaaattgtgaatttgtaggtagtgatgtgtaaccatgtataggatggctagtaaaattcaaaatatttttttgaggttttttgttgcgtttaaaattcaaaaattgtatttcttgctttgtcatcagtgacgggtcgtaagttacaacccgtcagagatgagtcatcagtgacggtcaggtagttacgacacgtcactgatgactcatctgtaacgggtgacaagttttaacccgtcagagatgacttatataccggtcagagatgggttatctgtgacgggtgtttcatccatcacaggtgattttgtcatcagtgaccactaatcactgaccaagaccaaacccgtcaaaggtgagggtttgggtccgtcagagatgacctggtccggcgtagtgcgattcgatgggcatatacggttgacttgacttagcctataccgcttgtggatcgaacaatgggttactacacattattggagaagaagaaagttcaacggaattgaaacgacaggtgatcttacacacatacatagatgagccaaacaggcctggtgatcatcgacgtggcaattaatcgaggacagcttcaaggacgtcgagcaccggcgatgccagcccgcctgttgctaggttaatcgcgaccatgaagcttttcttgacgagaaacttggtgataccagagctgcagctccgccgaacgatggcaatgctctgagcatcactggtagttcggatggcagcgttgctggtgcaaggctctttttagttcccaaaacaaaaaattccatgctgtcacatcgaatgtttagacacatgcatggagtattaaatgtagaaaaaaaatcaattacgcaaattgtatataaattatgaggcggatcttttaagtctaattgtgtcataatttgacaatgtgatgttaaagtaaacatttgctaatgatggattaattaggcttaataaattcgtctcgcagtttttttacgaaatctgtaatttattttgttattacactatgtttaatactttaaatattcaaatgtgtgtccgtatatccactaaatctaaaaaaatttcctgaactaaacaaggccttactccgctaggcccgctaccctgaccgacaccacttggcgcgccagagacgcaacggatatgtagcttaaacagacaaaagccacactggtagtaccaaaggtccaaatcttcacggcaggcggagcagcggccccatgaagggaccatgtggatatcatgctgctggtgaagcgggctacggatcgtttgcgggagcaaaatgcagagagggtgcacgtcgaaggcgcactggatgcagcggtacacgaagtttccccgggggcaattctccctgcaaaggtcgcacgaccacgtggtgcttccatcgggtatggagctcagagtgagggtatgccacggatgggcgaagaaggagatggtcttcttgaagtaatcggcgcaggcctgatggatgtcgaagtcgcaggcgttgcagcggtagccgacgaggccggagagcttggctcggcagatgtcgcagacatggcgcgaggtgctgtcataccgggtcttgagaagcaggtgctgtggatgagcgaagtgtgttatgtggccatcagttgccatgtcttcggctacgctcagaacaccccaatctctctcttggcctagtttttggctacagtatttctatagatcgatcagactactccacggttagtgt

SEQ ID NO: 10653 - DNA, 3208 bp, Oryza sativa
ccacctgggcgctgaatccatctagcaccgcggtgttggcggcggccaaggcttgcagaaggggctcggcactcagcggggcggcagaagacgaggagaagagccgccttggagaaaatgcgacgcggctcggcccgccagaagacgcactgagcttggggatgtcccccggacccgtttggtcctgggcgtcgcccgagggagcgggcccaggcgatccgcccgcggcctcgtcgcgagccgtcccggaggctgtcgcctgagcgtcgcccgagggagtaggcccaagcgacgcgccagcagctttgtcgtgggctgcctcgaaagacgccatcgcctcagtttggcgggctcgggcggcctcctcccgagcggtttcctcggcttggcggactcgggcggcctcctcccgagcggcttcctcggcttggcgggcccgggcggcctcctcccgagcggcttcctcggcttggtgggcccgggcggcctcttcccgagcggtatcctcagcctggcgagcccgggcggtttcccgggcggcctcttcagcttcccgaaggcgatctgcggcctctcgccggtcagattctcgcctccgttcctctgcggccgccggatcttcggcttcggattggccggacttgggatggcgggaggaacgcgacgggacatcactgaagcagaaagaaaaaccagaaggcaaacaggatgggtaagaagaaacttgcttttggaatagaagaaaagacggtcgcaatgagcatgggacgaacctgcgagggggtcggttaaatgaccaccttggaggggaaattaggtttccccgggatggttctgtctcccccatcttgcgcagccgcttcttcttgcgctccccctcgggctgcgaggttggcgcggccccctccgggcgcctgctgctggcacgcaccgccccgccccctcggggaggagatgggggaggtgttcctcccagtttcctcttcccccgggcgtcggtagggcggttgctccccgagcccccgacgcggggcccagaagcacggccccctcctggggttgattcttcctggtggctcccgccggcgccgtcgtggcccttaggagccacctcctctgaggccccgacccccatcatgatggtcagaatggaggcgcggtctggatcgcagcagagggggaggagtccttgaggaataagagacgcctccacggagctgagattcagcaccctttggaccacgatcttgaagtcatcgggagcccaatcccatctgactccccggtgggtcctcatgtagtcctcggacccggtgtactcccatgcgctccgggcgcgccgctgaagcggcgcaatccggcgacggaggtagtcgccgtacaccatggcccctgtgagcccctgagatcgcaggcccgccaggcggtcgaggacggcgtcatagtcatcccccagatctactggcgcccgccagctggagaccggagccgggggctggcttgggagtcggaggcgcgcttcgttggcaaggggggtgtagaaccagtcgctcttccaatcgtcccacttcttgcggagggcgcaggggatgtagcggttcaacaccggcccccgcggctggaagtagcaaccaccgaccaccgacggcggcgacaccgactgcacggtgaagaaccaccggaacagccgaagagatgggcgcaccccaatgaacatctcgcacaggtgcgcgaagatggccaaagtcatcactgcgttgggggtgaggtgcgccatctggagatcgtagaactccagaacatccataaagaaagaagaaaaaggaggaaccaacccggccattgcgaaggggaggaagaagatggaccgccccgggtaatctggtgctgggcgcgcctcgcccagcatcactatctcccggccggtggcagattccggcatgaagcggcgcggcagcccagcctgcctctcgctcacaatgcgggaaggtggtagtacgctaccgtcgagcagagcggagccccgtgccatgtcgtcggagaaagagagggttgagaacgagcgtgtgtggcgaaggtgaggcgcagcaaagagagagtttagggcgcaaacggcgaaggaaaggggaatagtggcgaaaggaagggagcaagtcctttcctcgatggctttatacccttgccatcgctgagtccggctcctcgtttctcgtgcccactatctcgccccctcgttactcgctatctcgctccctcgtttctcgcgcccacgcttccactaattccattcgcccgcttgcggcgcatgaggtggatatgcggttgtggcagtcgagatagatcgtatcgtgtgcgcgttaattacgctcgccgaccgaagcgacgttaccatgtctccagacgaaacgaatctgcacgcccagattcgagcgctgctcaagtgatgtggcagtcttgaagagaccgcccatgactgacggccaagacaccgttaccgatatgcgtggtttgagaccgttgggtttctgcccaatcacggagaccggtcccacctgtcaccaggctttatgagtggcgtcatgcccgaccgcttcccttgagaaggatgatcgccctgacataacgccgggggctactgtcggtgatatgggaccgggagtattgcgcccggaggcttgaggcagatggaatcgcccacgtggcctggcaccttcggggacgtcgggcccgagggtgaggtgtccgccctcctcctgatttccccaagggggggtcgggttgctcctgccccggccccgagggacgaggtgccccgaccccctgtggggtttgcactatgtacataggttgggtgaacacggtagggctcacctaaccgcatttattgcggtctggtcaagcgtgtcacgctgcatgcagcgcaatgcagcgcgctcttttatccggtctgtgaccagtcacagaccggtcggatcaacggttaggtggcgactggcggtctgacgcacgcctcgccccgtcccgtcaagacgagagcctctaggcacacgtctccagccggagctagcgtgttacctcttagagatggcacgttagccctggttagatgaataccaggcttcatcccaaccattacaggcaagatgctaccaaaagaaaggtgatcatgcagatcggtgaactgacgcatagaggacaagaatgaccg

SEQ ID NO: 10654 - DNA, 595 bp, Oryza sativa
  unsure (1)..(595): unsure at all n locations
tggcattgttatgatgtgatgctttgtacagataagcgtccgccctgtagtattggatttggtttcttgctgcgcggcataaacgaggattttgaccaagagtattatatttgaactgtattagatttggtttcttgctgtgcggcatcacgaggattttgatcaagagtagttagcacttaccaggctgatatattgttgtctatggaattatcaatggttcttggatttattttctttctgtgcaacaacaacaaggttgccaaagaatatttatctagtatgaaattctgaactagtggtacttatgcttgtcatgccaataactgtgaggctaccgttattctttcttactgcgcaattgaccatttgttcatgtcatgtttccatccctaatgatggccttttctggactgtttgatctacaggtcataattgacttcactgcttcctggtgtggcccttgccgcttcatcgccccagtgttcgctgaatacgccaaaaagttccctggtgctgtcttcctgaaggttgatgttgatgagctgaaggtgcgcagagtngcccacaatcttccaaaaacattttgtcaccc

SEQ ID NO: 10655 - DNA, 554 bp, Oryza sativa
actgaccactaggagattccaaggataatcagaagaataccaacctggacggactactggcggttggggaaccacgatatcttcttactggtgagcgtgcaccgtaggacatttcttccatacctgcacatgatggcatccaaacattaaattaatcatcatttttttttaaaaaaatgtggtaaataatctaactgcagtacctattaaaatgattccacctatcatttcttccatcattgtagcgagaccgaacaggggaacgctctggagatggtgtcctgtatcgacgtgcaaatgcatattgttgagtaaaaccacgccccttcctgacacgttgaggctgtccgttgtctgtagagcccattgctaaatctttaccattggttggcacaggttcagctctagatataccagcctctgcagtatcagcaccattgttgccatccacttttgttaaacttgcatcagccctaataggactgctcctagctctcgcaccaggatcatcccttgaaatacaaacaaacatctcaattgtgtactcaaaggat

SEQ ID NO: 10656 - DNA, 562 bp, Oryza sativa
ctacacaaaagccactttattttaagggaacaaacatgcatcgcattctgaaagggtttatggctcaagtactgaaaattaaaccaaatgatccaagtcctctggccactggatatttctttgtatacaactcacagggaagtcctttgcccttttatgggatttcaaaggctgaactctacataattctagaatgtagatatgaatggcttgctagttatacagcataatcccatatttttttttgttccattcgcaggatatatgtactctagattgcattctagcatccattttttccctaactatactcatattatcaaaattttgaactgcagggtggtgatttttcaagaggagatggtattgattcattatcccaggcatcttctttcaactgacttcttgctgttgtacactttataagctcaacgctacatgctgtttccaagacgtggtggagagagcatatatggggcaaaatttaaaggttaacgactaatgaaacttgtggctgccataaaatttttttaatacaattagtgtaaatgcattaatatgc

SEQ ID NO: 10657 - DNA, 10903 bp, Oryza sativa
cttaaccctcaccgagtctagcaacttaggttagttttgattaagtgtcatttagtttttatatcgcctattcacccccctctagtcgacatctcgatcctacagccgccacggcccaagacgttcttccgctccctctccgccggcggcagcaagaacatgacgccgtggctactcttgacctcgccgtcgtcgtcgctgcatcaggcatcgaggtagtcatcgacggcgaggtgaggcggacagatctgggacgtcgttgttggtgtggagctccacgtagaaggaggttggcggcggcgcgaggtagagggagacccggcgtcccgggtgaaggagtgctgaaaaggaagaaggtggcgactgctttggtcatgtccatctccggccacacttgtcaccgccgtcgccgaattatcgccggtctctcatgctgtggaagataggaggaaggagaaatgggaagaaggaagaaggggaaaaatgggtagtttggtccaattttttctggaaatgcatctaagagggtaagtagtggtatcttttgaatatgtataaaagtataatggcatatttccaaatacataaatactggtgacatattttgaaacgggcaaatttttaatggcatgtatccaattaacccctcctgaaatggttccatctgctattcctccggacgccccctcatgaggtcccagtgccgccaccgtcgccacacgccgaagcaacagcatcgcagctgggtgtagtggaagatcgcgcgcgccaatgccaggcggaggccgtatggccgccgtcgccgctgccaccccacacaacgcctccgccggtggcaccacgggagcacgagcattcttttcgttctcctgggagccaaatctccttgtctagctaagttcccgcgcttgatctgggtggtggccggtcggtaggtgctggggtccttacttgtctagtcggcacttcagttgatattgtaagcacgacgcatcaatttgcatccatgatttgccatcatcttgttaaaaagtctactagcagaaattttgaatagtgaaaagatgattgttttgttcatcttaatgcagattggagaataaaggatctgagaattgaagatattaatggcaattctattgagccttcctatggaacctatcaccaggactaggatcctctaattttagctgcattaatgtcaggggtgaacattgttgtcacttttgaagttttacacgtttaattagaggacagcaatagaaactaaaattagaggattaacttggtatgttacctgatgagtggtgaatcattcatgtatcttatatatcactatttatgtatgcaaaaggcaactcagtgtattgagagttccgaagcttttaagtgattactttcagcacttaacactaaatgattgtccataaatttactcattcatttatgtctttaactaatggactgtatttgatcatataaattcagtttctatccttgatttaaaaaagtaacattcagttgtaatctctcgagataattttcactcaatgattatttaacatcttttcatccggtgtaatatgaaattaatgcatagcatttcccatcgcaacgcgcgggcatgtaactagtatcatataaaatcgtactacctccatcctaaaatatagctatttttagctataaatctgaacacacaagtaagattcatagctatttttagctatgaatctgcagaagtatccagattcataactaagaatgcttatattttgggacggagggagtataaacttgccgatgggtattgtacacagtgtacagtacattgtacactgaattcgataagtttttatagtgtgaacgcgagtttaaaaattttggatccgagttttacccacatgtaataagagtagccgatccatttggatatctatggataacctattaatataatagacttatagtagatcgaccctattaaaccatggatcaacgaactcacttaaaacggtttaggttcaatccatatcctaaccattccaatcctgatgtacactgttcattcgtccacgcggccacgtcgccccaaaatcagtcgcgtccaatctctttcccagccacgtgtttgcattgtatcgggccaggccaattgagcccaccacccaatcgctcacgacaggcagaggaggaaaaaaatggggcgctgtgaacccgctgattccccattctctccgggaaatttaagtatttgtcactcttgtgacatagtaattaacgatttgccacatcgtatctataacatgtggattctcatgtgttataacatatggaactagtggcaaatcatacgagtggcttacgagtggcaaatagttaaaatcccccattctctccaccgcgtcatggcctgcgacggcgccgccgttcccctttcatctcgacctcgggcacgcagctcgcgtcactcgccgtcgtcgcttcccagcgaggccatccacggccaccgtcgcttcttcccggagaccgccgccatctccccacccccgcgtgacaccacttcttgccctctccatctagggttttctcgggcctcgaatcgctgtaagcccctcgacgacttctttggttgttttgcttggatctccagctcaggggagcgctgctttgatttggggattgtgcctctcttgcctctctggtgtggagcgatcagtgtggcgttgttttctcttaagctagggttagtgcttagtactgtaggtgggaaagcaatttcttttttttttggggggggtggggggatgaactctcggcttcttctttagatggtacctttgattgggtgtgccgtggaattgcctgccatgcttgataattttggtatcccctgtgtagaaagcatgttccgctgccacggaggacagggatgcccctgtgcttctattatctccaccaaggaggctgttgcattccagatctccctgtcgggcaagctcgggaggacgctacattgagccatgatgactgcaatacttttaggccttgagaagaggatttggaccactggtggttctgaccaagatttaacggtatgtgtttttctgtatgttttcttccttgtagtgtctattcccttccccacgtcctgatgattacttgctcaagctgtttgattattgttgcagcagttacaccttcagttgaccactcaaccaaggtatcgatcagttttggtccaaaacatatgtttattctcatgcatcgatttgcaatgaccaaatctatgcttcgatcttttaatttgctacagttttccctgcttctctaatcagtaccattacagatttgtctctgtgactgcttactgtactttcaaattgctttacagtgcatgcacaagtctgttgcctattttagtactagccaatatatagatgttcccaacgaacatggtaaaaatattctctgcaattctttgcttctatagattctcatgcatacgatatctgatcgatatccatgaatccatccttcttttgcatggttttcattttcagaacatttcagctttcggtatatgaagctcaagaatgaagtgaccgttgtctggcttgcaacctttccagggtacaaatcaatcagtttggatatggaacacgcattgtacgggttgctgcttataggttgtttggatatcacttaatggatcaaacaagcttgtcatgtttgtttatatgcaggtgctatttggaattaagtgcagtggttgtacgggttaattcaaacatatgtatgtctagattcgtagtactagaatgtatcacatccggtagtagattatttttttataggacagaaggagtagagttcagagaaagtggctagcaagtaggccccacattttttatattttttcctaggcacttaaatgtgggctttacctgtatttgtgactgggttgctccatcatcacaaagttgactaagtcaaaaggtcacgttaacaaaaccatccaaaacactatcgagagaatcaaaatttatcggttttagtaattaaagggttgagatatctggcatggtatcgtggttaaagggatacgatttagattcgacgacaagttaaggcagtcaaaacggacttaatctgatttttgttagcaaattttagccatctagttgtcatgtattaacattaggaaaccgaggacggagagagaggagtgaacgggggcacggttaacgaccaaaggcaggaaagaaaattattattaattcaaatcctgatattttaaattaacaacgttgctttcaatgcactgaatattctgctataaatcatgttaacgattttaaaacaaagagaattcgaaaaaaattatccctgacctttctgattattaaatatattgttaattagggttttctactggttaaccaaagtaatttctatagacaatttacagtaaattgcgctcatggtatctgaacttctatgaacttatatggtaggtgcaaataggtacaataacttgcaggtcgctcattcacacatgggctaaaacaagccacgcaagaaaattgatctgaatctacccgcaaccttgatgatatgtacgcatcaaaaccggattgaactaatccattccaggaaaattaaataattttgaacggaaactattgagatcacatcgtgaaaagccaaactgccaattgaaatgtatcagtaataattagaagtcaaaatggatcagtgcagtcaatcgtgacagtgtagtcaatcgtgatggaaggaaataacaatctcatcttaaccggagcctgtgcgcctaaaggtcttagaattggtgacattatgtttatcggctaccaggatcacggttaggtcgatgtcatagtgcagcctttgcacctatccctaattccctatacacacttccagccaaggatcactgtgtgtaccaaaccgatgatatcctagcacgctcaaagccaacccagttctagccgaggatcatgataaattggtttgcccagcctaggacaagccgatcaaatcggtgagagtgataggagaggcaaacatcaggtgttttctgtaaattatatccccaaacaaccatacggcgtgcaagatggtatgtcatccgtgcgccacgccgtatcattttgctagcatagatcgttttggattaaattagcacggattagccaagttattatattaaaacaagcaatttacaaaatgttgtacctacttgcacccaccacacaagtttatgtaccgtgattgtagtttactcagacaatttttaatgaattagaaattacggaaaagatgaaactccggatgtgacaaccatcctgaaaaataatcaaaagcttgattgtttagactttatgcttctctgcatactttgcgatgcatcatccctagcggtgcttataatcataaaaactaacaaacatgcttttggtcataataaagggtaaaatctcgttgcagtcatctaacataatcatgctttacactatattctcctcttatatgagtagattattatatataaatatatttagtccttaattgaatatatttatataaattggcctacaggtataagatcatatcggagtagtagccaatacgttatcatttcctttattttattctattttctactccctccgtcccacaatacaaatgattttaagtttttgatggcaacgtttaaccactcgtcttatttaatttttttttgcaaatataaaaaactaaaagttgtgcttaaagtactgtagataataaagtaagtcaaaaataaaataaataataatttcaaaaaattttgaataagacgagttgtcaaacgttgcaagtaaaaactcaaaatcccttatattatgggacggagggagtacctaacagcccattttcctcaacggtatcggcatgtaaagactatatgtcatcggcccaccagccgatcggctatcgtttacaagattaattattttattttccttgttggttgcaatatcaaaccaactagtacgcccttgaagaaagcgagattttggacttgcactagagttatgtagatctcttaggccactgtgtgttcttttgcatcaacagtagttaagtgtcgagatacgtggttaaagagatgagtacgatttagattcgacgacgagttaagacagtcaaagcggacttaatccgatttttaataaagatggactgggctggccaaaaacaaaaccagtcttcggctcacatcgcaataccaacacaccgcatcgcatatttttcctcacctttgctcaaaactccggaaagaaaccagacgaaaccctaagaaagagagacgtcttcggctcttcgcccgccgccatggcagctattctccgatccctgggtcgctcggcaaccaccgccggcctcttcggccgccgctgccgcctccttagcgaggcagcttcagatcatcaggtcagttccgtcgctcgccatcttcttctctttctcgcgacacagacccgaaatattttcgacgaaaattttctccatctcccccttatcttcgatctcccgcgcgttggggctccttcaatttcatatgggaaggaacaaatgggaaggaatagatttgtaggatcttgtttggttaatcaatttcatcatatgggaactagattggaggggatttgggaggtgtgcaatgtcacagaccaacacaatcacaccaaatctctcacacacagtgccaccgatatattgcaaatcgtgttgggcgacacacaattgcaatggtgacctttggaggcggaatttgagccatggaggggttggtgctggtggtgcccgccaggtgttcggtgaaatgctggctgggagatgacgcgggcgctgttcttcatgtccaagtgagccaagtcctttatccggtgaccggcgaggtactgcatcaagtttacaacacctatggagccgtggctgtgcaggtcctcaccacgagcccttggggtgttgaggcttccgtgtggttccgatcaacctgcgatgcggagagggctcgttctatcactaatggacgcaatatctatgatgggtgttgcctgcttgatgtccagcacgtgcagcccactatctgacccatagtgtatacgaccattgggtatatgacatgcaattaatccccctaatcctctccaatccaatccccatagggataatttgattaagcgaacaagccctcactgatcgattataatcaaatctaacttgccgtcctctaatttgtgccgttcccgtggaggcagccgaagaggattatcggtttgtcaagcggtgtgcacgttaaaagaggctcaaggatgcagtcgtcgcggcaatgccgcagtaccccgtcgatctgctcctcccttgctgcttggtttccttaggaagtctggttcctattatcagttagcatatttgtggttaaggatggttcagtgccacagaacatctgttcggcgatgtactgtgattcattcccttgaactctgtctttattaataaaagtttgagttttcaaaaggaaaatctaacttgcttacttatttatgcctgattttgatttgcataagaagatcgcaaagaacagcggccacatgaagaagggatctgcttcggcgatgatgcagcaggaaagggatgctgcggaatcgggggtgcaaagcattgggggagatgatcttgctcctagtcctcgcttgcttttctggtgcaataccgattcccttccgtctgtttctacgactttcttgctgctaccttaaatttaactcttggtcttgatgatgatttattgagtttcaggagtagaacttaaatttgagtcttggtcatgctttattgaatttcaggggtagaataatccgtttatccatcatcacctacgcaagcttcaaacttggacaaaactctgctagaaacgcatacaagagaaccaaggcagagcttccatgcttagaagctgttgacagcacaactgcgtagctctccctccatcttttcatacccaccttgccttgagctgcccctttaattatgcatggatcagacctatgtatgtttgttttccaagtaatctatatctccattgggcatgtcacctttagttatgcatggatgtctcctttatagatccacctgttgatgttttctgctaatcgatgtctccagtgagcatgcatgtcaaagttggaagtttgtgtgtgctttgatgtaatggaaaagttggaagtttgaagaaaaaatttggaaccaaacttgtaggctgtgtttagttccttccaaagttgaaagtttgggttgaaattggtacgatgtgactgaaaaattgtgtgtatgacaggttgatgtgatggaaaaagttagaaatttggatctaaacacaaccttgatgtgatggaaagttgtaagtttgaaaaaaaactttggaactaaacaacagggctaggagttctgagggatgtccggatgtgataaaacagatgtgacgccaggtatgaaaacgaagatattacaaagtgtttgcgcccccccccccccccacgcccccgcccccaaaatcctctttgattcacttccattaatctgtggttttcttccattaatttgtggttctctcgggtgccacatctgagcttcacacatcctccaagcaaagagaactttgcttggctgcttaatgtgatcttctgttgattcacacaatcacccattcttcaaggtacagctgcaaaaaatcctaacttgtttgacacgaatattggcactatttgatgaatgattttgttgactaaaacacactataccccccccccccccaaaaaaaaaggtttttgctatgcatcactagcgtgttttttctttgttcggactcaaattttcatctgtcagatcatagcttcaagatctgtgttgttcttttttttgggtgcgcagccaaactagctcgagcctgtttgctctactgatcctatcgactatcgagtgaggtcgcacgcactagcactagctagcgacagcgatgtgatcaatggaaaaaaaaatgaaaatatacattttttttcatattttgcgtttatatacatagttggcgaagtttagcgaaaatatacctctcctgcgcgttgggagtgcgggagcagaacaaatgcacggcgtgatggcgcgggagcgatttgccaaacagtgctgcggactgggggtgcgggactggcttggcgcgcagaccgtgggggtgcggaactggcttggtcacgcagaccgagagtgcggaaccgagtcggtctcgcgcggtggctgtgctcatgcgtgtggagtgcgggaccgcaccgatggctgctcagtcgcgcagaatggtggcacgggaccaaagtggtaccgcagtctgaaggcgcggaaccgagccagtcccgtggggctacagttccacgtttccgacgtgcgggagcgtgtcaaagtaaaagcaaatcattgaacgcttttctaccctatatatcttcaccaactcactcttacacctacattactcattagtaatatgcccgtgctaaatgctacggtgcaattccattgtctttaataacttttaaaatttcatgttaggaaaaaaaaatctatgatatgtgcaccgtatcggctcacctttctacatttttcccctccctatttatattttcctctctatctgtccgacttccattttttccccggtataatcaggctgtgttctccaaaaagaaatatctccttccacatgtaaatagaacaatgaattagcacatgattaattgagtattagctaaaaaaatttaaaaataaattaatatgattttaaagcaacatatatatatatatgtatatatatatagaaaaactattctacacccggatatagaatagttattctataccccctccctccaacccacctcccctcccttcaagagggcaaaacacacccccccacattggtcaaaggtcccccacctcggtcaaaccagtctgtggctttccccaccaccttcactcttctcagttctcgtctcagaaccgcgtagtaatgtgatgttcatcatgcagtaacgctatgtcttacgtgcagtaacaacactcaaatttagttaaaatatagccatgacggatctacttttgataagcactttttttctaacatcatagtgcaaacggtttaaaaaaaatcatacatcacgtgagagatattgttgttcgaagcttgggttttttggatcttgactatccacaagtagtaatacttagtattagttactactatctattgtgcgttactacaatcccatcgtgacgttattgtaacgttattgtaagtgtgcagtaaagaccataagttttgtagtaacaatgcgtcttactgcaattctcgaatagtgttactgcataaacatgcggtaacatatacctgccatgcagtaacaattccactttgtgcggtaacaattatatttagcatgtgatacttttaacctatattttttctgattccaagtttaccgcaatctcaccacaatgttactgctaaacgtgcagtaacgctctatatgttctacagtaaaaaggtgttttactgcaattcttgtatagtgttattgcataaacatgctgtaatgtgtaactgtcaggtggtaacgtgtatctgtcgtgcaataacacttttacttttgtgcaggaacaagtatatggttatcatctaaaactttgaacccatatatttttgtttcaattcctgatttactgccattcaccataatactactgtcaaaagtgcagtaacgtcatatacatgcatgcagtaacacta

SEQ ID NO: 10658 - DNA, 14298 bp, Oryza sativa
ctctgtctctctctctctctctctctcccgctctgcccgtgagccgcgccaagccctccctctccgctctcgctgccgttcccgccgatgccgcccaaatcgccacgccgcccgcgcgcgcgcgccgtggtggccgaccggccagtcgccgccgccgtcagcgcctgccgcgcctgcccgcgcctgccgcccgtgtcgtcgctccgctccaaaccgccccgccgtcatcgccgtcgtcatcgacccagcccccgccactcggcgcgctagcctccaagggacggaggcagagctcctcctccctctgccgcgtcgcccccgttccctcctccttttcccaaagtggcaaggggcaagccccctttcttccttcctttttcctttttctcttcctccgccggcgtcattcccctccttcctgtcgccgatttggccgctagccggagcgccagctcgctggcttgaccatccaatgtcggttcccctctcctaaaccgacattgtcgcccatataaacccaagattcccccccctttcctttcctctcccattcgccctcgctccaccacgccattgccgtcccctctgtctcgccgatcgccgaccgccgccgtcacgtgtgccgaaggagccggcgcgcgttaggaagcggaaggggactccgggcgcgccctcttcttcctcttccccggcccgaggccggagagatcactcccgtgccgtcggcctctcgtcacagcgccccacctcgtctcagtagtgcctccctccgttctccctcctcgttccatctcctccccttagactcgggtagtagcacgagtagcctccccgtagctagctagcgccgccccgaccgttgccgccgctcgttgtgtgctcgccgccgtcgccgcccgtgctccgtagcacccgctcgtcgccggcctcgctcggcatagctccgcccaatccgacgctagcaacggatccccggagtcgcatagatgctctagctcgcccgaatcggtctcccgttgcgcccttgccgtttcccccttctctcgccgccggttgccgccgccgcaatccaccgccgtcgagcattccccggcaaatccgagccattgactcgtctcccctcgtcccgtgcaacctcccggtgtgcttgctttcgcctgtatcgtcgtggttcgctccgccgcttgccgccgccgtccgccgtccgttccggccgacgccttcgtcttcctccagccggcccgcgtggcaaccacgtaggcgccacgtcggcgccacctcggccgcgaccagatcggctgacccggccagccgctccctccgttccccccccccccccgtgcgcatggtccgcggtgagccgtgaggctgcgcgtgggccgccgcaccgcgtcctccgcgaactgcgcgcatgcgcccggccttccttcccaaaccctagcacgccccgcgtgcacctcgctcacggtgagctgagtcgccgacaagcgggtcttacccgggaccacgcgggatggacccgggggaccggctctctctctctctgctccccgcccgcgcggcgctttgggacgccttcttgggccggccggcccattaagctcggccgagccgccccttttctctcgggccgcgccgtagccgcccgaggaaagtctaatttacctccctccttcttttcttttcttttctttttcaaaaaggatttaaataaatccttttcctttagaccaaaaatccaataatcttagaaattcaatatcttcccaaccgtaagtccgtttgactccgttcaacttccaaaattcctcaaatctcgagatctatctaaaggcacgcttagaggtcaataatagggctttattttcgccgtttgctgagttgtcccatttcgcgtgtagtttcggagcccgaagacccgcagtgcgaggatttcgaggaccaagatcaagatctcgagcaaggcaagccacctttgaacatcttgagcctatatttgaacttaattatgttgcttaaaaaatattatgcattgataggattgcacttaatctgtttgtcccatctgcaaggcagattggcggacctacctaacttgttgcatttgacccttgccttgtaattgttataccatgttcccttgtaaccacctagttgcgcctcggtaatcgtgcactctacacgagtatcgacgatcgccttcaaacttaaaatctgagaaacatcttgggtaaaacttgggttttacaaaagacttggaaaacccgacacctgggtcggtgcttgcgaacctaaatgaatttccaaaatcgcggaccgggtaacgtaccgggtgtacggtttcccgctcttgcacttaaggaccgtttccttggaatttcatccgaacataagacaagtacgaccacatgggtggaatgggacacccctggctgagtaactagctaatcgggggagccatgatgtcaagagacatgtggattcaacggggtggtgtcggggaggacccccgggtttcctggcacagtatggtctgggacctaatctggtgttggtctggaacccctctcattggcatatggtgaacctgtgtcggctttcgaaatgccttgtcatgaaagccttaaggtctctagtcgtggccgttctgcacgggctggatgatccgggttagtaatgacgtgtgggtaaagtgtaccccctctgcagaggttattaaactgttcgaacagccgtgcccacggtcatgggcggatgtaaggtgattcctagcatagttttgtttgactactgcttgtgaaatttgctgatgtggtttgggattgatgtttggaaaatctgcggctgatgggatcagccaggcccgggtggccgtttaaaaaccgttggccgggtgccaaccttgatcaattcaaaagactgataccttgcacatactccgaccggacgagacgcactgtctcatccgtgtcgtttgagaagcactcacttagttgtttcagaaaagagtttaaataaaatcaattgcaaaaacaacagcctttccttgaagcctgcattaaacacttattccccatggcttgctgagtactcccgtactcacccttgctctatataaataatcccccccccccagttgctgaagaaaatgaagcggatcccgctgacgaggagttcttccaggagcaagccggctacgatgagttttagggtttcggcctagttcccaagtcgcgcctgtgatgtgtggtccaagtcttggcttccgcttcccttttgtaatgcagttgtgagctcaggatctgtccgcagcccaacataactgtactcctactctataataaagagatctctgttgctgtgatattctgtcttcctgtgataccagcactgtttcctgggactggtatcaattaataggttaatttggagcgtcacgggctagttccgctcgggactagttcgggacgtgacactcatccctacacgacaacctcgatggcagcggccttcttcgcggaaattgttctactacacggtgttctagcttctattgtcagtgatcgagatccggtcttcaccagcactttctggcgggagttgttcagattgacgggagtacaactgaacttgtcgtcggcatttcatcctcagtctgacggccaatccaaggtgacgaacaagatcattgcgatgtatctccgttgtcttaccggcgatcggccacggcactggctacggtggctcccatgggcggagtactgctacaacacgtcctaccagtcatctcttcgcacgtcgccgttccgcgtggtttatggccgtgagccacctacgctgcacgcctatgaaccgggatccactcgtctaccggcagtccaacaggcgatgcaagatcgagatgaatttttgcgtgcgattcgtgatcgcctggagcaagcgcagcagacacacaagtcggcgtatgatggcaagcatcgggcactggaattcagtgtgggcgactgggtgtggcttcgtttgctccatcgcccgatggcttcgctcggggtcgccggccgtggtaagttgggtcctaaattttacgggccgtatagggttgccgagcggattggttctatggcatatcgtcttcagcttcctccgggtgctcgcttgcatgatgtgtttcacgtggggttgttgaagccatttcgtggaaccccgcctgattctgttccgccattaccgcccattcaacacggccaagtgtgtttgcagcatgccgcagttacgcagagtcgattggctcgtggagttcgtgaagttcttgttcagtggaaggataagcctgctgccgaagcttcatggatgcctttggatgaatttcggactcttcatccggattttcagctcgaggacaagctgcttttccagggggggagagatgtcatgtggggattgcaatacaaacgtcgcagcaacaggcgggcgacggcaaggcatgacgaggaatagtttttacttctgttttgattcggttcggagtttgttagatagtttgttagtttcttattccgtaagctgttaggagtctatcctttagaattgctatataatctgtaagacagtttggttttggaagcaatcaattatgtgagattaatctgtagacctattcctgcctcgccggtgcggtgccgaacacggctcctccgcgccgacgaggtccaggaccacgtcctgttacagccttcaaatactccctccgtcgtaatcctcgttccaatctcctcgcccgtgacactgttacttgtgagattgggtcatgaaatcaagattggattgggtctgttacttgtgagattgggtccttaactcaagattggattgggtctgtcacctgtgagattgggtcatgaactaaagattggattgggtctgtcacttgtgagattgggtatggcctgaatcagcaaaaagctataacaaactagtatcatgcattgtttcgtttggctgttgtcttgcctacagtttatctgctgtgagaatgttttttttttcttccagcaacaacaactgtaacatgaactagcactttttgcctgcactgaacttaaaattcatagaatgcagtcaagtcctgccaggtttttggacgccgacaattctgatgatcacagatcagctaatggttgaattcctgttgctagtgcaaacaaccaaattgcgtacaaagctttgactaatgctgtaatttagcagatggtttgggacttgggagcagtccctgctcaaggacgaggttcagagttgagaccaataatctctgttccttggagagagtgaattttaaacatggaccatggatatagcagaccatggatgtatttcttttgtgtcagtgtctgtccacctccatgaagcgcatttgcttattcaatgctcagaaaaatatgacatctctcctctatccttgattgcaaactctgctgcacttatgtactgcaaaatttgaaactattgcaaataacattcaaagtagaagtaaagttgtaataagagtttcgttcaaaaaaataagttgtaagaggaggtatttcaaagaagaatgcagtcgattgccaccacctgttcgtcgattgccctttcacaaatgcagtctggcaaatccttaagagatggatgaatgtgaactttgctactcccggtgagaaggcattgcaccttgctgactggtggctgcaggagagactatgttgtcggacgcgctacagggaaaattttgacagtttcttctttttgacctgctggtttctttggaaggagaggaatgctagaatatttgatcagcgatacaagccagcggtgtagctgaagacatcaaagaagagttcctctgcttgaaggaagcggggatcatcgctggaatcagcgagtagtcggcttactccttcgatatagagctgccctttctctggcctgctctgctctgttctgtctcctccctcctgggggataagcccttggcttgttcctgctcagctgtcttggccgatgtaaaacaaatcatgtatttgctcttttcttctgatgtgtatgccctctgatggcctctgtaattattgaccaagtgtatggagagctgagatcattagttattgattggttgaattgaacgtgcttaggttgcactaactgtaatcgtttacttatggcaataaattgtttacttgatccatttacttgtgctaaaagtgtactctgcatgagtggattagtttactttggttctcttcttcttggactgtacacgtcaagttactgtcagtctgtgacaaacttcttgctgaatgtcaggtgtatgttaaacatgcgttttagttgagattactattgattggttgaattgcatgtaatctgtactaatggcaataaattagttatttgcttcatttatttgtgccaaacgtgtagtctgcataagttggattgagttcagactcttaagtctgaatttcagacatgttcagaattgagttggttgaaatttcagagaagttcagaattgagttggttcaatttcaaagaagttcaataacttagttacttgatctattgtttatgccaaagtaataataccatggaagaaaaccatgcactgaaaacattgatctgcgaggtgttctgtgtcaggtggaatgactgaccaaaattctatggtatgtgggaagcgtgatccatcctattacaacgtgtcgccaaagatgcaatctcctggtcctcatcttaatagtttgtatgattgtcaattttttcattgtcgacgtaaataatatccaaccttttgcgaatcttattaactatagagcggatttcagccttaagctcaaggagagcacaaccgaggactactggatgttgaaataagggtacagtgcactagtcattgagttctaataagtttttgatctattaaacattcccttaaaaacggcatatattgatgactcgagagagcaactaaattaaagagactttttacaatgcttgggaggtatgttaggtaccatttgttatctccatagccaagtgcgcttgtacacctcatattataacaagattggatattgggatggtgctctatatgtgttttggggtcaaccagttgccgctattgtctacaaggctagatcactctactgttgatttgctacttagcacagcaaacttgctccccgacgtttaactgggcatcagcttcagacagagacgcagttgcttctctttgtctgaatgaatagtactagtgtttccgactgacattttttacattggtgaaatgtttgatccattgcgctggaaaatgacttatattcgctaaaaagaaccagtgaaatagaacaaattatctcaaatctgaactttctgaaaattcagacttgagatctgaactcaatccaactcatctcggcgtcgacctatataacacccccacgcaacgcgcagccgcgcagcgccccaacaacattccacactcttccttccttccttccttgtcagcgtcgctgcgccgcggcccgcggccgcgccgcgccgctcgtggtggaatccgctccactccccaatggcgcccgcggcggcgaaggcgtcggatctgtaccgtgaggagaccgaccgcgacgacgacgacgacgacgtcggcctcgccgtcatcctccccgacgcctgggagctccccaggcgccgcgtcctgcgcaacgtcttccgccgcctcccgcgcaacccggacttcgacggcgccaccttcctctccaagccatggctcgcgctcgccgtggacgggcacaacgtcgtcgccgagccgcagcggctcatgccggggctgctgcttccggaggagatggcgctcgacccggcctcccgcgccttcctcagcctcgccgacgggcgcttccacgacatcgccttcccccacgcccgcggcgcgcgctgcgtcgggagctcccgcggatggctcgtgatgctccgggagggccccgagggagtcgtcggcgccgcggccaccgcaactgtacatgtcatccacccgctgcttccgcacctcgagttccgcctccccgacgagttctccctcttcgagatccatgccgccgcggacttggaggagcacgtcgtgcggttgccactatcgaaggaggcgcgcctccgtgccggcctccccctggctgagaggctgcagcgcgtgtacaagcccgacgagaagaactacccctacatcaccatggtcgcgctctcgtgcagccccgccggctccgacgacgacgactgcgtcgcgctctgcgtctacctctgcggccgctgcctcgccatcgcgcgccccgggaacgcgtcgtgggcgcgcgtcaaggtgggctgggagtacatggagccgacagagtacaaccgcaagttcgtgagcgtggtccacctcaacggcagcttctacgcggcgtgctacgacggcacggtgctgcgcgtcaccatcccgccggcgggcagcagcagcagcagcgcgtcgacccctcctcgggtggagaagttcgcggacaggccttacagatcgaagtggtccatgtggagatcgcggtggtggctcgccgacgacggcgcaggctctctggtgttcatcgggactgagcgctgcctgaatccctcggacgacgaaaggtacctctccgtgttccggtgggacgccgagctgcggttctggcgccggcccaagagcttcggcggccgcgcgctgttcctcagcgccggcacggcgttcttcgccgacgcgaggatcctgccgtggtgcgccggcgactgcatctacttcaccgacgacgagagcgtggtcaccggggagaacgtcaccgtgagatgctacgacatgcgcagccggaagctctacttcgtggaagacgctggggccaaggtggcgctggccccacctgtctgggtcatgccgttccatgaatagtactgtacagagacattcatccaatgatccaagcaggtaaatcattgatgtgtaggactttgattagcatttgttgctaggtgatttcttcatgtgaattctatctgtgagtaaatttcatgcgaattacttcatgcaagtttccatggctaccgaggaatcttggattgacaaacttgttttgtagtcctaagcactttaggcaatatatatattgaatgctaccttttcggattgttttgtgaaaattgctggctctagctttacttcccgtgctagtgtttctgaagattttttaatattttgttttgttgcaaaaatgtatagtggtttatttgatgggttctacatttgtgatgccatttcttggcttgattcgaagtatagtctacttcgaaatcaatatttgtaacagctgagagagctacgacatatgtagccaatctattgcattgcatgctaacttttctgtttatcctttgaaaattgttagctgtctagttttacttccggtgctagtggttgttgatttttgcagtagtttgttgtgtggcaaaacggtatagtgttttgtttgattttagctacaatgttgatgttcatttcttgacttgattctagtagttggttaactgtcaaaacttcagttgccattgatgccaaatgcggtgttcatctgtatcgctagcgcttgatgctccgggggccatgggtgctgggaaagggagggccattcatgtgagggtaatatttctaggttttcagattaatcacgttattatgctagctgcaatattggtccaattttacataggctagttctctttcatgttctcgaataaagatgtaatcatgtaattatcaagagtttgatcacccaaatgtattaagccgattcgtgaaaatattttttgttgattttaaaggggattacatgtatgctgtcatggatatagaatacttgcagaattaggaatatagtgtacttgctatctcgtaccatagcaggatgctgaagctttggcaaaatttacttcaactctctgtgctggattgctggtactagtgttgaatttacttgcaatattatatgctgtgttcgaaacatacgtagtctgttcaaaccgtataatgttgtgttgattcgcatttcagatatcactaaactgtaatactctcaatttgactgtttgatcattactccgtagttgtcatcgatgccaaacgcacaggaggctgaattatcgttccaaacggaccaactctatcgaaaatccgtatgcacgtccttgcatatgcagaggcaacattttgcaaatcagatttgccttaatcaataggttacacaagagctgagtttctaatgaaattcttccgaacttggtcgtaacacatgtggcgcggctatgtacgcagcggcagcacagggctcagacgcaacaaaaatgtaaaaaggacacggcgttggtgctaatccattctggtaggagtaccagattaatgaaaattccaaaccaggattttaagaattaagaatcaacaatacgatcacgacaacgttaacaagattctcacataaacttggcaaaacagatcattgtgcacagtgctgcttagctaaacagaacaaaatgccttaggtatataacttgctcaaaaaacaagtgatactggaaggacaagccatgggcgcttaacactgaattctgattctggatggctagaagctgcatgactcatttgagagggatgaaccgagaggagtgggtggcaccaataccgggcctaccgtgcttaaccggcttgtaggagatggagaactccgcaaggtagtgaccaatcatctcaggcttaatctcaacctggttgaaggtcttgccattgtagacaccgacgatgcttccgatcatctcagggacaatgatcatgttgcggaggtgggtcctcactggctctggcttctcgccagcaggggcatcctttttctgttcaagggcatttcaaaagaaaaatattgaggaaaatacaaattataacttttagttgtttgcaaggtaatgaaatcccactaactacaaatcaatactgaatcctacaatagagaagcttttagcaaacaagaaaaaaaaatagtacagacagttgatccattcctcagtaccagtgtatttcattccaaaacagcaataagtaacaaattaaaaggacaagctaatccacacatgtagcatcgcagattaaggaatgcaaaacatcaaatgcagcaaataaaatgcatttgacattagacattctactgtgattactgctggttcagattactttacacaacacacgttttggtagttagaaatattgaagtaatcagacaatctctacttagaacatattttgagaaaatgttgcaaggatagtaacatcttttgagaaaatgttgcgatggtagttttcaaagtgtgtacagatcggtcaaaaataagatctgcaaattaagtagttaaatacaccacatcacaacatgttaaacaagaaacatatcgatttcatttaacttcattacatgaaaggcattgacctattaaatgacatggaattgcatctgcccatcaacacaagtgacatgtcaacaacaaacacagcagtcaaaattcccatcattcaattccccaaaattagcaccttacactaaatttctatcatggcaaaaaaaaaaactaaatttccacaacatcctacaacactgaattccacagatccaacaccatgacagttttatcagggaccagaagtaactactaaaaggactacgcttagtattatctgttctaaattaacatagagaatcatttctaaaacaagaacacgccaatcatccaaaatactaagcatatagcacaaattaccgactctgcaaccgtggaatcatagcagatatacgcaaacttctttcacggctatctcattagtcagaactcagaacaacacatttcaagaaaagtgagatcaagattaataattccagactcaccgccttgcgcagcttcttgatgagcgccatgggcttcctcttcagacccctctggaacctgcaagatcacagaaccaacggatcacaccagatcacacccgcaaaaaaaaagagcattcccgtaagggcaaatcaaatcactggcacgatttcatcacagatgcgagatgtgtgggcagcaacacaacaccttctgcgggcgcgcgcggggaagagctggacgaggtcatcggtggacatgtcgaggagcgcgtcgaggtcgacgccgcggtagctgtacttgcggaacgtcctcttctttggctgtgcgccggcggcgacctccgtctcgacttcgacgtccgcctgcggaaaaacgacgcggtcaccgacggagacatgcacgggggatcaccaacggaggaaagttcgagagcgaggaactcaccatgatgggctcggagcgcgcgggaggagctcggcggcggcggcggaggcggaggcggaggcggaggctggcgggtagggtttagaggggagagggcgagtgaggtgggtaggttatatagtgcgcgtggttgcgaaggccattctcgttgtactgatgggttgggctgaatgatagttgggctgtgtggagtttcggctgggactaatttgccctaggaataagttcatctgaggtatgtcaacgaatccgattatctataatctatgttacctggatacagcacaaaagtggcgtatcagtatcggatacgtgtatggatatggatacatattggatacacttcgatacgtatcccagattttcgcgattttcagttaaataaaaaaaagatacctcgccgatacgtcccaagcgttcctgaaagggttaattggatacgtgccattaaaaatttgccagtttagaaatatgccattactatttaagtatttgtaaccatacactgctgcttgtttgtaattttagtgatgccactaagctacatattttgcatgtattggacggaaataccctcatcttctacctctctctttccccatcctctcctctctcgctcatgacctctcagacccaaatccgcggtcatggcggacctccgatttccccggcgacgcttacaacctcattctccgcaactgcaaccacttctgcgacgtcgtgcgccaccgccttgtcggcgcccacctcctgcgctgggtcaacctcgccgccaagatcggggtcgtcttcacctgcgtcatcctaggcaacggcgaggcagtgcgatgtaagcggaaacccccaccgccggaggcgggaaggccagcatccacagccgctccgtgcggtggtgcgccagcccgcggacgccgctgcgacgctgaagcatctaggcccccgttgttaattttggtaattaatgacaagcgctaattgtggactaaccgttgctattaagatatattttaagttaggtccacgtcatgtgtgcgcatggatgattatcgacggattaaaatttgatggcgcgaagcgaagaaaagaaaacggtaaaactagtgctttagttttaaaattgatcgaggtgaagggcgatcaaatttgctagtttatttttagttttgccgtactatcaagggggtaatgacctagcaaatgagatgattttaattgccacattatgtcattatgcatttagacttgtgctcacttttcaccacacacacttatcacacacagtttcactgtgttcggcctgaccaggggcggtcagaccggccacatagtggcggtctgaccggcgtgccttggccagtctgaccggccacaagacggtggtctgaccggtgcataaggccggtttgaccggcggcacatgcgcagtcagaccggccctctggtggccgggatggtgttgctcggggtggccgatacaaagccgacggagccgtattcggtcagaccgagctgatggctcggtcagaccgccattagctcggtctgaccggccggggcagtggggcccaatgacagccctacaacggctagaaaactagccgttgttgagtagcacggtctgaccggccacatacctccggtcagaccggcagagcacagagttgggggatttcgccctcaacggctagttttggttggtgggagtataaatactccccctccagcagcaaggggactctcttggcacccatttcaattgcatacaccccttgcacctctctcacacccacttgagctttgtgttcatccatctagtgtgttagagggtcaattagccaagagtcaagtgcattgctt

SEQ ID NO: 10659 - DNA, 561 bp, Oryza sativa
cgccggtgaaacaccctaagtacatgacgatgactctgtttgcccattccgtctggccgtgtgcttgaggctggaaagcctactttatgtacaacttggcgcccatcaacctcatcaactcgcgccaaaacagcgaggtgaacaccgggtcacggtccgagaccatggactgctgcataccatggacgcgcacgatgtcgttgaagaacgcctacgccacggtctaggcagtgtaccggtgccccagcggtatgaagtggccatatttgctgtaacgggcgacgactgataggatcaccgacttaccgtttaccctgggcagcgcctacacgaagtctagccccatgtcaatccaaacgacggtgggaacgggcagtggcagcattagtcctgctgtgtggaggcgctacgtcttatatctctggcacgtgatgcactcccgaacgaagtactgcacacattgacacatgtttgaaaatggaaatctctgtggatgcgatgtactggtgcgctggacccctttatgcccatcgttttggaccgctgtcactatctcaggca

SEQ ID NO: 10660 - DNA, 558 bp, Oryza sativa
attccagtcgagtccatgtttgtttttcagatcccttaaatattgcctcatttttatttttgacggttcataaaaccaacaagggaacaaatgaagcaagctagagaacaaagcatgccatcagcacccacaacacaacatgaacacgaacattagaccattggagtgttcagtgcctaacatgtaacagaagcttaacacaacacaactttccctgtcattttgtctgacattgcttggcaacttggcatcaggtaacagttaaatgggcttggtcctttgggacaatctgttctttgatccacatggagacaggtaccagcacaagtaagaagcacagatcatttcgttttgttggcattgcttggcatcaggaaacagttaaattggttggtccttggggacaatctgatctttcatccacatgtagataggtaccagcacataataagaagcgcaaatcgtccccatgacgaagcggaagatgaaggtgaaaggattcactggtttctcaacatcttcagcctttggaccaagctgcaacaagaacaaaaggtg

SEQ ID NO: 10661 - DNA, 530 bp, Oryza sativa
aggatggatcgggtagtatgatgtttaccaaaatgctgcttgtcaaagagctttctagcttcatcttctgccaaattgtgaatcagctgaagtttatccactgatactggtagacccactctttccattctttcattatacaactttaagcagcgctcaagaattgccttattgaatacttctacaagtgatcctgttgatggaatttcacctttattcaacgcctcaagtatctaaaataaaggtaagcaacttcagataacagctcacaagagtttcaagattacctgcctaagatgcataaaaaaaaacaagccaagaggtattacctgccttaggaaagatacaaactcctttccatttagagttctaccctgcaaaagttttggttttatcatggaagtaacaatttgcttcaactcatctctcctttctatatataatgggtccagttcttgatcgtccatgtcacatagctttgttctttgaagcccaggctggcaaaaaagttcataatgtaataacttagt

SEQ ID NO: 10662 - DNA, 646 bp, Oryza sativa
tatagggcgaattcgagctcggtaccccgccggctgcgagcttctcagttttctggattgctactcggggtatcatcagatccgactgaaggaatccgactgcttgaagacttcattcatcacgccctttggggcatactgctacgtcaccatgccgttcggactaaaaaacgcaggggcaacttatcaacgcatgattcagagatgcttctcaacacagatcggccgcaacgttgaagcctacgtggatgatgtagtcgtcaagaccaagcaaaaggatgatctgatctcggatctacaagaaacctttgcgagcatccgtgctttcaggatgaaattaaaccctgaaaagtgcaccttcggagtaccgtcagggaagctgcttggcttcatggtgtctcataggggcatccaagccaacccggagaaagttactgctatcctcaacatgaaaccgccaagcacccagaaagatgttcagaagctgactggatgcatggcggcgctcagccgattcgtttcaagacttggcgagcgggggatgcccttcttcaagctactgaagaagacagataatttccaatggggacctgaagcacagaaagccttcgaaagattcaaacaactcctcaccaagccaccggtc

SEQ ID NO: 10663 - DNA, 648 bp, Oryza sativa
tgtgctccttccatcgacggcctcgaatgacaacatgccgaaagacagaagatgatacctcctggcttctcaagggtatgttgtcaagcaactccgtaaatgtggagctacgcagattcagcgagaagctaatcgcgtccaagacctcccgggaaaccttcccaagcaccgaaaacatatcaggcaacccggacggcggcaattccgccacaccgttcggctctaccggcgtgatgccgggcctgaaatcatacatttccagccacatctgaggatcagcatagtagccagacgtcttgcaccactcccgggcatcacccgagccgccgccaccgccgccgccgccggcctcgccggatccgtaccctcgctggtggaagaagaggcgtgcggagtccagccccgacctcagcagggcgccgtcggccggaggcatctcgacgacggccgccgagtactgcgccagcgactgcatcagggccgacacgcacatcttgtagccgtcggacgggaggccgtcggcggcggcgaggtcgcagaggcgcacgcggccgagggacgcgaggatgttcgcctccgcgttatccatccggggaggggatggttcttggatcttcttggaattcacctcagggtcaggggcaccat

SEQ ID NO: 10664 - DNA, 644 bp, Oryza sativa
atagtaaaactctagcaggtattttatctccccaatctataataaatgggcctaactgacacattatcacataagtagcaggaccatcattactgatcaaacgaaatccctatagatgatacatatgaaactgtatttttagcatccactaatagtttttttaacctcttcagcaaacaagcttcactatactttcttagtttagctgattaactcctgcaacaaaagtcattacaaaaaagcacgggagatgtaaaattagaagagggagaaagggaagagtctaacaatcttctaaggtaccataaaccaaaagtttttaccctctggggatttattccagcagcagcaacatatagatccaactttccaatggcaataccaataccatgcaccccgagatcacccaggcccaatatcctgcttccatcagtcactactatcatgtcaacctgcaaaggaacggacatattttatttactttgagattatatgacattttttttcttgagagatgttcaaaaatcaaaagcaaaaggtagactgtcttatgctctgagatagcgttactgaattataccactaaagattaaaccaatgaaagagctcagctgctaaatgtaaaatcagtaactggatgaaca

SEQ ID NO: 10665 - DNA, 28189 bp, Oryza sativa
acgttgcaagtaaaaacttaaaattccttatactataggacggagggagtagcattcacttccctccgtccttacgtctgcggattacgcacgtgagaactgcgggggaatcaccggcgtccggcgtaagcctaacctcctgccgtgaggtgattttatttcgttcaagtttaaatacttttatatttaaattttttttatattattacattgaatatatgtacgcactctgatggagaaactatctttgatcggtcggtcaaaatccacaatagtcaggttgcaataaaaaactgctggttaagtttagagctatttattttaagtaaatttcacaaaactacaggtatttttcacaatttatcacaaaaatacatatttaagatcttgttttattaaactatagatttagtgtctactttatcacaaaactacaggtactttatataatctatcacaaaactacatatttaagaatttatttcacaaaactatagatttagtgtattcgtctatcccagaactacacatttagtgtcttcttttatcacaaaactataggtttagtgtctccattatcacaaaactacaggttttaacaacgctaaaacatatagttttgtgataaatgaagatattaaatatgtagttttgtgatatattgtgcaaagtgcctgtagttttgtgataaacgtagacactaaatctatagttttcttaaacaagcttttaaatatgtagttttgtgatagatcgtacaaactatatgtagttttatgaaatttactcttttttttatctttagtctcggttggtgttaaaagatctttattacagcaatcgagactaaagatctatttctagtcccggttggtaacatcaaccgaaacaaaagatcggcatgcgcggcgaagagtacaaggcatgtgcaagatcgaggaggagacgggtggccttatctcttcctctctaaccttatctcttcctcttccttctctccttttaactcctctcctcctttccctcccccatcatccccactatgatggatgagccgggcggccgggcagcgcggagggccgggcggccggaggcctcgcggcggcgggcggcgtgggagcaggcttttttttcttttttttagaatttatgattcggatctgtgtatttgatttgtgtgtgatgtgaatatgtgatgtattgtgatgaattttgtagaagttgtgatgtaattttttttaagattttgtgatgtatttggatatggccgatttggggatttgaggatttggggataatttatttgggattttgggatggggatggagtgaaattaatatattaaaaacacaatgaagaaaagaaaaaaaataatatatcaactggatctagctagcctagctctatctttagtaacaataaatggatttttactcctggttaattcactcgggactaaagatagtattctttagtcctgaattcgtagtggaaagttttccaaccgagactacaaagggttacgaaccgtgactaaaattccaatcgagactacgaagggttacgaaccgggactaaaaagcacttctccaccagtggaacactctctctgtcaaaaaaaaaaaaaagagacaaccctatgtccatatttaatgtactaggagggggtgagggggtgttttttttttttaaaggacggagggagttactgttagcacttgctagttactgttagcacctgcgcgtgtaatatttgcagagcacacataaatgtgttgttctcacgtgcgtaatccgcggacgtaaggcgtattagatttttacacggtatctaacatcatttattaattcctacaaaactgatattatgttaaaatacattgaaatagttctattccgattctatagtttttaacatgcggaaatgtagtactcatttaagtagtactagtagtcaacattttaatctataatactccatccgtttctaaatatttgacgccgttgacttttttattaaaaaaaattaagttattattaattcttttcctatcatttgattcattgttaaatatacttatatgtatacatatagtttttcatatttcataaaagtttttaataagacgaacgatcaaatatgtgctaaaagcctaaaagtcaacgattttggccgaaattttcgtttttctcaaattttaaaatatttgactaaaatatagtttttcatatttcataaaagtttttgaataagacgaacggtcaaatatatgctaaaagcctaaaagccaatatctcggccgaaattttcggtttctcaatttttgtgaatttagtcaaaatttggtcaagttcaattaaattgtccaaatttcagaaaatttcggcctaaaaatgggtgaaaatttcgccgaaatcgaaattggaaaccctggctaggggatgtactgattaatcgcaatattttttttttcaaaatttagttatcagcaacattaatttgaaatacctacagggcaacagactcccgcttcagttaaagagtgatggctgaaaccaagatccatgcaaacaagcaagcataagttgccatgacgaaatgcatcaaaacagacatcagaaatgagcaaacggcacaacgcaatactgccggtaactgtgttaaaacgtcatcctccaacaccgcagaagctcccgggcatgcatctgtcactattccgtccaatgttggcgagaacactatggctgacaataatggtgttagacaggaattgtcagacaaggaatccgacaccagaaggttacctctgctgctgcgggaatgctctctcatttcttgaaaggcgtgttcaatcaccaccaagaaggttactatattattctttttctatttctcctgttggggttgattctggcatccactgcaacatggctcgctcgtaagcacttcgcccaggcagttgcccttcttgcacttgtttcacaggttcttgtggctggtttgatcgcgtccacattttcataacaaaggctgaaggactctgcgatttgctcattcatttaggggtagaattgtggtatatgacatcatttaccacgcatgtctccacaaatacgatggtgtgcatactttagttggtacaaagggtatgatcgagttatacttccaatgtaaaaaaaaaaagagagggatagaatagtatattataaaatttacttgctgtgatactaaaatattgattaataaaatgttgctatcagtttgtcccaatgatctgcttggcaatttcagtaatgcattgttctcagttctcagtactaagtatcccaatttataggatgctcttatttttggaaaaaataaactcggtagttttaactaataattacttaagcgatatctacatcatttgatttgtatttaaaaatattttgaggtgatattttatagtcgttgatgacatgatatgaaataaagtaatggttaaaatatatcataaaagatcgtgtaaaaatataaaagccttgtaatttaggacagagggagtactgacgtgtaagtgtaagacaaatttattttgttaaaaatctatcaaattgaagtcaaatttgtcaatttgattcaaatttatcaaattgaaaccaaatatattaaacttgtatcaaatgtgaaagatatgtcaaaaggtttgaatatatgcatgttttgatgtaacagggccaataaaaaagcaagggtaaaagggactatttgctccttagttaacactgttaactcctcttaacggaatatggctagcctttatcttcgattttggaaaatagggtcaaataagcaaactataaaaagtagggtcagattagtgggtcagattagtgttagactccaaaacatggtcaaataagcaatttccccggaaaaaaatgttgcctgcaacgctttgtacatacaatcagatgtttacatgaacaaattttaactatcactagaacataggcatattaggctgcgtacgttcgagtgtgcacatgtttatcctgctaaagtgctaatcaacttctaccgtgttctttttataccaaatggatgaataattcagggtagttattcaattgtacaaatgaattgattaactaataataaaaaaattgaacataaatttataataatattctaagaaatttatttatagaatttttatcaataaaaatcacatatttaggagtttagaaaacatggacaatattcatccgatatttaatacaagccaaaaaaaaagaaaaaagaacaccatatcaaacaaaatttcaatgaccatatatatataccatcatccataacagtttgcatataccatcatccataaccgaacgcactcttagagttataaacaactaaggtatacagcattaaataaagaaaaaactagttcaataatttttttagatgtataagatactagtgccttccaacggatagcagacagatcgcaatgttcccagaaatactactcagatagacatagtacgcatatcatctatcaatttaatcaaatgagattaagaagggagtttttttttttgatctcatgtgaaaaccctttttgttttattataagctttaagttagcattgcaatctgaagtccaaaacaataaccttaccaaaactatgcacgagagattgtttattctttggacccaaaccacacatcataatcaaattagtactgtcacaagatggttagtattatatagaagattcgaacagtggcagggtaaatagtaaaatagctttagaaacaggttccaaatagtctacggatcgacataattatattcatttgcatttgcatgtgtacgaaagaaaaacttgtacatctcaagcgtcaacactacacaaaaggcaaaaggggccaacgtcaataccctgaggcacgaggtggggccacgaggttggatggcccacatgtcggtgacggtgagtggattaccctgaggcactagtactacgagtactacttactgctactgctaccggtgagactaaccccctcaaaacgcaataaatagcgctgagagtacggcagagacgctcagagtactcccccacgtagtcgtctacggagtactcttcacttacgggggaatcgtcggcgtaagcctaacgccctaaccctgccgagctgactttattgtgtttaagtttaactacttttatatttaaattttataactatttattaattacaaatttatttatttattacatttattaatacatgcacatatatacatgcctagctagccaactgcgtgcgtagtcctaatctcacttagatttttacacgacatataacatcatactgtaatcaccgactaatatattatcgataatttacatatatacttaacttcatacaaatctaacgatactactacatacgtggcactaaataaaatacacactctctcattttttttagaatactataaaataaactatggccactactccactagttattactagtagtagttacttaacctattttattaattcctacaaaactgatatattatattaaaatacattgaagtaattattctattccgattctagtcttgtagtatttcaaaaagtttacaaaatgtcgtcagctgatatttttaagttaaaaatgtagtataatgttagaacttgaaaattgtattttgggacggttagtatcagacctgacactgacaaatatatactgtatctctttaatccaacgattcattgatctcctccattctcaaggtcttagctagggaagtaattttgtcccttagctattcaactcaatacatttgtcagttcttccccagcagtgagccgacggccgagctccacgaacaagcagctacggacggcggcggcagcgcctcctccggcgaggtagcgggattggcggatccgggtaaggccttgttcgatttgaatggaattgaaaaggattggagatgattgaatgtgaataattccacaccatgataggtgtggaataaatcccctccaatccctccctcgtgaggattaaccgaacaaggcatgggagggtaggggcgaggagaaccagtcacatgcactgggattagagggggatcgatggcgacgaggcggcggcggtgttggtttgcagggacaagaaaaatagagtggttagacttagaattaacttagaagacggcatgggaggagatcgaggtggtgtgggggatcaagcaggggcgaagctaagtagtgttatgggggttcctaggcacccggctgcaaaagaaaaattagtgcttaatacccctttgtaaccatatgtgcacccccctcagctaagcttggtgtacccccacgctagaaatcaggccattgaagcacgaacggtacaaccacaaccacgataggagcccaattcagtcctgcttgccgcatcaccgtgaggacgtacgcacacgcacgcctcttctctttctttttttctttttggcgactcgctcttcctctttgtccctaccagtgccgacgcctcttgccgctaatgccacaattaatcctcgcctcttaccgccaatgccacaattaatcctggataactaatcgacgcctcagcaagatgatgggatgtcaccgaggctgggcacaggcaattccttgcctcctctatcttatgttctttttactaattctttaccagtcaatgcattcattcgaatagctccttcacttttcaattacgcgataatagctctgtttttttccagatcgaatggttatggttagtgcagtttttatctttgcttctttgttagtgcactccactgttatcgctgatgataacaacacgcaaaaatattataatttactataatattgctttaaaaaatatataaactactctctctgttcaaaaatataagaagttttaaagttggacacgattattaaaaaagttcagatgagtagtaaatgtaggtaggaaaagtgattggttgataaaagaatattgatggataaattgttatatatcttgcgataaattctaaaggctaaaaattgttatattctccccccccccattcttctctagctccgcccctgggatcaagcaccatggagaagaaacatggcttccgcgttggatcgagcacgacaggagagggaagaagaacatgcgatgatcggttgaggggcgttggatgcaaatccaatggctgctagctgtccggaagcccgggtcttccaaagctgaggtttttctattctccattgggccaaaaaaaaataaggaggagagattctttttttaatcaatggcgcaaaccctttttgttaaaagaaaaatggctcaagggattcattccctttccttttcttccctcttcatgcatactatgccacacggatggttttggtgttcacttcctactatggtactataagaaatgggtttagtcactagaatctgagcaatttaattagttttttttaaatgctttcattgtgtgtgttctgacctaatacctccgtttcagattataaaactttctagtattgcccacattcatatatatatattaatgaatctaggcacacatgaatgtctagattcattaacatatatatgaatgtgggtaatgctagaaagtcttataatatgaaacggaggaaatatctaacaaaatttgatcatacctcctaggggaccgatcgattaatcatagtggcggatccagaaaattgattcattggtgtcataatgtgtctattagtatcatagtatgctaattatacttatatcatggtgttataatatatggataaacagtttttgctatagattttatcaaaagtccttgctgtcgcctgacaccgaccattacattgtagatccacccctgattaatcacaatatattattcttttcaaaaaaaaattacatttggaagtaccaattagtcgtaatcaaacaacaccctgcatcctcagcaacatttggtcttgttttgcattacctacagggcaacagactcctacttcagttaaagagtgatggctgaaaccaagataatccatgcaaccaagcaagcagaagttgccgtgacgaaattcatcgaatcagacatcagaaatgagcaaacatcacaacgcaatattgccggtaacagtgttaaaacgtcatcctccaacaccatcgaagctcccgggcatgtggttgtcactaattcgtccgatgctggacaggacactatggttaacaataatgttgccggtaactatgttttactgccattatccaacagaactgaagctcccaggcatgtgattgtcaccatttcgctcgatgctggccagaacacagtggttgacgacaatggtgttagacagggattaacagacgaggaatccgatactaaaacgaagctgttggaaagaggtgttctgactgctgcctctgctactgcagcaatgctctctcctttcctgagaggagtgttcaatcaccaccaagaaggttactatattattcctgttctatttctagtgttggggttgattctggcatccactgccacatggctcgctcgtaggcactccgccaaggtcaggggcggatctacagttataagaccggtgtcaggcgacaccgacgacttttaacaaaacctatagcgaaactgtttattcatatgctacaacaccataatctaagtataattagcatactatgacaccaatagatgtgttctgacactaacgaatcgattttctagatccgccactggccaaggtggttgtccttcttgccctagttccacaggttcttgtggctggtgtgattacctctacatggtcttgacgaaggccttggccatgactcttgcggaactttggaagcatcattgatagatggtggaatcgtgagtgcatagatagggtccagggttacaattatacatgtgtatctgtgtgtaggtgattcagatggcctccttggttcttcccgacgtatctgtgtgttggtgagatgttttttttttcctttgagaaatgaaatatattcttttagaggtattgtacttaattaatttgtccgcaaaattgaagagcggacgtttcctttagataggcccaaatgccagcccaagcacgtgtttggggccgtatccaaattccaatacgaaaaagtacaccgaaggtccctcaacttgtcatcgggataaaaaaggttctcgaaccgcaaaaccagaaatacgaatacgagattccttacctatacaaaacctgggttttgacgccggttttggtttatgtggcggctgagttagcgtgggacccacatggtccccatatgtcaggtgtccacctcaccctatctctttcccctttctctttccttcctgatctctctctagcggatgaggagcggcgtcggcggccggcaggcgagcgcgcggcggccggcggatggggagcggcggccagtaggcggtggtggcggaggcggaggttgtggaggtggcagccccctagcggcgggtatggtggtcgtcggcgttggcgtgccccgcgcccgctcatcccaacggatcctctcctcctcgtcggcgtcgtcgtccccctctttcccgccggatcccgccgtggcgcggtggccggcgtcctcctcctccgccgccgccgcatcgacggtgcgtccagggagcgcccggcgccgtggagttcctcgtgtccgtcgtcaaggagcgcgcctccgtgggcgtggacgacgcaacgtcggccaagccactgggttcttcccaggaagagatgacgtgcggcgtgcatgatcccgcgaaggcgagctctgagcatcctccggcgtgcatgatccagataatcagacaagccattccatgtgttggaaaagaaaaacataatatcttgaccctgctaattccatctagctggatcaatcatttgtcctgtttattcatgcgaactcgatcctcaacaaacgtgcagaaataaccgctaaagatcctaacagatctgtctgaccaagtagctgtcgcttttgagaaagttcagtacatcacaaacgcaagtttggcctgtgctactgcttcagatttctcaatgaaggagagatcaggctgcaatgcatcaagagaattcagatgcacacatgcaatggttgatcactgcattaatcaaccggtcattcctcctgaaatggcacatggtgatgagattcagcagcacacatcatcgtcagttgatttctgggtcaaaatgggcaccgtggaggagttttcttcgatctgaacatccttttttttctcctcgtttgacattgctgcagtgtctcgccggacgaggcggctctgagcatcctgcattcgcttaagctctccgaggagagcttcaagagggtcttggagggcagcggcggtgaagatttcttggaaaccttggcgtgcgtgctgcggcggccgagctacctctcgcggatgcagggaatccacctgttgaaatcggcgctcccggctatgcccccgcgcggctgacatcggtgagcgccgtgctggtcgacgttgtggtgggggtggtggcggagaaggataaaattatagcgagggctaaatcaaaatggccaagagcaactatgagagatttagggttgggttaggactttttggccttcttagccttttgggtcttctaacaacctcaaaaaagggcctgttcactttgatgccattttcaacattaccaaattttgttaatgttgccaaaaaagtggctacatttagtttactgtcaaattttagtaactatataagaaatcatgccaaaattttagcaagttaccaaaatttggtaagttttttttttgcatcaaagtgaacatgcccaaagtctatattagcctctcatctataaatatatggattagaattttagggtgggtataatggaggctctaatggtattttagggggacccccccctcccccccacgctgtctccgcccctgcggacaggccgtcggcgaaggcggtcaaggtggcgctccacgtgctctgccggctttgcccttggagccgaaaccgcgtcaaggcggtcgacgtcggcgccgtgtcggcgctcgtgcacctcctcctcaacgagggctgcggcggcgacaggcgcgcctgcgagctcgccgtcatggctatcgaccacatctgcggttgcgcggaggggcacttggcactggtggcgcacccgacggggctcgcggcggtggcgtgcgcggcgacgcggctgtccaccgcgggcaccgagagcgctatgcgcgcgctgcacgtcgtggcgacgcacacggcgacgtcggcggtgctgcaggagatgctggccgtcggcgtgggggcgaggctgttcttcctggtgcaagtcggcgcctccggcaagcggacgagggcgaggtggaccacgagacggtccaggagctgccgtcgccggccgcaccatccttcggccgcgcgcgccgccgtgggtgccctagcgctggtatccccatgccctgcgagtgtgagagcagagagcgaggaaggaaggagagaaacagagaaagaaaaagggaaaagagatagggtgaggtggacacctgacatgtagggttcacgtgggtctcacgctgactcagccaccacgtagatcaaaaccggggtcaaaaccaccgaaggatctcgggtgaccgattttatatagttaagggacctcgtatgtctggttttggggttcgaggatgttttttatcagatgacaagttgagggaccttcagtgtactttttccattccaatacgtaactgggctactcgggccagatgggctaataataaatctgcaatggaataggtctatttttgcctccctcaactcttgcccctaattgaatcgtgtatctcaaccgtgatactgggtataaagcctcctccattatccaaaaacagcttaggaacttaatttgctccagttttcgtagatgaagagagcgtatatgtgatattgagattcaacaagggcaaggttttaagggaagctaaatcctaaccgttcttttttttctccaatttttgaattttttttggggggatatggagggtggaaccggttgcattagtaggctattttgaaaaaaaacttctcgtgtttgcacggaatatcagatatttctatcatcacgttgtattttttatgtataacccctcgtcttccaggaaaatacaacgcgaagaagagaaaattccgcttttaggggtagcgctgtaaacatgaaaaccatagggtttttttacaaaacgtcctacactaaacaaccaccccctccccctcccccaatcctgaaaccctcctcccattctctccctttcctctcctcccctcccctctcccaccttttctctctcggcatggattccggtcagaacaagcggtggctgcgcagagggtggaaccagtggcagatcccctccctcttcctagatccggtggagggcggaggcggcgtggagggtggatgcggcagcggctccgtcgggagggagaggtcggtggcggcggcgaccctcccctccgaatctagcgcggtggctacgcctgcggctggatccacagccgccgttagatctggcgaccgaaaaagatggcgcggtggaggaggatgaccgcgataggcgctggtgacggagtggcgtaggccgatgggtgcggcaccatcttcaccttcatcgtctgccgcccttgcacgggacatcgcgtgcacgtcggcgtcagtgcgcccctcgccccttctccttcccctcgcggcgatgtcgaagccggcgccagtgcccctacccctttttctcccttccctagcggcgacgttgggtcggaggcagcgtcggtgtcgcccccccctccctccgctcacggtggcgtcggggcgggtggtgcgttggtgcgtcggagccgacgccggtggccccggtctactttgagtgctccatcgacgtcgtgtcctacaattgcgctgcctactccagttgatataataatacaaaatatcgtatgagctgacatataaattatcagggactgaaatataaatatactaaggggtggtctctattttaggtagtgtggctttttttttatcctactagtaataagcccgtgctaacgctacgacgatatttggcaatacaaaccaaacaatacaaaaagataatatttttttaaaggattagatatattcaagattgattgaaaaaaggaacaacataaagttatattggtattgattatatagcttgtgtctaaaatataggaattttgtttatcattcgaagccatttaaattgttgtgctaaataaattcatatgtaactacagaaattccatttttagataaattcccattgtgttccaataagtgaatgaatagcaaatagttcatgtaacagaaaattaatgcatggtttcaaatgacagagaaacatagcacggacatctcataaaaaaagagtaaattgtacattgtatatatttttattttaagtttcatctttgtaccttcccacggacaatcttttcacttgtgaccatcttttataacaaagactcgtgaccgtatgggagacaaattaatgctctcgtgtttaccactactttggccaaaagtgcaacttttggtaaagatacagagttgaatgagaatcttaagttaactctagtccaatgtgaaacattaaggaaaaaattagtccaatctgaaatttactaaaaaaaacacggttatatacagtagtgcaatttatatcacaactcagtcaatcaaaatctaccaattttagaatctcgtgctatacatgacatttgagaaaaaaaggtcaaaacacaagtcatgttatgctaagtgtaccaatagtgtcattatgtgtttgctttgtacagaaatctttcacacaacgaacggccaccaaaatatttcatgtcgtgcccttctctctcgctttagctcgagaattggaattcatctccctagctgaaagatgatcaaataaaaaataggtggaagacaaaagaaggtgcattaaccaactgaagaaaaaagattcctaacctccaacaattatactgttagaaagaatcgcactactccaaacactttcatgtatcaccacgatgagaaattgagaattgagtacagagggagcagcccaaccatttgcaaataaatgatcagttgagacttcaataaccatgatatctactaaatcacttatacaattgcataatgccataatgcatacctatgaacccgaacaaaaaaatatcccgtctacatgaataatttccaaaagacagaacaataatccttttatccaatttagaaatggttttataaatacatataacacttgcattagtatcatggaccagcaccaaagttcctatacacgatggaaaagcacactgatttatctgttttgatgaaaataaactatagatatgtagccagctgcagcacggactttaagacgtaatgtgtgtatgataggtgggactatagactaatagtatagtaagcaattattgtatgaattagctattagattggttatagatgaattagagctaacagtgggatttactattagacttgctctcaaagccgcggcgaccccgacgtcctcgcgctcctgcgcacaagctgacctcgaggtgactttcatattctttatacttttgaggggtgtttaagatactaccctaaaatcttacaccccatcacatcaagcattcgaatatctacatgaagtattaaatatagactaacaaatactctcaccttccaaaaatctgaaacctattttttttcatcaaaaccaagaagcaattaactaactcaccatgtggcaaaaccaataaacatgtaaccaataagtactataatggctttttgtttctgatcaacaatttaatttagcacatagtgactataaataggactcagatttttagagaaaccaaagaatgaaataggtctcagatttttgaaaggagggagtaactaattgcataatttacgactaattttcgagacgaatcttttaagcctaattgcaccatgatttgataatgtggtactacaataaatatttgctaatgacgaattaattatgcttaataaatttgtctcgcggtttacatgcagattctgtaatttattttgttattatactacgtttaatacattaaatttgtgtccgtatatctgatgtaacacgccaaaattttacatcgctggttctaaacacagcctgagtacatttatatttacctcttttaaacatttacatgtattctttggtagcggttgagagcccatctccttcgcacggaaaacaaaacggtccatagcgcgttattaattaagtattagctattttttaaaaaacagattaatttgattttttaagcaactttcatatataaactttttacaaaaaatacatcgtttagtagtttgaaaaatatgtgcgcggaaaacaagagaggtatgggttggaaccgggaggaacgaacatagttataattatattttaacgtctagattaaaattatttattgttcaactatagaggaaaaggatggtgcttaaatagtaatgaggggattataaagtggttagcttttaatctagggataaagtgtgactaaaatttcaaaagcattttagtcacctgagatctaaacaaatccatttttaaacatccattacagttggacatgttaagttactggtagtactccttccatttcaggttataagacattttaacttctggtttaagttcgactaaggttgtagaaaaaaaataataacattttcaacccaagacaaatttattatgaaaatatattcaattattgatttagttaaactaatttagtattataaatattactatatttgcctataaacttagttgtttatagttaaacttaaagtagtttaactttaaccaaagtcacaaaaatcacatttactttcatggaaaaaagtccaattcaccaattcaactattgcgttaaatttctcgttaatataattaaaaaaataaaaacacttttaactaggagaacttattttgtaagaagttgcaatttgttcatatgagtattctattaatcctctcgtgcgcacctgggaatttctcggcatcgatgcccccgtcgatcaatgcgcaccatgcctgcgcaactgcctcggtcacccatcccaaattgctccaggctaagcacacttaaccctggagttctttgaagattggcttccggaaaagaaattgcaacttgctgatatgagtattctattaattctattaaaccctaggccggcatgtcacaagcggtttcactagttggtaatccaaacgaagtagttaaaactagtaaattttaaacaatgtatactatactgctactccatctatttcatattatatttttttagtcaaacttatttaaatgtgactagtttatagaaaaatatagtagtaatttcaacacaaaacaaacatattattaaaatacagtatcaatgttaaatttaatgaaactaactcgatattttatatgttgctaaatttttctatcaaacatattattaaaatatagtgtgcaatgttagatctaatgaaactaatttgtcaacgggtgaagtcccaaatcacggtgctctcccatctcttttgactctccccctaaaaatcccaaatcatcggtcaccagcggccacgaccgtacccgatgagcaaggtgtgttccggctatcaatcttgtagtcttatagtttacatatagaagtctacttgtactttcttatctgaaactcctttaatatacgaggtatgattttgtataagacttggtatatggtggatcccgctgagtttagtcgattactatatcgggtatgtattatccataaccctgacataatatatatgcccacggttatgggttagcttaacaatattttttatgattagttccacactaattaaaaataataatgtgataaataatgatactttggtttagctcctggtttgaaatggttaattcctggttcggagatttggtcggttcaatctggcttggttgttcatttatggttgggcctatgcaacgagtatgttatatagcgttggattagtactgtttaattaattactctatttatttataaattcttaactctttgtcaaatgatgctttgcaaatgaatactaaattatgccatcctatattatctatgtgcacttgtataatgttttgtggcttgcggacattctattgcaataatcatcaaacgttgtccaaaccgaccgcgaccgatgccagccaaaaccgtccgcgaccgatgccagccaaaaccatccgcgaccgagatgccccaggcccccaaccgtctaatataaaagccacgtactggatactcgtcccatcaagccgccgcgaccccgacgtcctcgcgctcctgcgcacaactacacaagccgaccctaaccgagctcgaggtgactttcatattctttataagtttgagtacatttatatttacctttttaaaacatttagtagttatcattatattttaacgtctaaattaaaattatttattgttcaactataaaggaaaaagatggtgcttaaatagtaatgaagggattataaagtggttagcttttaatctagggataaagtgtgattgaaatttcaaaagcatttgtcacctgagatctagacaaatccctttttaaacatccattagagttggacatgataagttactggtagtagttccatgtaatcgacaaaaatcgcatttacttttatggaaagaagcccaattcactaatttaactattgcattaaattccttgttaatataattaaaaaatcaaaacacttttaaattggaggacctacctctgtacagaatttgtcctacgtggcatacaagctgcagcggttttaccggttggtaatctaaataaagtgtttaaaactagtcatcccttcattttatattataagttgtttgactttttttagttaaatttatttaagtttgatcaaatttatagaaaaatatagtaataatttcaacacaaaacaaacatagtattcaatgttagatttaatgaaactaatttaatattttagatgttgctaattttttctataaactttattattgaattaaactagaaaaaaaagatttgtaatacgtaatacgaaacgatggagtactagttgacttgacctatcaggctctcaccccatatccccccgttagctctccgcctctccccccctaaaaatcccaaatcacccgtcaccggcggccacgaccgcacccggcgagcaaggtgtacatgttccggccattgatcttggctgcgtgaaactgagatgctcagcacgagcacaccagccgctggccgccgggcgatatgcaggatctgggatgggaggcacaagctccggcagcgcccggtgttggatccaaccaaacagcgggcgaagcgccgccgaagctgtctgtccgatctactcgcgattttttagcgcatccgacggagaccgcgccttccttcatcacgattttagccttgtgtaaggcttggaagaaatgtgtctctccgttggcttgttggaagaaatgcttgaagcgttatttaagatcgagcaattttgctctatgaagtgcttttgttgtgacttgtgatctctctaatagaattggatcacacctcctagctaggggcactcattaatcgtagtattattttatccttttcaaaatttaattacatttagaattgccaattaattgttacctgacttgtttgtttaagcaactcccatttcagttacaatttcaaaaacaccgtgcatcctcaatgacatttggtcttcttttgcattgcccacaggacacagggcaacaaaatcctactttaaagagtgatggctgaaacgaacagccctgcaaccatggaagcacaagcacaggttgccttgacgaaatccatccaaccagacaccagcaacgaggaaatgacatcaggcaatgttgccggtaacaatgttttactgccattatccaacagaactgaagctcctactccgaggcatgtgattgtcactatttcgctcgatgctggccagaacacaatggttgacgacaatggtgttagacagggattaacagacgaggaatccgatactaaaacgaagctgttggaaagaggtgttctcacggctgcctctgctactgcagcaatgctctctcatttcctgaaaggagtattcaatcatcaccaagagggttactacatcatcctcgtcgtatttcttatgacggggttgattctggcaaccactgccacatggctcgcccgtaggcactccgccaaggtggttgtccttcttgcactagtcccacaggttcttgtggctggtgtgattacctcaacattttcttgacgaaggccttcgccctgactcttgcggtttgttccactttgaactttggaatcatcatcgtgagccaagtgcggatccagaattctaatagagggagagcttatatcctcctccccacgcacacacgctcttccttctctctcttcttcctcctttatcatcttctctcaataatgatctagcgaggtagaagaagacttgagtgatgagtcccaccagtatccacgttggatctgttcctgttgtgagtgtatagctacatctacaagggtcgagagttacaattatgcatgtgtatctatgtgttgatgaaaaatatatatttttgagaaatgaaatattttcttttcaaggcattattacttaatttgtccacaaaattgaagagcaaaaacgtttcctttagataggcccaaatgccagcccaagcacgtgtatggggccgtatccaaacaagacgcaactgggctacatgggccagatgggctaatatatctccatttgtcgacaaccctcgtacgcgtccgctcaacgcacgcgctcacacacgcggtggactcggtccagaaggatccggtgcacctaccttacccgagagacgccacctcaccgcaccccgtctcacagctgtccgggccccaccgcctccccggccccaccatccccctccccaaaattcgaaaaccattcggggaaaataaaaaccgctttgatgctaccgttacaactccactcaccgtcaccgacatgtggaccacccaacgtttcgggccccacctgtcagcgagctttctcccacgggtcattctctccctataaaggaggatacgtactagtactactagtctatctcacacgggaagtcgttcgagtcgtcgtcttcgtctccgttccgttgcgccgcctcgtcgtctcctcgcgccgccgccgccgccgccgccgcggggaagagctagccctagaggagaagtgggggtgagttgggagagaggagagggggcgagatgttccggtacgagaagggcggggacgtcgaggcggggacctcgggcggggcgagggagctctacccggggatgacggagccgccggagatgcggtgggcgctcatccggaagatctacgtcatcctctccatgcagctcctcctcaccgccgccgtcgccgccgtcgtcgtcaaggtccgcgccatctcccacttcttcgtctcctcccacgccggcctcggcctctacatcttcctcatcatcctccccttcatcggtgagttccccgttcttcacatggttgtttcaattttttagggtttcgatggtgttttttttttcttgcgaaggaaaatgggggaagaattcgaatcagttcgattctgctgcgttgcgtacggtttagatttcgaatcggatccccccaaattccactggaaatatgtgttcccctgcaaaaaatgtgtagtgaagtttagtgggatgatcaactgcgctgggtttgcgtgttgtgtgtgttcgtgcgtgcacgtattgatgcctttgcgtccaggcaaagcgatgggttcgtggatggtggggtggtgggtgcgtggtgtattttcgcacatactcctaataatggctaatttgacctagttttcaccactagaattagattgttttttatttgtgtgtgtgtgttctactgtgtggattgcaattgtttgttctgaataagaatggttgattggtttggtgtgcagtgctctgcccgctgtactactaccaccagaagcacccggtcaacctgatcctgctcggtctcttcaccgtcgccatcagcttcgcggttgggatgacatgcgccttcaccagtggtaactgatcatcgatctcgccatcattttttttttgttttgtttctagtgttcacaatttttacacccgtttgtgtttcatgactagttctcttgaaatatcgatgtccgtttgcatttagtttcttgctttcgccgtgttaagtttgctaagaatatgcttatggtggggctacataggaagtttcggagacattgtcggaatgcacattttgcctggtctttgtgtaaggccaggttgttgtcactttaatatatgcttgtcgagtcataagcatttggaatatcttccccttttggcatttcttagtttcttaatcttataaaagtattcggaatacaatcagcttgcacgttaggttagtttattaatgttggctccttttgccttttgtaatgttgaggcttgagcatgtttaacttttcttttgtagacatgcaaatgaatagaatcttccatagactattatctggaacctatttctaaagctatttactatttaccctgtcactgttcgaatcttctatataatgccatcttgtgacagtactaatttgagtatgatgtgtggtttgggtccaaagaatatcttgtgcatagtttttgtaaggttattgtttaggactttaggttgcagtactaacctaaaactgataataaaaaaggtttttcacatgagatcgaaaaatactcttatcttaatatcatttgattaaattgagatggaatgcatgctatgtctatctgagtagtatttcttggaacattgcgacctgtctgctatccgttggaaggcactagtatcttatacatctataaatgttattgaactagtttctttgatgatgtgtaccatattataatatgcccgtgttctagtggtggttaaaagttgttcatgtaaacagcagatgtatgtacaaagcattgcatgcaacattttttatagatattttagtagataatgatgtttactcttcatatgctatattcctatctttgctcagtactctgtttctgtcccggagttgctttttttttttggttgtaaaagatcaggtggtcactaatatattatgctgttttaacaggcaaggtcattctggagtctgcaattcttacaacagttgttgtgtttagcctgactgcctacacattctgggctgcaaagaggggccgtgacttcagcttccttggccctttcctcttcgcctccctcattgtgctgctcgtgtttgcgttcattcaggtcaaaagatgcagcattacactctcttgatctcctgtgcacctcatcttgttcttgacaaactcggtggctgattcgaaacttgccgtttgcagatcctattcccgctgggcaggatctcccagatgatctatggcgggatcgcgtcgctcatcttcagtggctacatcgtctacgacacggacaacatcatcaagcgctacacctacgaccagtacgtctgggccgccgtctccctctacctcgacgtcatcaacctcttcctctccctcatgaccctcttcagggcagccgactgagttcctcgcatcgcgtcacatcgtgttcatatacgttttcatcagtgaatgtgaaaatgctctgcctttatcatgagtcgcgtacccaaaaacaacaattgtatagatgccacaagtaggatggtcttttatcatgctgtgttcaacctagtgatcttatctacgtaggaaatgcgaacaaatttagattctatatggatatggaggtgatgttggatttgggttaatttgcttgatgtatggtggacggatggatcatggatggcttggtttacctttggatgaatggaattgcttctctctttttaccattgttttaacccttttttttaactaaatttactgctcaattctgagcaattttgatcctgtaaattcatccttgaaattctttggcagccataaattttgatcctgcaatagaaaagagggggtatagtgccacgtggcatctgccactcccgccatctctccgttgtcctctccaccgaccaagtgttgcaagtgcatgcgcgtcactggtttgcggcggcgatatgggcaagcacaaccaccacgacgtggaggcgccggccgccggcggcagcagcttcccgccgccgccgccggcggtaggcgtcgccggcgtggcgtgcacgtacatgatcgagaggccggagctccggtgggcgttcatccgcaaggtgtacgcgatcgtggcgacgcagctggtggtgaccgtcgccatcgccgccgccgtctactccgtcccggccatccgccgcttcttcctcgcccgcacgccggcgtcgctcgccgccttcgtgctcgtcatcgtcgcccccctcatcggtgacgactgacccacattaatttcatgcagcgctaattaacacatctaatacatataatgccacgttatagtatgattaactgttggattaacgataattatattgtgctgatgggtgacaatatggagcagttatgctgccgacgatgtttctccgtaagaagcatccgatcaacctcatccttctagcattgttcaccatttgcatgagctgcgccattggcctgggctgcctctcttccaaaggtacatatttgtgttccctacaaaattttctatcaaattattgcattccaaacggacttgcatccatcttaaaattaatattctctcttttcctttccccttccttgaaactaagccggcattgttataagctatctaaaaaaccgtcacaattttttaatggaaaacttttaaatttaactacagtatgattgtaactgaagcgggtattccaaacggatattaaccttgcatccatcttgaaattaatattctcttcttcttatttttttttcttccttgaaactaccaagccggcattgctataatcgaagcggcatccctaacgttcgggctggtgttcggcctgacgctctacacattctgggcggccaagagaggccatgacttcagcttcctccgccccttcttggtcgcggccttcctcgtcctcgtcctctacggtctcatccaggtctcataccaacaaccaaacagctgcatatcgatcgcaaaaactaaccattttcgtctccgacatcctgaatattagatttgatttcgaactccgtcattttcgtctccgacatcctgaatatttgatttgattttgatttctcaatgacatttgtttggtcgtgcacagatgttggtgccaacggggaaagtggcgacgacggtgtacgggtgcgtggcggcgctggtgttctccggcttcatcatctacgacacggacaatctgatcaagaggcacgcctacgatgagtacgtcacggctgccatctcgctctaccttgacaccgtcaacatcttcattgccattttcactgcactcgacgcttcagattcatagaatatatctctagagtttgttactagtagttgttaccctgctgaaaagcagcagccagtaactataactctttatagggaaaacatatgtagttatcgtattgcattccaatgtattagccatgaatttgaggtaaatatgaaccattacagtaataataataatgtacgtggcttacatgctgcaactgtttatgatgttggcaaacataatttggtagatgcgttgtatgtgaggcgtctcttagctcttacaacagtattcggcagggagatcagccattccaggaagaacagtatttgcacagaatacaatctaacgaaagagggaaaatttagctactgcactggcaaaaatatgcagagaacttggtttgaacttatctttcactgaggtgatatcatgatagtattatcctaccacagttaaggagcacgcgataaatttgagggcacgggattgcaacgtccagctaagttgcattgtagtcatcgaatgaggatgatttgtgatcaagggggactacaaagggattgaaatgcaggtgagcagattgtcccccagaagctcttggcacaagtcataagtcattgtccactgtttcctagggttcatatctccaatccagaactcaacagccaccggatgaacaacaggtttcaaggtgcgtcgagctgtacagtcctcaccttacgcaacaggacaccaagcctgtgtatgtgcatcaagctgacagctaattaacctgggaaggtaaggagataaagaggtttgagccgttggaatgacccaaaatggtagcatgacataccaatcaagatatcttctacctcatcaacggccaacaggatggcctagtaagcaattccgaacccgaatgataccatcatagcagaaacactatctttaagcaaatgattgcctgcagcaaaatgaagggaaaaatcataagaccaggtccttggctccaaagatgataaaggttttcataccatgtttgtcgacaacgaacagcctcttggcgaactctccttttcttatcatcaagagccttgattgcagcttgtaggatctgcaagagcatgcctttgtcatataagtgttttcaatttaataacttctatttgcgtctaacaaattcatctgaactaaaaaatatgaactaagcaaataaaggtaagttgtattaaatgcatttatctatttgtactaaaaatgtgcagctgaagacctgaagcatgacaccttattatctcctgccaataaggagacaactatccatgagccaaggcccatagtatagtacaagtatattaacagttgacaacattatgcctactccagaccatatcggctgcatatttttccaaagaggatactacagactattgcatgcatatttttccaaataagttacaatcagaattacctgtggtcgcatgcgataaatttttgagtgaggaagactagacatggcaactaaacattgtaaggctgtctctcgaacaacctaaaggaagggcaataagaaaaggttgtgagacatgttgagccataaacagaacaaatgcacggttagtattgaatggttaatgcaaataacacaaaggtaccatcatgtgaggatacgaaacgagctgcgtaaggacactgacaatgatgtggatgttctccacaatgcattctttgcctgcataggaaaaatgatactgataagttagcaactagatcgaataatgtgcatcaagtttgcagcagtgacaacaaaaaatgaaaatgtatataaaacagagcaataaatgatctcacctttttcatccatcagcattccagataagacgagcaatatactatacactagatctttatccttaacatcctgacttaatttagctatgctatcaaccatcacaagtagaatctgaaataaaaagggggaacaaaacaatgggttgattagcaatttaacatggtctggatgtatgatccaacaaaggatgtccatgctaatattaatattgcacatgtaatagtatggatcataatcaagaactaacccgatgggcttctgttataactgctggtactggagcattggaaatgatatgcccaaaagctcgatacaaaaccaatctgcagagaatgatatttttctcagtaacttcgaagaatataacatttgtaaaaggctccatatatataggaatcaattttctaattaataaggccactgccaggcaatatcataacttaaatccagaaacaaaaagagcactttttaggcataaactcatgatgaagacattttatgagaacaggcatgaaatttatacatagttaatgacgcttatgctaattagtccttaggctataaaattacagtacccaactaatttgtcaacagaaatgccttccccagataaaagaaataggcataaaagtctcttttacttcagtccattttggattgttatgcctgaagttaactatgtatcatttttgtatgacaaatgatgcagccgtgtcacttgtttcagcacagaccataaggaaagcagtacgaatgtagacacttactttgtagtcatcacagtagattccttgattttagagagaaaaattggcatcaatattgagaagaaacgctgcttatatagtggttttattcttgcatgaaacttcttattcaggcaaacttctgaatcactcatcatcacatggaatgcatcagctgcagatgttgcaagagaagcatatgatgaatcactgataccatgttcttcctgatgggatgaaatgccagccaaactctgatctgagcatagacatttaagaagaaacagtgaaacatccttcaccttttcatctcctctcataagcaatcccttgccaagccaggccaagccagagatgatatcgtcctttgattcaatgcttccagacaagatctctgagcaattagcatcatctgaacggccagcacaagagagagatgtcttcatattgcttcgcactgatattgttgagaaacacctctcaagaatagtatcaatcactttatccagtttattctcatgtgagaattccgaattgtgtaggtttttgttgaaaatagaagctaatgcatgggcagctggaatttgtcctttcagtaggaagaccgtaaagagattaatcatcatcagcatatctggtacaggtgtttgaggccgaagaccaactatgaccgatgaaagcatacacatgagaaatgtatcacgaacagagtatagag

SEQ ID NO: 10666 - DNA, 11941 bp, Oryza sativa
aagaattcaacacattgtgacatactagggtattaaatccacatccatatctgaaacgaattgcttcatatccagaagaattcagatacatgcagggagtagggtcaattaaccaaacagacagagacaaacagaaggatcagttactgttgaaaactaaaccaaacaattgatgatcagttggtcttcagtactaacatggattagtccatatatctatgaaacgaactgcagcatttcagataaatttccaactaacgttttcccttctctgttcagttcacaccagaattcaggcaaaacgcaacccatacaaaatcatgaacaggaaaacatcccacagcagaagctcctgcgcgcaggccggtggggaagcggctagacgccagcagagaaggggaacggaaggagaggggcgccggagagttccgccgttggcggaagggaacgcgatgcacaagcgccgccggtagaaggagtcgaggcaccggcggaaggagtcacgctctccacctccgctcgattgcgatagatgaggattccgagcgacgctaaccatgagacccacatggagaaataaattaagtgtcaaatctaccccaaatctgtcttagcaccaatctacctaaaaaaataaacggttcagattagttctactggtagtatcatctctctacttcctaagcaatgaccttattagagtttatgcaggccaccacctccttccggtgatccattcctcaccagagccgagggcatccagctcctggccgctctcggcagcgggcatgcagatggtgctcgccgccgccgtctcttccatgggcgccggcgacgaccagctggacctcgagctgcatctctagatcgacgaccgtacacctctagtacgtacttctgctcttcaatttcctgaatataaataatttgctttgcacgtaatatactttgtgttgtttgtaaggtataggatttgggtgatctcagtcgtgtttcttttatcttttatggtataccttttcttttcctggttacgacctttccgggttgtaaccttgtaatttttctcctgctatatcaatagaactttacaccgacttatgcgagtcgttcgaaaaaataatttgctttgcacgttgatgtaatatgaaccgtgtttttggcctccccagttgcaacaaagctctggttagtgatcatggggattaatttccaacatgtattattaattattaatttgtgctaccatgggaattaattatctattatctatctatctatctatctatctattatcttctattatctattatatactaaaagtccattaatcttcctataaacactcctaagccaccatgtggcgctcctacaaacgctcctagatcgccacgtggcattttataatcttaccgtcgattttcatttaaattggtgtacccgttattttagaccattagattagattagatctatttgctttgctttctgtcctgtgcataatgccatttataccgggaaaaaaattaccgtcggtatgtacttggaaaaaaaaataaaggtacgtttagttgatgttcctttaaaaaaaacgaacgtactttgtagttacgtacgataaaaaactataaaacagaaaaaaaaagaaactgttcacttgaaaaaatataaatatatatatatagacaaaaaaaaagaaaagagcctttgaatattttttaaatatgtttattgatgttttcctattaataatattttcatttattatcacatatttatgtacataggtagaaaaaaatagacattgatctttttaaaataaggattttccgtacaataaaaataaaatttattccatagatatgatcatgtggcgatcttacaagtacccttaccgccacatggtatgccaattttcatttaaaatgatggacccattttatagattattagattagtccgcttactcttagtttcatgtgtatacgagagattgtttacggatgttcgattgaaacaaaacaaagaaagaaatatatgtgcatacgataataaatctataacgcccaaaaaatacatgtataagagtacgtaagtacgataaaaaaaccatcaaacaaaaaaactttagatattgttcacttaaaaaaaggtacgtacttatgtaggagtgaaaagaaaagcaataaaatcttaaaaatatatgtacgtcagtagaaagaaaaatagacggtctttttaaaataggattttctatactataaaaataaaatttattactccacaaatatgatcatgtggtgtttctacaagcactcttagaccgccacgtggcagtctataattctgctgtcaactttcatttgaaataatggacccattattttagatcattagataattagcccgcttcctcttaatgtcatgtgtatatgagagaaactatgtaccggatattcgattgaaaaaaaaaacaaagaaacatatgtacatacgataatgaagccataaagccctaaaaaaatacatatataagttggtagaaccttaaaaaaatatagatgttcttcagaataggattttctatactataaaataaaattcattactccaaagataaatatgcaggttaaactattttaatataaaaacaaactaaatgtgtttaatcactcattttcttaaaattatttttaattatatagtcaacttataataaggtgtaatcaaatgttgatgacttatcatagttatattatagtgctaaatacattacaacacatggagccgacataataatttaatataaaaatactttttcaaataatttgtgtgacatataataattaatgttatgataatctttgaaataatttcatattatattttatggtcaaatatcacttgataattatataacactaactgaaatctacgtgcatgaaaatgaaacaacgttatgttttgtcaattatatctgactttattttaatttttgtgagattaagattcttaattgtttattgtatttttcagagttatttgataggtatgcctaggcaatgatgttgctacaatacaactccttaatccatcacaaaaattatggtcatttacatttgttattttgtgaaataggtttggtaacaaatgaacaatcttataacatgtacataaacctactcatgatatattttcttacaattgagaaattataatatgttgggcataagtgataattgataaatgtacgtcaaacatcccactgatgtaactataactgcacttcaacaaattagttattataaataatttgaaaaaaataaatacatttagaattagtaaaggtgtctcttgcaattatgaacaataggtgagaaaaacaaaccagatgctaaaatatagatctttgtcaaaatacaaactctgaagattgtcacagtcacatgtttgcttagctatatatatgtttaatgatcaacctcacttatttctaaagattacattgatctgtaccataaaaaattaagaagtattgcttaacaccataaacaaatcgtgcctacataaaacataaagaaactatttttttatgggaagaaatgaagaactattttcatcacatccatattgactttgtttccttgaaggataccgagcatgaataacagagcttgctatgctaccacaagtatagcagggggcacatatggttgagttgaagaaagcccagaggaggccaccattgataatagtgctcaattttctacttacttactgatgcaatcttcttcgagggtgccgatagcgaactaggattagttaaaattgtgctccacactaattgtgagagtcacgactatgtcaactcatgcttgaaggcagcggataaataaagcctcgatggttccacccattagagggggcattcatgtctatttcttaatggcgctatcctattaaccaataggttaatacaagcggtagttttagaatatttattcatagatttagaaataagtgttgagataaacatttaggtatgtagtggaaatgaatgtcttatgtattaatggcgtattaagtttattttggtggtacaaatgaagttccatttattaaaaggatatctaccttttaagaaaaatgataataaataatggtgataataggcaagtttacaagtaacctggataaaagtgatttttttaaatctaagagacattcttatcatttatatattaaagtttacgatctatttcaccatatagaattttgttattatgagacaaaatctataatttcttaaatctatttgatgagatatgacttaattctaatagcattatttctataaacaataaataagatgcccgcgcatctgcgcgggcttcctttctagtttaattaaacttcgttatgccatatctaattgggtgatgatggaacaacggcttggccttcatcttctcggtcacccggggaagagaaaggggatagaaagagagagataacggagagggagggagaagctggatttttcacattttggtttttttgaaaaacttattttgtaaatagaccaaaaaaaacttatctcaaaaatggtcctttttgaggcgccagagtcactgacgctgtcgtccaacgcgacggcgccagctcctactgctgacgtgggtggcgggggagcgcgccagccagacaaccatattgccctcccccctccccgccgccatttttcctctcttctcctctatagtgtagaggagagagatgtgcaacatttttattttcattttatttttttcacacttatgagcacataagaaccaaccatgggaaaaatatactcaaatgaacgaaatacgtgacctgtagaatttttctaaatctataccgaaaataggcatcatttgggtgtcatttcttaaaataggcgcaactttcaaaattaaaacctccaaattctgcttgcaagattgtgttttcgaggtgagaagcttttcggtagagctttagaaaattccacaggtcacatatttcatccatttgaatttattttttctatgataggttcttgtgtgatcctaagcgtgaaatattatcaaaaaataaaataaaaataaaaaaagttgcacgtctctgtcctctatactagagaggagaggagaggaaaaattctacaagtcacatatttcgtccatttaagtttattttttttatggttggttcttatgtgctcctaagcgtgaaaaaatatcaaaaaaaataaaaataataaaaatttcagagggggagggtgggcgccagccacactagcgcgctccaactgccacctcagcaccgtcccaccacgtccgagagaggctggcgccgtcccgttggacgatggcgccagtgactttggcgcccccaacaagaccatttttggataagtttttttaggggtctattgtgaaataaatttttcaaaatgattaaattgtgaaaaatccacgagggagaaggaagaaggaaagtagggagagagaatgatatgtggacccatatgttagtgggtcccctcttttaataataaatgggtctcatattttataaaaaaaattctaatgccacgttagagtcacgtgggatgaaaaccagctcaacactatcacatacgcgtcagcgaaaccatcctccaaaattgctgagggagttaaattaagaaaatgctaattcacacgcgcgcattgccgacacccacttccggcccacaaggcccacgtgcgcgtgcgattctttcttttttttcgcgacgccatttctttctttctttatttctttctttttttgctttttcttctttttttcgcagctgtcgttgtttccttttttttttctttttgccgtttactaccgcacgcgtgtaggagtaggactcaagaatttaaactttcaactcaagatttttttttgaaattttcaactcagatttgaaaactttcaaatcaacatttaaaaacttacaactcgaacttgaaaactttcaactgggatttgaaaactttcaacttagattttaaaactttcaactcagatttgaaaactttcaattcaaacttgaaaaccttcaactcggatttgaaaactttcaactcggacttgaaaactttcaactcagacttgaaaactttcaactcggattcgaaaactttcaaatgaagatttgaaactttcaattcaaatttaaaaaacttcaagtcaagatttgaaaatttaactctggtttgaaaattttgaactcaaatttaaaaatctgagttgaaaattttttaaattaagttaaaagtattcaaatcttgacttgaaaattttaaatctgagttcaaatctggaattgaaagtttgtttcaatcaacttaaaaaaaaagaagaaagacgtgtgatgaatttttatccaaaaaaaatcgaaaaaaagttagcactaagcgctcttagcatcaaaaaacgcgcacggcatttacctcctagcgcgtacgcgcacgttaggagcccccgttaaattacaccaattttaatagttgggagtcgaaatatccgtattgtgattcagggcaagaattagattcgacctgcttaagagagtcaaaacagacttattcctagtttatccgacagtaaatacctgaccaaatcgaatgcggcctggttcaacacctacgtcgataaacccgtagactgtagtgggctgtggttttggagtgagccgtgcagtgggaagaagctggtatttggaataaattcactttaggtcacacaatttgtcactgagttcgaaaattagtcctgggtcgcaaaaccggatacaacgcatgactaacttacaaaaccattgcaaacgaggtctctcgataatattgtccctgtttctggttgatgtatcacctacttggctcatttgactagatctttgtcccacatgacattgacatggtgtttatgtggtattttaatctggaaaaatgtcacgcccagaaatttccgaataaaattccaagcagaatgtgcattaaaatccccgtccaggaccggccggggtacacaaacgacaacgttgacattcagatccacgtcttacaaacatcataaaagtcttacataaatgcaacggaaaaacgaaagataacaggagctaagccttgacttgaactgcagcgggaaaaccactccacaggcatcctcgacggcacggacgaagcctactcctcaaagaaactaccatccgacacatactcatactctggggttggggaaaatagagcaagactgagtactatacactgtactcagcaagtcataccggaataggggtatgatgcagggagttatcaaaggagagctagagtggttcatttgcataaagcgagcatttataaacagaagttgaaagaattaaacagttgtaataattaatcaatattaatcatccactgtccaacgctataccacgttgcgacaggcccaaccatccacctaaactatccaatttcaacagactaaactagggtgaaactaatcacggtgaatctggttgaccgcccataaccgcgggcacgactatttgaatagttttactctgatcagaggtgtacaactgtacccacaagacacagccccacgacacgttaccgtgcgctgacatgccaccacgacataccagaaagaggccgtgacaagacccttcgcataaccccctctaaccaagcacaccacacctcaggtttcacccccactcctcgcaaggcagcgggcagtcccctctcgtgcctaggtgaatccagaaacgacggaggccgtcgcagggcccgccccgctccatcacgcccacccttgcctagatgcgtcagctagaggaaagctacactacaagcccagccgttgcccacgctggcttgtggtaagcacgataaattcttccagggtttcccgcgaactggtccttaactgccatggggtgcgaccaacaaaaccatgcacccacagcccaccatgtgattcattttaattaaccaacaccgaagcggtgtcactaatctaacagtaccattagaaccaacagtctaaacattaataggattttccccattgtgtactagttgaactaagcatggctaagcaatccctagtccaaagtctattcatgttataacccaagctaacaaaggaacatggtaccaaaataacatggccgtaacaataggtaaacatctcatagtaacattataaaccgatgcagtatttgaagaaaaacaatagagcatttgcaatataggatcaacatgttcaagtgacaagcatgacttgccttgctctgctgctggaggaacctcggcgactatttcgaagtacaccggagcgtcggaagaaccggaatctaagcgacatacaaagcaaacaatacaaataggctataagactactaaaacagagaacaaaaccatttttaatggattctacacatttttcttgatttactgagacttgaatgggcttaaacggagcacggatgaattagttatgaattttagaagattcactgtgtttattactatgacaaaaagtccttaaataatttattgcgcaattaattcccagggctgacgtcatcaagggggcggcgccgacgggcggggcccgcatgtcagcggctcaaggggagagaggggcgccggcaagtagggcccccgggtcagcggcccaaggctgccgatccaccgtggaccgggaccacgcgggtggtccaccgccggtccacgggaccgacggcccagatcgccccaggaccgatcggacgggcggcggcgacccggctcagctcggctcaaggctggccgactggccacggtgatggcgacggcgcacgcgcgcgcacgcgttgccggcgatggcaaccggcggcggaggctgcggcgcgaaggcggcggcgctaagcggcggctaggaaggagagggaggggaatagaggggagagggatgcctcaccgagagtggccggcgcggaggaggacgacgacgaacggcgacggcgaccacgggcaaacggcggcgacgggcggacgaggtccagaatgccctaagggaggaaaagagagaggttagagggagggagacgaaccacggcggccggcatccatggccgaaggcggcggtaggggtagagctcaccagagcgcgaggggatgcgggttccggcgacgaatctcgacggaggaagggcggacggggtggagttcgtccttgcgaacccgacggtggcgacggcgcggtgcggcagtgagcctagcggcggctagcggcggccggagtagcgggagcggcggcggcgggtggttgcacggcgcgggagcgatggggagcacgagggagttcggcgaaatagggaaaaagagagagggggcgacggcggagcttaaataggggaggggaatcccggacgtggccggtaggggcgggattccgccggccaacgcggggagtgggggaggagagagaaaatcgaatcccggccatctcgtgtgcgggcgcgggcgggagagagaggggagtgggcgcgggaggtgcggcgcatgcgcgggcgtggccgacgtggcccggaggaggtggagacgtgggcgcggcggcggttgcgggcgcagcggcgcggcgcgaggtgggagacgggtccgacaggtgggccccacctgtcggtgacccgggtgagaggaggtgggcggccagctcgcgcggcctagctgggccttggccttcggccggcccagcgggaggggaggaaggaaggagaatgggccggcggccattcaaagaaaaagagaaaggaaaagaaagaaaaagaaaaagaattttcccagggatttaaatattgcttatgctcaattttaattggttaaaattatttctagagctctgaaaattccactaaaaatcttgttagcgtatttcgacatgtagaactcaagaaaaattccacatgccaattccgattattatttgcattaatttatcaaggtttactcttgctttacacaggtattttcttgagaccatttataacttcaatttaggcttgggaaagaaattcggggtgtgacaaaaaaaatactgggttccatgttgagcccacaaaataataaaaaataatggagcccatgtggtgcccacatatcaatgagacataaaaataaagaaatggaaaaacaaaatggacctactcgtcatcccctatccatttctctccatccccatctctggcgacatcgctagccagtgagcttgccattttgtccacgagaaggcggtgattgtgttaacagtgaaatttggtaagctagagaattatcacatcaccaatagtcggattcctgctatattcggttaagtaaattaatctattaaaggaaacttatccagaagtgaccgaattcaaggaggatgcgacatggaaagttatctatcaattagaaatagtttgttggtttccttttatctttagaaaagtgtgtttagcggtaagcaaagaatagaatcaactggcattttgtcattgatgtacaatagtatatccttaaagtgcaggaagttccatggtattctatcagtggctcagtgcagaatgagtactccacaggaaatttggaatagttctcttttttttttgttacatgtaatgcattaaggaagcaacgtgagatgcttagaggaagcaacaacttgacaagatagagttccatctcctatcatgaaaaacagtacgacttaacacgattactgcaacaaaaattatgctaatggtcgaaacagcattggaacacaccaaatagaactttttaggaaaaaataacctaccatagaacagaagtcattgttggttctccagaaaaccttaggggtggttctccagaaaaccttaggggaggaatccaaaagaaaggaaatgataagaataaaagaaaaaaaatacagaacaatatttaattatcaacaaacaggcagataggatatgaaactcatgtaccaaaaagtttcaataatagctgcaatggaaatggagtgtcttacacaagtttaaccacagagttgcaacaaaatagatggcattgcgatggcaccacaacatatgccttgctgctgtagacatatgattgaataaatgttcacaatcaagtgatcaacagggaagctagctttgggtttaacataataccatacaaactccaaaagtctagattatacaacttcagcacatactcaagctatattatacaacttcagtacatactcaagaaatctataggtgagctcgacctcgagcacctactcgggcacctattcatttgctgacttgagcacctccttggatatgggtgtgggggtggcagttttcttggtacgttggcgggggaaatgatcacccctcctttccccttcttgctcagcgggcagtgtggttgaaaaatcatgaaaactttatctgccttcttggtctgcggataacaagttgccaaggtcatcaagacagttagccggcggcgagcatcaggaagctatcctggtgggcatttgcggtgagcttaatggagtccaccctatcagttcgaaaaggaaaacatcgatgagaaaacattttcgcacaaaacattttgcaccaaattcacaaaacattttgcaccaaattgcaatctcagatttatggctcactcaatgttagatttcatcagctgaaactctatcatgaggacgttgaaatcagcccgcaacaggtccatctcccgaccgagatcacggataagtaagccgccgggcagtggctaggatggtagggggtgtctgcgaagtgtagaagagacgtgcgaaccacgcaggtggcgtagatgcggcggcgccggttgtcgtcgcggcg

SEQ ID NO: 10667 - DNA, 11874 bp, Oryza sativa
ataaatgataaaattggtgtgcttgtgaatttgaatttttttaaagatcaatcatttaatatattcagagttttttaaacatatcatgtttaacaaaaaaatacaatcatttttttaagctgcggaggtattaatgatcctatttcatgatataagtttgtcttctttctttttttagatttttcaaggttattttctttttttggatttttttaataataattttgggtttactacatattctgagttataggagtaacgagtaggtataggatatttaaagaaggaaaataaatgtaaatttgttgttttagatttgttttttcttaataattttgagtttactatatattttagagttataggagtagcgagtatgtgtggtatatttatagaagacaaaggagtagaagtttgtggttggaaagggagatagttttggaagcctctagaatccatatgtgatatttttctctagatttttcctcacatatgattaggtgttttttctctagtataaatttatgattttttcttcaaagtaagagacgccaagtggaccaatcaaaagctagcaaaagctttagattattagatatggatagctgtttcagcaggtgtgtcatgctagtgagcaaaaacaaaactaaaatgaaacatatggggcatatgtcagatccaaattcaacatctctttttttttacctgtgtttttaataacgatttaaaaaaaatcaattatgtaaaataaacaacggtgcaaacccccctcaaaatcaactccaaaattaagattcaaaattcaatttttggttatggatcatataagccaagaagaaaaagaagaaagaaagaagtacaccaatgttcagagaaagagaaggtgaagatatgcactgacaaaagaaggcaaaggaaaagccattgaaattgcaatcatgcaggagcaactctaaaaaaggggttgatgctgcaagtgcaaccaagctgtactttactctgaagggaaagcagaaactcccctaaatataagggacgcgtcatttacacatgttaatacaccatctgatgactgtaaaacccacaggtaaagtaggtctaaaatggtgcaaaatttgcatgcaaggttcattacagaaaaaattgggagctaaaataggggcctgaaagttacatcatgcacggtgattttcatttccaggagacaacagttcagtgattaggcattacttttacaaaagccagcagtcatcgagtgctaagattcatcgatgatggcttccaaagaactagtgctttcatttttcctttcttgctgaatacatcatattacagtaattaacaaagaaatgaagaaaattggatggagtcaagggctgtcatgaggcgcacctatgagcgcaaaaatcatggtatgcaatgcaccaagtggcaccacaattttttgttagggctcttggctgttcacgcgtttctgaagctccagcatttcttggtgatttggatccagagaaagggcggctcgacagtcgcgaagagcgctggggacatccccgatatgctcgtggaacgccgcgcgaagatgcaataggtggaggtcagctttgaatgcaatcgccctggttagctctgcaattgcttctttctccttgtgactatccatcagtactgcaaaccaaagccatcaaaaatcttttaactactccatttcttaaaaaacaactacatcagatataaaacacgctttcagtgttgaaagttgcatgttcaaataagagaaatgaatacacagaggaaattataggtaaggaatactgcaatggtgcagttcagtcaatagttcactaactaaatttgctctgacaaaaagaagattcagtaatgacagcagacatttactctacttaaaagatggtagcaacaaagtatctgttttgtccagcaaggatgatgaacaaattaacagttctccatgcagaagccaagataaggtatagagtaacctacatagtaacatagtattcaaaactaaaggtaattctcaactattaagtaaactttagtctttttacctgctgcacggtatctgtacgggtaaacacgtaatggatccaactgggtcactatttgcaaatctgtcatagtttgctctcgttcacaatattccgaacgtttctcataagctgaagcattgtttttagctttctctatcaactttgtcatttcttcatatgcagcatccctgttattcctgagaaaatgaacacgggcaagaccttgatgtgccctagtgtgtcggatcttcaaagcactcgtgtagcaatcagctgctgcgtctaacttctcacaatcaacataaacaccaccaagattgttcaaagcctgcaggtggaattatgcaatattagagaaaagcttatcataaggaacaatcgagagcaacttgttggatctgactaagcaagataggatcaaattttggatgtttgtattactggcagtcataatacagtatttaggatctatttgtcttaactagtaggatcaatttcagacaaaaatcatagcaagaatgtcgccctttggtccatgattaagttaaccgacacttttcatgttcagattctttaacttctctctttttgttcatgcatctccacatcatggacatgcataaaacagagtaggtatatagtatgttgcactgatgatacctcaacatcaaggatataaaattttgagttattggaatagttttgaacaataatataatttataattagccagacaagacaacattatccttttctcaccagcaactcttatttcactgagacaactgatcactgtccacaaatgcaagttttttttaatggtctcattgaaaaatttaaggcatatttaatatcacaatgcaaaataagtgtgtatacactctatagtctatactctaagttatatccagctttctatagcagctagagatctctcagtctatgtgcaaaacagaatattcccgcaatttggagggaacaatataaaaggaattttctcacgcctcatacttaaatgtttggagggaacaatataacaatattaaatgttatcttcgctttatttactgtcgagcaaagcatgcagggtcttaaaaatatagaaagtttgggaaaaccaagttgctctccaccttaccaagtctgagcaatgtgagataaactaagtgttcaaaacaaatcaattagcataagtgaatgctacgttgaagcatttgtgtgctggtgcgcaacaatactaacctgacccttccgaagccggtctgaagggcactttagtgcatcttcaagaagcgatataacagtcgcagaataagaaggatcaacacctgagtcagccaaaacataggctttcagaaagaaagcctcaaatgacctttgaatagaaatagattcctctgctttttgtagggcctcctcacaatgcccagtatcgtacaaaagccacccctcatacactagccgttcatgctcagttgctgcatgttgccgtgccaattgcaaactgcgcattgcagcctcaggacagttcaacctgtaaacaaaaaaatattaagcatcatctatagttatgttgagagttgagaccaaaatggccacaagggaatcaacagagtgaggtgctagtataactaacctaaggagcagcaaagattgtctgaaatacaaaacaccttttgctgcatctgactcaagcatccggtaaatcactgaaagggaaccaatatcatccactgatgaccagcgttcatacagctgaagccaacactcagctgtattccactgctcgacatgtgccccaagaagagtgcctattttggaagcagctacacgaccttccaacattcggtactcaggagaaagtgtaaggatagcatggatatcacaaattgcagatttgtagtcttcgagagcaagatatagacaaatccggagctccaagcattccaatgctagcttgaaacccaatagtcggttgatttcctctaaggcaagtcttgcatccttttttctcatcaaggatgcagctcgatacatgtaagggtaagtgagagttggatccagctcagttgctttgtcaaggtcacccaactttttatcaccctctgaatacagagatctctccatatacatccatcctagtggtacacttgatgttatgaccgaactgagcttctcataagccaaaccctttctacctcttgtaccagcaattctagcaagaccagcaatggaatacacatgaccagctgagaaggcaacactaaattggtgttcagcttcattatattccttccttaaaagcctaatgcatccaagctgatgaaaagctatttgcttctgtgtaggagtaacagccaattgaacaagcttctctgacaagcacacggttgcctccgtccttggatcaatgttcattgcaacctcactaagcaagcaatataacaaaaaggaggcatgtccaaccatgatgcattgctgctgttcagttgcacttaggaataggctaactacatgctcatcatttagacaatctggaagctcctgcagaaacacttgcaagcaagatgcagcgaggactggtgcattttcttcaaatgccaatgccatgagctcaacagcatcctgccttgatgaaacaaatgaagctagtttcctatcacacgcatctttaagcctgtcacaacaaaatgtatttgcaaacaccaggatctccaacaaggtttccaaaggcaaatcctctaagctatatgtacaactaaattcagatacagccctcatgccctccagtgagataccattctccgacaaatcaacaagatcaagctgagattcagtgaatggtccattgagcatggaccagaaagggatcgatagagaagcaatcttgcacctattgcatgtcaccttcccatcccttatttggaaggtcactacaggggaaactttcgaagatgtgccgatatcacaagaaccaagtatctcaaagtctccctcgggcatctcggatgcgacatcaagtggcccaaactctttgcaacacttcctacatgacgcgaggacatcggatatgatatcctccccccgcttctcataccgcagccatgccccaaacacaatcttctcatgcacagtggtcgcgcagcgccacgcagaatgcaggctcctctggcgcaatttcgcctccccaagtccccgaaacacctgggactgtatcaaatacagccctggccgctcgctcggcacacattgctcgagctcctcatggatcctggacagcacctccacataatccaagggcttatacaatggtacgaccggcggctccgcgatctttatcagcgactcgctgcacatccaaacaatcggcacaaatcatcagtatatctagttcaattttcagtagcatcacacagaaatgagctgaacgcggtgagagaatcgaaaatcttcgaatcaaatgtagtggcccttacatagaggaaggcgagtaggacgatttgggcagcttcccacgctccacctgcagccatgactgcggattgaatccatggatatgctgctcgtcgcacggcgattccgacaggaagctgctcctcatagagcacaggaaggagaaaacctcccaaatctccaccactcccagatttttacacgaacctggatacgaatcacgagctaatgggggtacgagcgggaatccacaccaaccctagctaaaatttgcgcaagaaaacgccaagaatctgaacagaaaaagggttgggaatttggtggccaaggtaaccacctttttccagctccaccaccaccaccaacccgatccaaaaccacaagaactcgaacgaaatccacaagaaacgggccaaagatgggtcccaaatctcgccgcaaaaatcccacctttccgcgccccccgcgccccccgatcgaattccacagatcaagaagccgcgcccccgcggcaatggcggggaggagctcggattcgggatcctgcgactgcagggagcagcttcgatgcagaggaaggggggagaagaagaagaagaagaaaaagagaggatttttttttcctctcctctttcttctctctcttgtagtggtagtggatgtggagaggaataaataaagtatggagattagattaacctagtgttagaggaaaaaaatatttataaatttttttagggtgtgccttttgtgaagagagagagggaaaaaaatggaaatgctctgcacatgaatccatgcataggatgcagctggatggaccagcttttgggtgtaggaggaggtggaggggatgaatcatgaatgtgtttgttcaaatttgtgtttgtaagttttgaaaggtttttcaggtttggtctgaaatggcactttgccacaggacattgattgacattgtgattaagttgaattatggaggtatgggtacaaatcagggtttatattcctcttttgtaattgttgaaacatctttggaggtaaaaaatttattccaaaatgctttcagtgtatgtaagttgaattatggaggtattggtccaaatgacgatttataaataacccttttcagatttgactgaaacatcacggtggtgagaaaatttcattcgaagcatttttaattgatcatgggattgttaaaagctttggatctgaacataagttactggcgggcttactttacaaatttaaaaattaaaaaaaaatcccatattgggaccacatatttttaatttttcgctccacacacaattgaaacaacaaagttgaagtatcatgtgtccacaaaacaattggaacaatgttgcaggtgtcagctggtagctgagagtttggcatagtttgtcgtttgttgagaacttgcattaagagcagaaaccaaattaggtttcgttgttatgagacttttgtttccaaacttttttagggggggtttggtgaatctaaactatagtgaattgaagtggcaatcgcaactagtaacaaccgtactttgtttgtggagtccgtgtatttatatcatgttcgctggtatgttgtaggtggtactaaatttagaattaataatactacatgggaaactagttgtttggaaaaggctaaccaaatgcagagtctcataggttagccaagagttgattatataacaagcatcttattaacgataaaaaataatttataagtgaaacttttatatacgtattcttagcgacataaaaatcaatgctgagaagaaactatgtttaatatatcctaaaatcaacataaaaaattaagttttagaatttaaattttgtcaacggctgatttcatatatgggaaaagatgaggccgactgagaatgagagtattaatgatgaaatgcacacctaaacaaactcataggatggttctatcaatcaattttagctgatggaacccatcttttagatacttactcgctccggtttcattttaattgacgttttatacaatgacacagtctacaaaatatatttttaaccttatttttctattataatatatataataaataaatgtatgtttacttttattatagtattttgaaagacaaatctatatatgttgttctagttcctctaaactaaataatttttaagttatttatggtcaaaattataaaagtttgacttcaactttatctaaaacatcaattaaaatagaactggaggagtactgatcaatagtgagtaggagtagtagttagttgtgcatgcatgcatgaatttagttgaggtagatggaccagcaaacagatgatggattggattggattggataaatggggtcacgagatgagcacaagtagagtgaagacttagctgctaaaaaagaggtcaaaaaagaagtacatatatgatacaactagaaaaaaagggccaagggttaatgtagacgcattgatcgatcggaatggtcgttgggaatcataattgggtttgtgtggtaccctactcttgcttatcaagaacttattatggttttgaaaaaagaatttggcgtgcattgcaaatttgcagcataaatgcattttcccagctagctcaaactgcctgccttgtagacccaaacacacacattcttcagtagagaattttggaatgtactactgtgaaatggatttggagatgaaactaacgaattcttggctttgtttgtaataatttgaagctttgattgaacatttggacgccgttttgcccttcatcgaccatcatgcatccatacagactgcaaaaataaatagactataatagaggtctctttttgctgctcgatgcatcttgttctgtgcttgctgcccgaccatggtgacaaactcggcgccctctcatgcctcgtgttttccacctcactcacgctatatcgccgtcgcaaacatcgtcgtttaaaatgcacacaaatttgtgtaaaaatctgaacacgaaagtacagataagatggcattcgtcgggttctcatttttttttccaccaattttgcaacgatgcatatcatttgaacccttttttttcacaatggagctttcttgcttggtgtgatctcttggggttaatgggatgctgaatagctaactttttttaagatataaacaaacaaattaactattatagagttgaaaggatttttttcgccggccagccggtgacagaatgacgaccaatttattactccctccgtctcataatataagggattttgactttttacttgtattgtttgaccattcgtcttattcaaaaaaatttaaaattattatttattttatttgtgacttattttattatccaaagtattttaaacacaacttttcggtttttatatttgcacaaattttttaaataagacgactgatcaaacagtgcaagtaaaaaatcaaaatcccttatattataggacggagggagtaagattcaaggaaaatatgtaattatggacaaggatataatctttgaaaaacaatttgatcactattttctattataatatatataggaacatcaataaatatatgattttagtgaaatacttttttaaaataatacgtatagcacaacattgtaacgtaaatattgagctcggtccattcactaacttcacaaagccttatttcgatgggccgaagtcacggcccatacacttgcatgggccagatccaaacgaggattagggttgaaaaaatatattttcctcccttagttatagatccagtttcattcgaaatccctcgatcgtaaaatcagatactttcagtactgtagatataatatatcccgtatagtaatacttaaatataatatgcctatatttatacggaaaggtattccgtaagtatgcataaatatacacaccataatgggattccacacatacaccttgtcctgtttggacgcggcttgcctgctccccagggcgtgctccgatcagtgctcccgtatacgcggcacaattctagcgttttcctgtttttttccccttagcccacaaccaggagaaagattcagagaatcccgttccatcaaaccgaaaaaaaatcggcatttaacactccaccgcttccagctacttgctcttttagatttctttatcctgtggcagcagtggcgaagggtagccggctgccggcgaccagaaaccggcgagcagagccggcgtggtggggcggcagcgagggatgagcaggaggaagctgcggagcgacgagtggtggcgcatcacgcgcggccgtgctggtacgggcggagcaatgggtatcactagccactgggtagtggctgaagacatcgttgctgataggtctgaaagggagcagtacaccaggatgtgcaagaacctatcaaacaacacttcgaagctctgaagtaacatctatgtattgtagaatttcctaagtaaatgaccgcaatcaagcaggggtccttagaagcatgatttgatctaaaacaactgagccttttcaattagcactatatattggtttctgacagtaagatctgattgcattgcaggtttcaacttcagagtttacaacccacactctgctccacattttatttctatcatgggagatgttaaataattgttgtaatgatttgagaagacaagtagagaataaataaatgagcagccgaacattattcatgtacactctgtagttgaatccatcaggagagaatgatatttttctcataaacagggttgatcgaaagttaaaaatcaataatgacaaagaacatgagcatctatgtttatcttttgggtttctgctggatcatttagagtctcatccattgcttttaaattttggtgtggatatccagaagtgaggtctttttctgaaaaatgtgctgaggtgacaagctaatcctcagccattccaacgacgttacaattatccaggagtgaggtgtgattttgaaaaaattgctgaggtggcaagctaatcctcagccattcccacacgtttaataaatcaatagttgacgtgccgatcgaacaacgcatttgctttgagctggcaggagtagcaaccataccgcccgcgctggccggaccggccgtacgcaccgccaccggctccggctcatgcgcggttccgctctctggtctggtctcgagtctcgacagcgacccgaacggtcaaccacttccacgccaagtcgaaatcaccccccacccgcaccatcctcaccgtccgtccgcgccgtgcacgctcccagatcatcctcaccgtccgcgtgggccccaccccccaccccaacccgtgccgcactccttccttttccccgacaagccttccgcctctctcccgtctcctccccacttcccttccaccgtggtctcctcctcctcctcctctccacccgcatccgtggctccggttgcgctgctcgggagccctcgcggctttctaggaggtcgctggagcggccgattagaggggccagcgccggcggcgtcggattcggcgcctcttccggtgattcccctctccccttccccttgtttatcgcttttccgtgccgttgcccgggtgcgaaggcttctgggaacttttactgctgtgttcgtgctgcttcgtttgtttcggatagtttcgtagtctcattctctgctgtttcgtccagcgccgtgtcggtgcgcttgcgctgcggtatggtccccgcggcctggttagggtttggtgtcgaggtggtcgggggagtcttagggaaggcggcattgttgtatggaaaactgggggttcggcgatgaatccggatcgagcgcccgttagagtttatgcgagcttggtgcttcgttttggcgaatttttgggccgtttttgattgaagccaaaacgtgaccctaccaaaattttgttaagtttaatagtaaatgtgctagtttggattgaagccaaataattggtaattcccacgctcaatttggctatattctagaatcttcttcactcatactaaattttggttttatattggtattaaaccaaacatatactagctaactttgtctaccaaaaaattggtagtgcctagattttggtaattggtaattggtagggtagagaaccaaataggcctttgttccgctgtatttattctgtcagtaagagaaacttgcaacctttgttttgctttcttgtgtttgggtgtaactgtaattccatttttattttttttttgggaggaaagagacagggagaactccaagctcatccattttactactccctccgtcccacccacaatataagggattttaagttttggcttgcaacgtttga

SEQ ID NO: 10668 - DNA, 3821 bp, Oryza sativa
ctctggcttacgaatccaagcggaagcaaaagctgaccgaacgagagatcaatgctgtgcagcccgatacgccccaatatcttcggcggtcagagacagctaccaagtttgaccgctcggatcatcctgaccgagtggtccacctggggcggtaccccctggtgctagacccagtggttcgcaacgtcaagctctgactgctacatcaccatgccttttggattgaagaacgcaagagcaacttatcaacgcatgatccagagatgtttttcaactcagattggacgcaacgtcgaagcatatgttgatgatgtagtcgtcaagaccaagcagaaggatgacttaattgcagatctagaagagacctttgcaagcatccgcaccttcaggatgaagttgaatcctgaaaaatgtatcttcggagtaccgccagggaagttgcttggctttatggtatcccataggggcatacaggccaaccaggagaagatcaatgccatcctcaacatgaaaccgccgagttcccaaaaagacgtccaaaagctaactgggtgcatggcggcgctcagccggtttgtctcacgactcggcgagcaggggatgccctttttcaagctactaaagaaaaccgacaatttccagtggggacctgaagcgcaaaaatcctttgaagacttcaagaaacttctcaccactccaccggttttagcttcgccgtatccgcaagagccgttgttgttatatgtgtcggcaacatctcaggttgtgagcatagtcctggttgtcgagcgtgaagaagatggccatgttcaaaaagtccaatgaccaatttatttcgtcagtgaggttttggcagactccaagacaagatatccccaggtgcaaaagttgttatatggtgttctaattaccgttaggaaattatctcactattttcaaggccactcggttacggtggtcacatcgtttccactcggggacatacttcataatcgcgaggcaagtggacggattgcaaagtgggccttagaattgatttctttggatacatccttcaagccgcgaacttcgatcaagtcccaagccttgacagactttgtcgctgagtggactgagtgctaggaagacacgcgtatggagaagatggagtattggactatgcattttgacgggtcaaaaaggctttcaggcaccggagcaagagttgtcctgatttccccgactggagaaagactgagctacgtattgtggatagatttttctgcgtcccataacgtggcaaaatatgagacgcttcttcatggattaaggatcgcaatatctttggggatccggcgtttgatagttcgtggagattctcagctagttgttaatcaagtcatgaaagagtgttcctgtcttgatgataatatggctgcttatcggcaggaggtatgcaagttagaagataagtttgatggcctcgagctagcccatgttcttcgacataacaatgaggtagccgacagactggccaatttcggttcgaaacgagaagcagctccttccgatgtgtttgttgaacatctttatgaaccaactgtaccaaagaaagaagtaaccgaagctgcggacactcaagaagtaaacatcattgaagtcgacttgagggagcccctcatcaagtttctgactaaacaagaactccctcaggacaaagacaaagccgaacggatctctaggcacagtaggctttatgtcatgcatgagaccgagctgtacaagaaaagtccttcagggattctgcaatgctgtgtgtctttggaggagggaaggcaattgctaaaagatatacactcgggcatgtgcggcaatcacgtcgccgcacgaaccattgtcagcaaagcttatcggcagggttttttctggcctactgctgtgttcgacgcagacaaaattgtgcgaacgtgcgaaggttgtcggttttttgcccgacagactcatttaccggctcaggagttgcaaaccatcccattatcctggccgttcgtggtttgggggcttgacatggttggcctattcaaaagggctactggtggttacactcatctttttgttgctattgacaagttctccacgtggattgaagccaaaccagtcgtcatgattacagcagacaaggctagagatttcttcatcaacatcatgcaccggtttggggtacccaatcgaattatcactgataatggtactcaattcactggcggagtgttcaaagatttctgtgaagacttcggcatgaaaatttgctatgcctctgtagcgcatcctatgagtaatggacaagtcgaacgcgccaatggtatggtgcttcaaggaatcaaaacacgagtcttccaccgactgcatccttatgctggcaaatgggtagatcagctgccatccgtaatttggtctctgcgtactacgcccagtcgggccacgggtcagtcaccgtttttcctggtctatggtgtggaagcaatgttgccaagctaggtaaagttcgaatctttgcgatttctcaacttcaagaggagcgctacggagaagaccaagttgatgatctcaaccgactgtaggaagcccgggaagcagccttacttcagctggctcggtatttacaagggatgcgacgttatcacaaccgcaatgttcgatcgcgggctttcttagtcggagacctggttttgaggaaaattcaaactacacaagatcggcacaagttatctcccttataggaaggaccgttcataatttctgaagttactcggccaggttcttatcgactcaagcgtgaagacggtactcacgttgacaactcttggaatattgagcatcttcgttgtttttatgcttaggcattacttttgtatcttttcgtcctctttgactgctaacattaagttgctccttgagttaccagtcgggggctgttataattataatggagtgtgattcttatcaattcaacttgcttacttgatttatcgttgccctgttcgattttttggcttagtcagtgaggactgaaagtttttaagaacttttgcgggttttaagctcaataaggtttgacaaaaaattttaagaaatcaggagctgagtttaaattatcaagcacatcataaattcatcaatattgtacaaattgtgcctccatcatcataagttatactatacaatgtcaatcccactcagtttttcatcatcaagatcatcagacccagtcggcctgagatcggtgtcctgaaacctctcaattacatcagcagcgatcttgtcggcagccttctgtgcatcattcatgaggtcaagggtgtcttcttcactttcccatccgcaaaaccatctatgacatcaatatcaatcttcgggtacaaggatttggtcatcgccagtgccatgctctcccccatactttcagcttccttgatgttcttgaaatatgtatccagagcagctctcagcttgtcgaagatttccacagtgtcgaacgaactcggaccattaatattaaaaaacatggcctggataagtggtgtagcagcgttggcaacttcatccctagatccttcaagcttcttaattttgttgaccaagacgtcgaattgagctcgagatttaattttgcgatctgcatgaatggtttacatcaatgattgggtacgaagacaagaatggttctgaagtttcagttacaaatacattcgacgtctttcaaagccgagtccctctatttggtcaattcacccttgtcttttttcagagctttgattcgctcttctagctcggatatcttg

SEQ ID NO: 10669 - DNA, 690 bp, Oryza sativa
ctagcacagctgtagaaccaattggtgttgaaattggcttgcaattctccatcttgaaccgtctcaaaagatcattcgtatacttcgtttgatgcacaaaagtaccttgaggtgtttgcttaatttgcaatcccaaaaagtacgataactcacccatcatgctcatctcaaattccttgcgcatagtctcagcaaaatctacaaccaaagcgtgagtcgaacaaccaaagatgatatcatccacatatatctgtacgaaaagttgattatcaccatgcttaagaacaaaaagcgttttgtcaacctttcccattgtaaaacctttcgcaagcaaaaagttcttaagcctatcataccatgccctaggagcttgtttcaaaccatacaaagctttagacaatttaaaaacatggttgggaaaatcaagattttcaaaacctggtggttgtttgacataaacttcctcctatacaaaaccatttagaaaagcatttttcacatccatttgatacaatttaaaaccttttgaagcagcaaaagccaacaaaagtctaattgcctcaattctagcaacaagagcaaaagtttcatcaaaatccaaaccctcaacttgtgtaaaaccttgagcaacaagtctagctttatttctcacaatcaaaccatcctcattttgttatttttgaaaaccca

SEQ ID NO: 10670 - DNA, 2254 bp, Oryza sativa
atgccaactcaagccgtttgtggagattatggatatcccatacccacacggcatgtgtatccgactgggtatgtgatgccatgtatagatagaatatctttaaagggactcgggttaaattctaaacttgtatgacaaggaaatacccgggatcctagtcggctacaattgtatctaatctgtaactacctattccgttagggatatgggctttattttgtaatacggaccccttcccctatataaggaggggtccgggtgcctctaggggcacgattttgctcctagatcatacgatcaataatacactcggcggatcaatccccggacaggagtagggtattacttcttattaagaaggcctgaacctgtattaaattccttgtctctaaacccatccacttttccagcttgatagccacccccttttagtattgccgaaatcttgtttcgacagttggcgcgccaagtaggggtagcgtcaagttcttcgctgattagtgcgatgggtttcgtctccggcatcgacgacttcgtcttccctcccgggcaggcgttccggttcggcagcctcgacttcatcaccaacgacttcggcaagatttctctccttaacttggatccgaaccagtcggggagaggctaggtctccgccccgttcgatacccccgaactcggccgagttctaccccaagatcatctcgattgagtcggcttcaaaccactcggacgagatccaatctactccaacacgacctgatcaagacgatgggccctatccctcaatcctgatgaaactccccgatgatttggccactgtcttcaccaggagggtgtcttctccccgtaagcctagacgggatccagcttcggctccgatccagtctaactctagggaagtcggcatcatactccaacctctcgggacggtttcgatggaagaattagacagctacctcagctctcccggtgttgattctcgaccaacggagatcctcgagtacgacgacttcggctaccactatgactacagcaatttcgatgacttcgatgaaggctacgaagacaactacacgcctctcttcttcggcgtattcatggctgataacgagacggcagaatagcatcgagcccgagaagcggaagaagagcgcacatgacaagaagccgagcgtcaccgactggaggaaggacgacaagcacaagagcgagaacggctgcagcgtgaacaactggagcgcgagcgggctgcgaaggaggctgaggatcggcggcagcgtgccttggaagctggacgatgagcacgagagcttatcggacaacaagacgttgaaggaacggcggtttttgcacccccagcaaaacgcggtcgcagcgatcacccttctggaaactttgcttaaggaagatgtgcccgatcacgtcgtcaacatcttgaaccagaccaagaccatgatcgccgcctcggtcccagtgaactcctcaagcgtccgcacgccgactggcagccgagttccacctcttcgatcacaagactatcaccaaccaagcctcagcgttgtcggcgcaggatcaagccgcaggagcagggatcatggcgaacgatctgttcactcgcctcctgatcgacacagggagcatcgggctgcacagtctcgctctccacgtcacaggcgtcccgtcgatcttcgtgatactattaaccagcgttgtgcggcaagaggctacatcccccaccattcatcagatcgttacgacgacgacgtggatggagttgctgccttcacaagtgacctgcgtcgagtggattggccggccggcttcaaaccaactgggatcgagaagtacgacggcacgacaaatcctgagtcttggcttaccgtcaaaggcctcgcaattcgcgcagcaggaggagatagcaaagccatggctaattatctgcccgtggccttagcggactatgcccgatcttggcttcacgggctaccccgtggcatgatcgggttctgggcggagcttcgcgaccatttcatcgccaacttccagggtacttttgaatgccctggtacctagtttgatctttacaacgtcatccagaagtccggagaatcccttcgagattacatccgatgtttttctaagcaatgtaacaagatctcggacatcaccggcgacgttatcatcgccaccttcaccaagggctttcgccatgaactcttagtcagcaagtttggccgcaagcctcccaagacgg

SEQ ID NO: 10671 - DNA, 11780 bp, Oryza sativa
aacaccttatattctgcttctgctactagaaagtagaaatatttccatttctcaaaacagctaaatgaaaaaacaatatgaacatttcgctgtgaagggaagtaaaacgaacaatccttttagcatatgaagtggagtagagcaccatggagttgtccatttagattagataagctgtctaacaggccttgtgtagaaaggacttccattaattattttggtctccctagctaatttgtgctttacatagagtcaaagattgcaattcaagtaaacatcattctaagcaagataaacaaaaaaaagagttgttctccatcactttcatgcattttcctgttaaatttaagctcatgtgtatatattaagatggttaacgtgtcaatcagatagcggttaattttatgctccacttcaaaacaaaacacatgtgttcttaggaggaaaatgcatcaccctacaggtctacaaagaaggtttgtgatcagctggaactctctaatcattgttataaaaaagaagaaagaaatccactttacatctcaaactttcactatgttttttcagttggtacttcctttaccggtgaaaatattggcggatggcaaaaacagtatagcaacgagctcaatcccttctttaatgcaatgatacgcagcttacctatgtgtttgagaaaaaaaaattagctcaagtaaggcactggaagaggcaatcaactgaaagaagtagaattgacagttcacatgaagaaaccagaattggtccaaaggttcatgtaaattcgcccctaaactgtcttaaatttggcccaaaactgcgcttaaattcaggctgcaaatgctattaattcagcccataagtgttgttaaatttagcccagaagtagaaatatacttcgcctaaaagtttgggtcaatatgcccaaaaattgcgagtagaatggcccaaagagttggcgtaaaataaacctaggggttcgtatcaattaggcccaaaagttgaacgtaaattaggcccaaataggagatgtttggaccaaaacatctggtaaattcagcctgaaggttaacatacagtcgggctacatctgggcgtaaattgggccctcaagttttaattaaatttggcctaaatgcaaccctaaattcagccaaatagtgagctaaatttcggcccgaaaattaagaccatagtatgcctaattttgttctaaatatgcaggtgaattttgctcagaatcgcgcgtaaatttgggctaattcggtccaaacgtattcattggcggcttcgccttcacctctaccggccggtgcgccattgattctccaccccttctctgcttctcctgttctccagtcctcctcttggttggtaatttgatggcacaagcgcaagtgcgcaacaccatcacaaactcactattacagaaacgattttttttcgaacgagtgtcccttaaggttgcaaggtactctttcatctgtgttcccgccaattcatgtacaagggaaagcagattcgacatcccctgcaattatacagcttttgcggtttcagctcatgcattaattgtgtgtagtattaattttctttctcatgggcataatacgatcgaaatgtagcaggtcagcatgtggcacgtacattttcaaaagcagttttaatggattggttgctacctgcagggcaagtatgtagatggttgcttctctttatgctcatctagctatatgttaagatcacctcttcattcttcaccacctcatgatgatgaaggaaatactcatggttgcaagagttatacacttgtggggttggagttagttgttggaaaaggacagacaactgagctgaaatcaagcagcaaatgcttatctttcgaagccaaatgtcaactggattatgtttcctggaaagattaatttgcaccacattagcaaagtattgttggacattcttctatcagggacacaattctgagcaaggactataagtctgtggaactatgcttcttactgaacgagatcatatatggatttgagtacacagtttcgactaaggacccttgcactttgaaaattccaagcaaaagatgtctatccaaattactgttcccagagttggatttcaaatccattttcagattccattaaagaaactaaatccatatgctgacatgctgttgtgtgtaccccgcatgaatgaatttctgttgttatgcagttttagtgtaatatgtggtttggtttgtgtagttctttgagtccatatatatgtatatagttggatgctatttttttccctattattttcctatgcgtggacaacccatgttcatattctgtcagtttccagatcacttttgtgcaaacttcacaatcttgatgtattggtaccatctctcacagtctctatgtcgtatgtgcgacaataaaatttcttgtgtcatatctgtggatggaagtatctataatggacataagagtatagtttctctatacgttttctctactaacaattaatagcatatgaatgaagaccattccttcctgtactgccttggaaaatcctttaagaaaaagcaaagcaagtctctcttctttatgtgtagtatttgattaactagcaccatgcccaagacactatatatatactcccttgcagggaaagttgtagattgtcctgatcagggccctgtttggaagattagctcaaggctaattttgagagctaatgtttagtcataaattggtaggctaaacattagcctagggtggtatgtttggatccatggactaattcaaggctaaaaggtggagagagagtagaaagagaggagagagaaggagagaaagagctgtttttttatggtccccacacaaaattagccccattagcaccccttggaggggctaatgttttgaagggggctaattcacattagctcaaaattagcccacctatttggatccttgagggctaatttgaggctaaaagatgagggctaaacattagcccatggaatcaaacagggcccagctatggtatgcaagaaatctcaaccaaatgttctccaaatgttcatggtcattcattgtaggcattatgcagagagtaggcttggaagacacccggaatggaagttacaccacctgtttggctgtgctgactggatggttatatatggcctaagcgtcttgtctaggattaacagggagtgtcccgaccattcctgtggctgcggaagacagtattctacggtggtattagtgaaatgaagtgagggagaaaggaagacgataggtttcagcagtaattgattatagatctatacttggggaagctgaagaaccgatcgattgggctctatacggaagctgaagaactcattctgagatgatgtattttagagtattatttatggcaaaatagtgatgatacaatttgtattaaaaaatatacccctaattgtagttaattcgggtttactaatagcagtctcattccaatagttgtttattaaaagtgcacaaacggttgtttctttatagtatgatcgattaatgcgatgtacacaacagtattgctaattcgtgtgcgcgccccagcaacatcatctgcgcttcctcccccacgccttttttcccgttgtttcccttttttttcccgcttttttccgattatttatttaatcttttagcacacgtgttttttcaaatattttgagttgaaagtttttaaattttaacttgaaaatttctaaatcttaacttaaaaattttcaaatttggacttgaaagttttcaaatccgagtagaaagttttcaaatcttgagttaaaagatttcaaatctgagttgaaagttttcaaatctcgagttgaaagttttcaaatatgggttgaaaattttcaaatttgagatgaaaaattgaaagttttcaaaatttgacttaaaaaattcaaatttcgatttaaacgttttcatatatgggtttaaaattttcaaaatttggcttcagatatagattttattttcaatttgttagttaaaaaaatctcacgggaagaataaagtcttatctactaccgtcattatctcatgctgtcgttatctaagactaatactagtctaaccaccttatcccagcaaaaacgcgcgttggcagcgcatacgcgccaactagcgatcccccgtacacaatcaactcacaatgtccttgctatgcttatgttgtaaaaaaaaacaaccatctctaggctctgagatgatctagtgcggcatgagtccaaaccactggatccgaatgtgccagccattgttgcctgatctagcattcctaggtgatctcatttctatctctggcctctcttcttttacaatgcaactaggaaggtagcccgcgtattcgcgcgggtatggacggtagactatgtttgaaaacttataaaggtgaaattttaattggaacttataaaagatcattttgtttatttggattatttgagcatatttagaaaaaaatattaagtaattggaatattttctctaattaaagacactcgatttttattgcatcggctcaaactattcttatttacgtagtgtacgtttaatttagctatacatgtttcaaaacatgtcatggtgcgactccatgttattgaattatttcttttccttttggcaaattaaatatgaatttttttcagatactattgatttaatttagctatgcatgtttgtagaatttttcataatgatatataatgtcactttcttttcataattttttcaagccaaataatagtctacaggtgtattaatttctaatttgtgattaattctaattcgtgattttaatcataagtaacataatgacacaaatagaacgtataatttggtccaatagaaaaaataacttccttaaaagagaaatagagaggaggtatgtacgtttgtatggtttgcacgcacgctgcttgcattggaagaggggacatctaaagaatgagaaaaaatcgatctaatccaatgactggacctattaattttagtgaaatcaaaggctagtagttatttttctcggattttctaagattttctctaatttattggagtgccacatggtgttatcggagcatttatatgagtgtcatgtggtggcttaggagcgtttatagaaatttttatggacttttactatataataatagaatgattggatatcgtcgaaatatatttgtagaattatttaagttgacatataatatatgttatcaacttttttaaataaaagaatagaataacatatatcttgaattaaataagatatgttactattaaaattgaaattaggaaagggaaggggagatgaggggagacagggagtacgtacaggaggagaacgtagaggagctccggaggggaacgtagaggaggtggggaccggtgtggagaggaggattttattttttttatttgatctaatggttggtaatattgggcctaccaatttaaaggaaaatcaacggttagatttagactgccacttggcaacttaggagcgtttgtaggaagtttaatggacttttagtattgtcgacgggggatacgctggtacaaggatctacgtaatacgacatcaagcagacagaaaacagagattatactggttcaggccccttgataggtaatagccctaatccagttgatatgggattatatgatggaaatcatagattacaaagggaacagtggaattcgatggtaccggcgagatcgtaatcgagctggttcgactagatctcccggcgacttggctcctgtagactccgacttcgtaggctgtggtggatgtgttggctatgagattcgatgccttaggtcctctcggggggtcccttttatatcgcaggtcaggcggtttccaagtagaactcggagacatcagaccctgcacgatacagtgacgacccagtcctgtccgagtaggactccttccatctatgaactccgtgatgaatttccttaatgtatgtagaaaacgtccgtatacgcgcaggtataccgtaccgatatgtgacgtatatcgaagggtagagggtataccttacccgtaaccctgacagtagccccttacttctgcttaaatgaactcgtgtaaccgatcacgacttctgatgtcgaggttgttgtcgttctcggtgtgaggaccgtagatatagggagtaatcgacaacaccatgtgaagctcaacggtcatgagtgaatttaaattgaagtccgaaaaactgccgcgcgtaacggaccaagaaatttccggcgaccatctctctcctttccttggaattcgcaccatcggaaatgcgtctatttaaggggattttggggatccattttgaagtctgcctgttgtaaaaaaactcttcagcctccaagcgttcttcgttttctccggctccgcacaaaccctagtctgcttatctcggtctcttctccggcgatctccggcggcaatggacctcgacaagtccacttccactagtgcgtccctgaagaagttgcaagaggagggcgctctcctcggtcgcgggaccatggagagggaaccaggaggtactgaacctgaacctgttctaggccgtatggttgcggttgaggactatattctctgtggtattctcccccggccttctgagtttctcctgctcgttttgaatttctacggtctttctttgctccatttgaaccccaattccatcgccttcctcagtatcttttcgcatctttgtgaggcctacattggggtagagccgtttctcgacctctttcgcttctactacgagttgcgtcggatagaatccaccagggtatctggatgcgttggtttccgactttgggatggcctgaagttgcgctatatccccttccagtgcccttcttctcgtagcaagtggcaggcgaggtggttctatcttcagatagaggattcagatccaatctttgttgttcctgaggaacaaccagacaagattccgtcttggaccgccaaacccgtcttgaccccttctcttcagtccttcattgatgccatcgatgacctccgagtacggggtttgtcggggtatgaagtcgctgccgacttcattggtaggcggatccagccactccaggctcgagcccacccagcctttgactattctgggccggaggacgcgacccgggtttctcctcggggtatttttcttgtatttaatttgacttccttatgtgcatgtttctcctgacttaccgaattctggttctcggtctacaggtatgaacagcgaaaccgtggagcgtcgcgtcggccaattgatgatcagtggcctgacaacggcgagcaatgtccccgtccccctttgcgagaaggagaaggctgagcgtgaagttgcaatcaacgtgagtgtattcgacgacccttttatttttgctcctggatcgcataatgacttcatgcggtgcaggctctcctctgaccgacgtcattggactgctcgtggaccaccaggcggcggcctcgttgaaggagggcgtctcccaggaggcatctgacatggccattgctgctgctgccacgaccagtggcagccatgtcccgaggaaggggaggaaattcacctccgtgctcggcagccgtcgaaaagcatcctccccatcggtaagtctcttgggttgttaattacgtagtcgaaggtgtcaccctcacgttgtactcggtttacttaggccttggatgcgtctccgccacctccacgacgacagaggctggtgacacttagcgagaagtaagtggacgaaatttgaggtccttcccttgattgaattctggcgacttgtcttgagggccagtcatggtaatcttttgtaggtcggcgcgggcgaaggcggcgcaagacgggtccggcgggaactccagcgcgtctcctgcggtggcctcgacagatgtcgtggtcgtgcctaggagccgtgaggtgacgcccagcggccctgttagcgatcttgtgcccgttcgaggcccgcctgctgacgtcctcacctggggggagctccatgtcgagatggggcgcatcctcgaggccggtgctcgcggcataagtcgcgagattgcggaggcgagggtggcggcgtcgtcggcaaacgagcgtgccgacaagctggtgcatgacctggcggaggttcgtgaggacctccagaaaatgagggaactagtggccggcaatgagcgacaacagcggggactcgagaaccgcatgtcggaactcgagaacaacctgtcagagatccgtggctcgttgcgggtcacctacaccggcctgcaccaactcgccggggaatgtggtgttgcgaccaccatcccggtgaaccccgacgagttctcgctgatgacttcgctcacagaactggccacggcgatggaggcgataccctccaagcatgcggccaggattggggaggagatgtccaacgggatttacaccggggtgtgtcacgtcctcgcgtgcgtaaggttggcgcaccctgaacttgatctccagcggatcttggattagggagcgaccaacgacgcgcgtaagggcgtgatggaagaagttggcgatctgggagagtctgttctcccactttttgaagagtaggacttcagttcccttgtactctctaatcagtcatgctttgtaaaacttttgttggctccaactgcctttgtgtgtgtagtcatcaccttaattttctttagcattttgatcccgagtactttgtttgtcgtttgtagagatgtcgatgtcgaggatgtccagcagcgcgggcaacctgagttgccagtgatcgttccggcacttgcgttcgagccacatgtgtcgcaggacgatgtagatcaaaatttgcccgtggaaacgggcatggcgacgacttccttaggttggtcatctttgttttcatctcctttactcttccgtctggattgacttgatttgctgtgttctcgaaagagaagagcagcttgacttagtcgtttccatgctgagcagatcttgagagtgcgcttgctgaccaagatcgtcgcatccaatattggaagacgaaatttgaggtagcggaactcaagaggactatgctagatgtgaagaaggagcaggccatggaaacactccggggtcgcgaggtatggttcaactcgtacctgaagagttgatgcacgtccatgacaagagtctgtagggagctccgagtaccccgtggggatcccgaggagtcggcggccggatacatctcgtggctgaatggggcctgcacccagctcgaaggcatcggcaagcgtattgatgaggctcttaagcaggagtgccgtcgatcgagccgatatgccggatggcatgtattggcttgcatacgagatcatcgcccgcagctacacctcgagtttctccacgaagggttttctcgttcttggagaactcggacggagatagatcacctggcaaagtcaatggcgccgctggcagagaaggtgttccagtctatggactggcgttggccttcctggtagtctctgttccctgtgacaaatatcttagggaaaagtgtaataggatttttacggaattgtaggaagtacttgtgaaatagaaaagaaaactatcttaactaagctttcttactctggacgtagtgtgtaagagtgtcttctcacttcgcgactccaatcagtcgtttgagttatacactctccctagcccccagccttgtcatcggagaattcttctcggaagataaggctcttggacctttgacctgcctcggttgaacaagcactgatcctagcccccagctgtgaagttggaaaattaatttccgattacacggcttggttaatacacacggtgagaactcttacacgaccagatcttacatggtctttcgtctctacaggatccgacaaggccttatcggctctgggcgtccccagctgaagatcccttaggttcctcggaggccttgtcaagacggcgtaacgggacatgaggataggtttcaacgctaggtgtcatctgggttagggaacattgggaaggaacactttgattgtaatctgtacatgaaaataggctttattgaaactgtaagatgtcttgcaagtatggatactattgacttatacatagaatttacgtaattaatcaatgttccaggaatttgccaactcgccaccgtcgccgtctgcaattttgaatgcgcctggccgcaagacttttgtgatcgtgtacggtccttcccatttgggtgagagcttgtttcgccctgcttggctttgaacccatcggaggacgtagtcgccgatcgaaagcgtgcgtgctcagatgtgcttttcgtggtaacggcgaagggcctgttggtagctggctgctcggacggcaactcgttcgcgatgttcctcgagtagattcacatcgtcgtttcgctgctcctcctgatcctcatcggaatacttctgtactcgtgtactttgatgtcttagctcggtggagagcacggcctctgagccgtacacgaggaagaagggtgtttccttgttatacgttgtcggtgtggtacgcactgcccatagtactgatgggagttcttcgacccacttcttgtcatgtgacatgagcctgtcgtagacgcgggtcttgattccttgtagtactatgccgtttgccctctcgacctgtccgttgctttgagggtgagaaactgaggcgaagcagatcttgactctcagcccgatacagtaatcctggaagtcggcgctgatgaactgggagccgttgtcggttatgatgcggtgtggcagtccatatctgcaaaatatccctttgatgaatttgatggcgttgtcggccttgatttcccccgtcggtgtcgcttcgatccacttagtgaatttgtcgatcgccacgaataggaacctgtagccgccctgtcctcgtgggaatggtccgagcatgtcaagcccccagcacgagaatggccaagtaagagggatagtctggagcgcttgcgctagtagctttgtgtgtttactgtgaaattgacaggctttacaccgctgaaccatgtcgcaagcgtctttgagggcggttggccagaaaaaaccttgtcggaaagctttttcgaccaatgtgcgaccggctgcatgtgatccgcagatcccttcatgtatgtcgaggaggagatgtctgccgtcgtcggacgagacgcatttaagaagtaccccgtttggcgctttcttgtatagatcgttgtcgatcatatagtagatttttgctttacgggttattttctcggcttctgcgtcgtcctcgggcaactcttcgctgcctatgaatttaatctgtggggtgcgctagtcgtctgtggtcttgatatcggcaacggcgcgctctgcctctgtagcccccgagctgatgttggggacgactgggctatcttcgccgcttgcctccttcactaatggctttgtcaggacgtctagaaaagtgccgggttcgagtggttctcgtctggacgcacgctgtgctagattatccggctcgatgttgtccttccggtatacgtgtcggaccttgatcccatcgaaccttttttccagcttcctaacctctgcgagatacttggataactcggggttagagcacttgtaatctttgtgcacctgcttcgcgactagttcggaatcccctttcacgaccagtt

SEQ ID NO: 10672 - DNA, 6179 bp, Oryza sativa
tttcgcaatatggccgacaacgtctttgtttctcacgacttcgccgagagggaaggaggagacaactgtgaccctgtgggcttggaagtagtggcgtagctttcgtgatgtcatgattaccgcgtagagcagtttttggatctgtggatatcgtgtctttgcgtcgtagagagcttcgctgacgtagtagactggccattgcaccttctctctctcgacaacaatgacagtgctaacggaatatggcgtggcggcaatatagagaaataattcttcattaggttggggagcaacaagtacagggggatttgctaggtagcgcttgagtgcaatgaatgcctcttcggcttcctgtgtccatacaaatttgtcttgcttcttcagcagagcgaagaatggttgtcctcgctctcccatcctagcgacgaacctgcttagtgccgccatgcttccggttagcttctgtacttccttgagtcttgtgggcgacttcatgttgttgattgccttgatcttctcgggatttgcttctattcctctgccagagacgaggaaaccgagcagcttgcccaatggtactccgaacgtgcacttctctggattgagcatgaggcgatatcttcggaggctgtcgaacgtttcccgcagattgtcaatcaatgagtcgcttgtcttggtcttgacaacaatgtcatcgacgtaggcctcgacattgtttccaagttggtcgctaattgagccctggaccgtgcgctggaaggtgtttcctgcggttatcagtccgaacggcatcttaacgtagcagaataccccgaacggcgtgatgaatgctgtcttctcctcatcctctttcaccatgctgatttggtggtagccggagtaagcgtcgagaaagctcaacaactcacaaccggctgttgagtccaccagttggtctattcgaggaagggggaagtgatccttgggacacgccttgttgaggtcggtgaaatcgacgcacattctccatttcccgttggccttccacaccatgactagattggctagccactctggatggagtacctctctgatgaaaccagctttgagaagtttgttgagctcttctcgtatggcttgttttcaatctggtgcaaatctccgcagtttttgctttattggcttggcgtcgggtcgcaccatgagtttgtgctcaatcacctcccaagggacccccggcatgtcggacggctgccaagcgaacacgttagcattgtcgcggaggaaggtgatgagcgtgagttcctattctcgcctagtgatgccccgatcttgacggtcttgtcggggttggcactggagagtggaacgatcttgattgcgccgtccggtttcggcgtcttgtttggtttgctcactttcttgggtggctcagctgtggcgggtgggctgggcgtgtgctcgaccatgtcgaggctccgcttgtcgcattgcactgctagcttagcgttcccttgaatagtgattgttcccttcggtcctggcatcttgaggacttgatacgcgtagtgagatgtggccatgaacttcgcgagtgcagttctcccaatgatggcattgtatgctgtatcgaattcagcgacatcaaaggtgatctgctccgttcggaagttatttgcttggccgaaagtcacaggcaacgtaattttgtccaatggtttggacgatgactggggagtgattctattgaagggttgatcggtgggatctccatcgcttcgtgggatccccatcgcgtccaaagtgctggcgaagagaagtttgattgagctgccgccgtcaatcagaactcacgcggcattgatattccgaatagtgggttcgaccacgatcggatatcgccctgggatgacggcagtcttgggatggtcttcttctgagaattctatcttctgttgagaccacttcatcttgggtgcagccccctgccacgtcgaacagacttcacgttccactttcttgtattctcgctttgaggagtacgccgtggaacctccgaagatgtgcgagacatggagatcggagtctgggtatgctgagtccgattcctgagtagccgcctcagtgtccttctcgaccacacgtactcgcttgcctttttccgatgccatgtgttttgcgagcgactttttgaagacgaggcaaacttccagagagtgtctgtccgacttgtgtatagggcaccatgctttcttcgcgtcgctaccttgtgggtctgggcgcttgggagggtccgcgtattctgctgcaagaacttccgcttgagctttccttttcccattcttgcgattgttcttcttgcttgactcaggtgcgtccttggctggtttcttctctcctctggtcttcggcttgttgttcttgcgtctcaatgcatcgtccgcgtgggcgcatcaatcgacaatctcgaataatctccgagtagtcgtgatgcgcctcgttgccaactcctaggtagtatagcgatctctgacaccggacttgaaagctcggattgcagaagcgtcggtgatttcggggattgtatttctacactcattaaagcgctgaacataatccctcaaggattcacccgggttctgtgtcaacgcatgaaggtcatcttcgatcgcgtggcgcttgtaagttccttggaagttggcgacgaactgctgccacaggtctgcccacgaagaaatcgagtagggcgggagatgcatcagccatgaacgcgtagagcctttcaatgcagttggcaaataattcaccaacgcgttgtcgtctgctccggcagcgtagagtaccatggagtagacctgaaggaattcttctgggtcggtactcccatcgtacttctctattgctcctggtcggaatctctcaggccatcggacatcgcgcagcgaacgactgaaagctctacacccagcgcagggggcggtgggttgtcggcgatcgtacatcctccgtggatgtctatctgattataaggatgaggaagatgatgacgatgacgatgggtcacctggttccggtgtacgattacgaggacgtcggccgggttctcgagaatcctgtcgtcgccccccgttgttgtcccggcgctgatctccatcgttgtcgtcattatggtggcgtcctcgactagcatggcccggcacccgccgttcacgatcgttttgatcgtggtggttgtggcggttatcgcggtcttcgtcttcgctcgagcggcctcctcgttcttcgttattgtgacgtcgtgaagagacgcgatgtcgggaacggttcctgttgtgtcgtgcacgtcgcgcctctcggcggccattcaggtgatcgcggagatcgccggtgccgcgaggtggaggggtggctcgatgaggcgattcccgctgttcagggttttcgccattagcaccaccagttggtggctgttccgggtgcgctgcagcggcggcctcttcgaacgcgttgctgaggttggtcactgattcccgtagccgttctgtccaccgtgcgagatcgtcgttcagaatgggatcgtagagggtttccctcagtattgcgttgacggccctgatgtgctgggctggtgtagtcacttgattttccgcttccgcattagcgcgcgctgacgtgctggtcccgtcgatagccaatacctcgcgtggcgtacttgttgacgatgagccatagtcttcgagcaagtgtagaactgacggctcgtgaggatcgatgtcgattaccccaacgaatcgatccgagatcagtgtcgctccttgttccttgtctgcatctctaagagagatacgtgactgctggaccttaggaggcggcgtcttcgtggcgctgagaaagaccttgcagcttcagaggtcgtgattctttgtcttgtgaataggacaatagataacacgagttggagaagtacgctgaattccacgctctttgcaggcacgaatttcggcgtgtacgttgtgaaaaacccagcaggcttgcaaggtgtgttttctggttttatggataggacaccaggaccttgtcacctcggaagttatcctcgtcgggccgtgattcttgtcgaaaagacaaggtttggccgcactaggatccttcttgggctcggatatcgtcgacgttccgttctccgcttcggcgggaggatccttcgacatggagtcgtcctgggttgaagccactgcgttctcgcttccgatcattgatggaccagccgagatcggcaccgtggtgtaaaccgggaagacgatttcgccgacttgagtccacaccagcattgttgaagcaggaactccttggttgaggttggtgttgactctgttgtcgacgaagctggatgacatagtagtagaaccttgagtaccaagttcccctacctggcatgccactatcgacaggggatacccgtagaccggatatagagggtattagggtacgctggtacgaggatctacgtaatacgacatcaagcagacagaaaacagagattatactggttcaggccccttgataggtaatagccctaatccagttgatatgggattatatgatggaaatcacagattacaaagggaacagtggaactcgatggtaccggcgagatcataatcgagctggttcgactagatctcccggcgacttggctcctgtagactccgacttcgtaggctgtggtggatgtgttggctatgagattcgatgccttaagtcttttcggggggtcccttttatatcgtaggtcaggcggtttccaagtagaactcggagacatcggaccctgcacgatacagtgacgacccagtcctgtccgagtaggactccttccatctgtgaactccgtgatgaatttccttaatgtatgtagaaaacgtccgtatacacgcaggtataccataccgatatgtgacgtatatcgaaaggtagagggtataccatacccgtaaccctgacaagtatataataggaaaatcaacggttagatttagactgccacttggcaacttaggaacgtttgtaagaggagaccgtggggttaagaatgtttgtaggaagtttaatagatttttagtatataatagatagatagatagataccaagacaccatgtaatgacagtcattgataaatcagttcgttgtgtcaccttacccccactgcattgcagttgaatcttctaggatgtgtgtggatgctagaatattcaaatataccataataaagttacttctgatttatcttttgttggtgttcattagtttgtacttacttaatcttattttacagtgtatttgtgaactaaccgttgtgagaacgattttgggcaattttttaataattgaccgaaatgatatttcattattaaaaaaaatacaaagccctgctttatttcaaaaattgtattgaacataaaaaattattccacaaaagttaggagatcaaaactaatccctaatacctgttatggtgtcaaccaaggattataaagaaaattaagccactacacctaaccactgagaggagatatataacaagataccggcccattgccatttgctagtctacatgatctgaccactgaggagctgatcacatagagtcacacatactagaccagacggatcaaacagatgacctgaggtattaggatggagtcatggaggagatcacagaagaagttaatgtggactatatatggaaggatgattattcccggtcacatcccttggttgaagaaacttttggccaaattcagacactgcatgctatattcagatggaagtaatttataatcttgacatgaagcaagtctagtttaattagttagtcacataaaacattgtcatttaaattattatctttgctttccaggtagcaaataatttatttaggcttgggagccatcaataagctaggcgttcagtagcatcaaggatattgaaggctaaggtctgccacaggccacagcctatgggacctgaggcctgaggttattgtgaaggtctcagtaaattcccttggtacttaacaaagtacaattgcttgctagtcttagcttgtgtaaggaccaatgtttccctagtgaaactgtttcccaaaagaaaaaaaaatcttgaagcatcatttattcaaaaatacacattttgcag

SEQ ID NO: 10673 - DNA, 791 bp, Oryza sativa
ccaattgaagaaataaaccacgaaagtgttgaaaagcttcgtccttaattgccataaagaaaacctaagaatatcgagaaaaatcgtcaacataacagacacataccactttcctccaacagattgcactctagctggaccaatagtgtccatatgtaatagctatcccggtgcatccgtcatcactgaaacaataggagcatgtgaagaagcaaccatcttagcatgacgacacggtgtgcaaaccaaatcaagatctttcttaagtttaggcaaactacgaacaagatccaaaccacttaatctagtgagatgatcaaaaccaacatgtccaagtctacgatgccaaaacatcacatctttatcaaactttgcaaccaaacatgttatcacaggtgaaacaggattatcaaaatcagctttaaacactcttccatagcaagaaatattcagcatagaatcaccacaagaatcaaaaactttacttccagttttcttaaagtgaacctcaaaatcttcatcaacaatttgtgaaaccgaaaataaattgtactttaagtcctcaaccaaagctacattcttcaattcaaatttctcatttacctttaccaaacttgtagcgagaacggcactagtagaagcatcaccaaagataatcgattcagtcttggatgcctttttgagggaggagaaccaatttttatcaccggtcatgtgccgcgaacaaccggaattcacgatccgcacgttctcctttcttgccaccaaagcacataaacagaaaaaggaga

SEQ ID NO: 10674 - DNA, 581 bp, Oryza sativa
ccaaacaaaggaacagaagttgcgcaagatgtccgccgatcgccaagaagtagcaaaagccgaagtgcaaaagctgctcaagcccggggtgatccgagagatcgaccaccctgagtagttggcgaacctggtactggtgcggaagtcaatcggcaaatagcgcatgtgcgttgatttcacagacctcaacaaggtgtgcccgaaagacgacttcccccggctcagcaagtgggcggcggagttatctcccttcgatctgcattttgtcgcccgcactgctatcaagtcccaagtcctagctgacttcgtggccgaatggacgccggcattcacccctgaacccaagcctgtcgaacaaccttgggtaatgtactccgacggttcgtggtcacaaaagggggcgggtgccgcggcagtactcattttgccaaggggcgtgccgattcggtatgccataaggctgtagttcaacacgaccaacaacacggcagacgtcgtactgctgggcctaagaaaggtgaaagcattgggggttcggcgcttgctcatccgaatagactccaaactagtggcaagccacg

SEQ ID NO: 10675 - DNA, 1766 bp, Oryza sativa
gtcgacctgcaggcatgcaagcttgcagaaggtaatctagtgagcccacacatgatcaaaatgattggttacaccaagagtctggataaacttggctttccccttagccgagagttggctactgatttgattctccagttgctccctcccagctttgagccgttcataatgaatttcaacatgaacaatctgaacaggaccttggcagaattgcatgggatgctaaagactgcggaggaaagcattaagaaaaattccaaccatgtgatggttatgcataagcgcaagcccaacaacaagaagagtggtcaaaagagaaagctaaactctgatgagatcacgagtactagcaactctaagaccaaggttcaaaagacatggcccgctaaggatgcagagtgcttcttttgcaaagagacaggtcattggaaaagaaactgtaagaaatacctagagcagctcaagcagaagcagcaggatggaaagagttaaacctcaggtattaatgttatagaaattaatcttgctacttactctactgattcttgggtatttgataccgggtcagttgctcacatatgcaaatcgttgcaggggctgaaagaagtaggagcttagcaagaggcgaagtggacattcgcgtgggcaatggagcaagagttgctgctgttgcggtcggcactatgccattatctttaccgtcaggattagttttggagttaaataattgttattgcattccagctttgtgtaagaacattatctctgcttcttgtttgcaagcagagggttatggttttagatctgtggacaatggttgttcagtctattataatgacattttctatttccatgcatccatgatgaatggcctatacattgtgaatcttgatggatgttcagtctataacattaatgcaaaaaggcaacatcctaatgatttgaatcccacttttatttggtattgtcgcttgggtcatataaatgagaaacgcatggtgaagcttcatagagatggacttctacacttgtttgattttgaatcatttgagacatatgaatcttgtttacttggcaaaatgacaaaggcacctttcacgggtcaaagtggaagggcaagtgaactattgggactagtgcatactgatgtatgtggaccaatgagctcaactgccagaggtggttttgggtactttattacctttaccgatgactttagtagatatggttatgtctacttaatgagtcataagtctgagtcctttgaaaagttcaaggaatttcagaatgaggtacaaaatcatttgggaaagacaatcaagtatctacgatctgatcgtggtggagagtacttgagccttgaatttggcaatcatctaaaggagtgtggaattgttccacaactcactccaccaagaacgcctcagtggaatggggtgtctgaacggaggaatcgtacattgttggacatggtacgatcaatgatgagccaaactgatctgccgctaagcttttggggttacgctctagagacagctgcgttcacactaaacagggttccatcaaaatcagtggataagacaccatatgagatatggacagggaagcgtcccagtttgtctttcctaaagatttgggctgtgaggtctatgtaaaacgtttgcatcggacaaactcacacctaaatcagataaatgcttctttgtggggtatcctaaggaaacgaaaggatattatttttataatcgggaagagggccaaagtgt

SEQ ID NO: 10676 - DNA, 1017 bp, Oryza sativa
aagatgtgatgttttggcatcgtagacttggacatgttggttttgatcatctcactagattaagtggtttggatcttgttcgtagtttgcctaaacttaagaaagatcttgatttggtttgcacaccgtgtcgtcatgctaagatggttgcttcttcacatgctcctattgtttcagtgatgacggatgcaccgggatagctattacatatggacactattggtccagctagagtgcaatctgttggaggaaagtggtatgtgtctgttatgttgacgatttttctcgatattcttaggttttctttatggcaattaaggacgaagcttttcaacactttcgtggtttatttcttcaattggatcttgaatttcctagttctttgaaaagaattcgaagtgataatggtggtgagtttaaaaatgcttcttttcaacaattttgcaacgaaagaggtcttgaacatgaattttcttctctcgtgttcctcaacaaaactcctagagaaccgtgttttggttaagatggctagaacaatgttggatgaatataaaattcctagaagattttgggctgaggcaattaacactgcatgctatatttcaaattgggttttcttaaggtcaaaacttggaaaaacttcttatgaacttcgatttggacgtcaacccaaagtttcacatttgcgtgtttttggttgcaagtgatttgtcttgaaatctggaaatttggataagtttgaggcatgttctaccaatggattgtttcttggttaccccacacacactcgtggctatcgtgtacttattttggagactaacaaaattgttgtgactagtccaggtactagacccgatattgtaggttcagtgggaggatggtcgtatttttaaagacgagagcgacgatgacgacgaggttggctcggccggtcagactgggcgccaggccggtcagaccgccggcacaccgccgatcagaccgacacaggtgttgcggtcagaccggccaggctcg

SEQ ID NO: 10677 - DNA, 508 bp, Oryza sativa
ttcctttttatcttataaacccatttgcaatcaatgacatttctacccttctgaggaggaactaaatgcgatgtattatttttaatcaaagccatatactcagcatccattgcaagtttccaattcttatctttcaaagcatcttgtaaattttcagacacaccagttgaggtcaaaagaccccattttactgtaccatcagtgtagattttctccttgcgaattccactttgcagccatgtgcgaagacgtgctgctgcgtcagactcctgattccgatctgcaattccaagtccgcgcctcgccgtcggatcggcggcagcgataattccaagtccacgccttgccgtcggatggccaccgctgccaccgctcctccaccggctaccgtcgcctcgttttcctctctcccgtttgtgcgcgtgcctgtcggtcccttgccgcgtgcctgctggcccttcccgtgcaccgctaccatgcaagtcttgccgcatattgccgcgccgtg

SEQ ID NO: 10678 - DNA, 12754 bp, Oryza sativa
gccatcatctcgctcgtcggccatggtgcacacgtcgccgcctcccatggtggctatgcagaagagagacgttgcttgcaactggccttggacataatcaggccaagagaataagaaggctttaggatactgatccgattcgagttcaaaaggcgtttagtttttccgcattgtgttcggatttttttcaatctgtttcgttcaagtaaatttaatccgatttgtagcctttttggcttgcattaacaaaaccatgcattaacttatcaagatgaacatgttagcaaccaaatcaccaaacaacaagaatttcaccacgaacaactatccagtcaacagtgctgtttttggaggtggaagacgaggaaatacaggggttctggaaggttctagaagctagggaaatgggaggtggaggagggaatagatactcgacgaggatctagcccggatccaagccgccgccgctgccgccgatcgccaagccgctcaggctggtcgccgtcctgcccctttctgtgtttttcctcccctgaaagaaccgatgctgttgcttttgttctttaccttgggtttgcttgggccagcttgaatgaatggttgtacaggcccattggcagcccactcgattcctaacaatcccctcttcttaaaattcgacttgtccgcaagtcgatggcaattaaaattctgaaaatgcaaaccacccggatcccatggcacttgtagctcttggataatcaaaatgatcaagtcattcccatcactattgcccttccttgtaatgagtaatgacaatattccactccagcttagtatgccttcttcacagtgctcatattttaccacaagcttaacaattgtgcctcttgttttcagccttccaagaatagttggcatagcaacatgacatagcaaataagtgctaatatttggcttgtaaatgcagaattgcttgtcaccttccaagactgatttgatggttggaataaaaacattcttccatgctgaaattatattcttgcttgcacttggcttgatcccttgcattctccatttgctggtaccatcttctagtataactagaattcccttgcagtcccaagtatcctgaacattgttgccatccaagtggcttatatcactaataagcctgctttcaataacctcaaaatattgtgccatcatataggaggtgaatggatttttggatgccggtagcaagtcatctcttttatcatcacttgggtcttcagttaatagcaccaacaaggcaagctcatgcattctagaaatttcaacaacggtgcagctcctgtaactaacgaaatcccactgtgccttccaagcaaacagactaattgccactccaattttccaggacctgcattgcttaagtctaattggcggtggccatggtggtattagacatacacttgtccaaacggaatcaaatgcagaccatggaacatgccacacattccctcctctaaccacaccacctgaccaaggaagtggccaaggttttctcttgggaagccccgccagcagcctcttttcacttttgaggcatttcatcaaacacccgttgggcatcaccaattttatgcagaaaatggaatccagcttttctgccatgactagcatgggctccgttggtgctgcaatcatgttcagtgtgtgaaacggaaaggggaatgcaacctcggcctgaatagtaccgatgttgtctttgaggctgattgtcgtacaccttgaatgcataaccttggtgaggtcagtagtattgatgaaaatagagcaggccttgtcctcgctaaccactgtctccatggtggctgcagcagtggtactagcaaacgactcctcaagaatggcatgattcacaccggtgtcattgtcgaagcaatttaccaagcacttggtgggcgtcactgttgtagtaccaatgccatggttcaaactcacctgcaagcccatggcgactgtcggagtaggaacatcaatgttgtggcttgcacttgttgtcgtgtacgcactggcactgttggaacacgcccacgaacacttggcgagcactggagtaggcgaggtcgggggtgttgaagatgatgcagaattgaagatggaggttgtcgccttgatgatgttagttgtctcctcgaatgatttgcgcctattatagttggccatgtgggccgcccggcacggcacggcccaggcccggccgtgcctgggccgaggcttgtcgggccggcacggcccgaccgacgcaccgggccgtgccgtgccagcccacgtgccgcactcacggcccaggcacggcccaacacgcctcgggccgtgccgggccggcccaaaagcacgatgggccgtcatgcttttcctcagaataagtctaaatttcctccctcctattgggctgtgacatatgtacagccacaaaaagtctattttacctccctcttctttgggctggggtatataaatagctaaaataagtctatttaaggtccctattctttagacagttacatttatatgtctatttttagtccctatactttatgtaccgggcctggcctgccggcccatcgtgccgggccggcccgaccgtgccgggccagcccagcgtgccggtggggaggcccaggcacggcccgacggtcgggccgggccagcacgggcccgacccaagtcgggccgtgccgtgcttgggccgggccaaaaaggcgtgccgtgggccgggccttcgggcctcgggccttatggccaactatagcgcctattagcttctatctcgtccaacttctccaaaatctgatcaatcttctcattgcacctacgcttggtcttcatttgttcaagcttctccaatatctgatccagagcttcatccatcattttctcctctttgttcatgggggaattgatggggacggccttagatatcttgagatcttcttgggacacctctccttggcttgacatttcaccgaacaggttgtgggcgttggtgccatgagcagtagccttgcccaaatccaatgaccaactgcacgggacgccgcagcggtacttccccattgcctccatgcttgaaatcccatggatcagcggctctgataccatattgttagcaaccaaatcaccaaacaacaagaatttcaccacgaacaactatccagtcaacagtgctgtttttggaggtggaagacgaggaaatacaggggttctggaaggttctagaagctagggaaatgggaggtggaggagggaatagatactcgacgaggatctagcccggatccaagccgccgccgctgccgccgatcgccaagccgctcaggctggtcgccgtcctgcccctttctgtgtttttcctcccctgaaagaaccgatgctgttgcttttgttctttaccttgggtttgcttgggccagcttgaatgaatggttgtacaggcccattggcagcccactcgattcctaacagaacacaatcttgagatttgaacattaggtcaaactttgacggagacctgacctaaaacatcaagtcaacaaaagtcaaactaaacgcctcggcgtccggactccgacttggtcaagctcctaagccggcccagaatcctaaccttgccctcccaccctaaccctttcttcctcggcgactcgtcggagagctccgccgccgagtcctcccactggagctcgtcggccgccgcgctctgcctcgccttgagctccacggcgagctccgtcaccgcggcgtccgggtcgtccctgctccgcagcagcacttctcccacctcggccggcgtcatctcggcgccgccgcggacgcagcactccgccgcgtccagcatctcgtggtcctcgacgccgacgtagcggccgaccagctcgcgcatggcgtgcgcgccgcaggcgcccaggcgcacgtgcacgtccatcctccccgggcggagcagcgccgggtcgatgccgtcgacgtggttcgtcgtgaacacgatgatgcgctcctcgccgcagcacgaccacaggccgtcggtgaagttgagcagcccggacagcgtcaccttggagcggtggttgtcgccgccgtcggagtcggagtccgacgagtcgtcgtcggaggcggcggtggcgtggaggagccggcgtcttttgttccgtctgctcttgcggtcgccggtgaggtggagggagcagtcgatgtcctcgatgacgatgagcaggcggttggtggtctggatgaggagcgcgcggaggtcggcgttggtggcgacgcgggtgagctcgaggtcgaacacgtcgtaccggaggtggttcgccatggcggcgatgagcgaggacttgcagagccgggcgggccgtggagaaggtacccgcgcttccacggccgccccgtccggcggtagaactcgctgccgtcggcgaatgccgtgaggtcggcgaggaggcgcgccttgagctccgggtcgagcgcgagcgtgtcgaacgtggacgggtggcagaacggcaccgacgaccacgccgcggcgccgcgcggggatgccgcgttcgtgtgcagcctccgcgcgcgcgacgaccgctccaggtggtccgccgcggcggcgaggtgcgccaggtacgccgggagcaccgccgcggcgtgccgcttgggcagccgcagcgagaacgaccgccgctcctcgagcgagtcctggagcgtgtcggcgtggtgcgtccacacggcgcggtgcccgtcgaagctgtcagccaccgagtggttcggggagagcgacacggacggcgtcgccgccgccgctgccgctcccgcgtcatgcccacctccgccgccggagacggcgacggagcgcggcagcgacagcgtgaggcggggaggcggcggcgaggagaggaggagtgagcggtggaggtagagctggacatggcggtacaacgcgttgggctcgacggcggcggagccgaggaactccggcacgtcgaagtaggagtacggcgtgagcgagtcctgcagcgactgccacagcgagtggaggagggagagtagctgcgtcgggagcacgttctgcaggatggtgaggaggcccagcagcgaccacatctgcgacaagaactccattgccgtcgaatttggagctcagctagcttcttgctcagctactgcttgagctgctaagctggagggcagtgtagtgtggttttgggtttggcttgtcttgccgttgcatggagggaacgccggatataaagaggggaggaagataaaggaggtggccactgttacagattgtttattagccttgatgacggcatcagcatgcatgctttgctgcataaaaaggagataatgtggataattagaatattagttgacaagcataacggtgttggtcacaaaccataatcatcgaattgaagcatgaatttgacaatagacataggtacaaggatcacttccatgcatctattttcatttttcaggtttcatgcttttacttgtttaactgtaggttccattcagacaagcatgccaaacagtgaaaacaacacgtgtccttgatgcggacatacagtgaaagagtgcaactgcagatggtttaggtttactgatctctaacggtgaactgatactaataagaatcatcagacacatcagactgagtcttgacagacattttgttcccctgttgatatatatcatcaaaccatcaatccatatgccaagaaaggccacaaggctgcattgttagtgcataaacaatagtttccgcaggctcaaatgacattgtgtcccccttatgtctgcagcatcaactcacaaaagcagggccagtctaatttcttttcttcttttttcatatgctgcagcatcactgctggtccatctgcaatagttcttcagctcaagaagaagaatatttcggctgcgtctgctcagctttgcacgcagggggtaggaaagaaaaaaaaaggacctgaaaggaaggaggagagggtaaggtgcggctcctcttttgcacacgttctccggctcttttctcatcttttatgacagggtggacggtggcgcgtgcctcggaagccgggaccggcgtggtggcgccgccggccggcccgtgcgcgtggaaagaggaactatgagcagcagccacggggaaggatgatccacctcgccgcacatggaatgttctcttgcggctagtggcggagccagcatcaccatgaagcccgaactactagtttttgggtgaccgactgatttttatacccgtcgacagataacggcaatggaaatggcagcgacggagcccggacgcccacccgacctgtccaggagctgcctccaccgctgcttgcggcatcgctgacctgaccaacacaatgtgttatgtgtcctcccttcttctcactggcctggtaactggtacacagtaactggaaatctggaattttctcttgcactgcttgttaagatgatacacacctcactccagctgaagaactccctgacaaatgtacagcaggcataattctattaggattttttttactacactttggtttttacagtatggacatccacacctaatgagttgatgtcactgcactcgagtgcattactgtgcagataaacctgtaaaacagtactattactgtacctactaccttctatacatgataaacttttggtttacatgtggcagtctcatgggaatcaatcttgaacgaagaaccgaagaagcataggattctcccatccagacaaaagaccagtttttgctagcaacagctgatagctagcattcccccatctttttcgcaccaaagcaggggctgattagttttaccaaaggctgggattaaaggccctaattgtcctttgtagctcagctgagagtgagagtgagagtgagagagtgactgagtgttaggctgcctcttgtcgggaatatatgcacccatcattgcgtgacgggcctttcccctgcgtgcaagtgcgtgcgagccttctctttcgtgacatgggccgaaaatgaggtgagctcggtggttgacatccatgtgaaagaaccggagcttttttatgtttacatgttctcttgtaatcatttcttctttgtccaagtttttcagttcagttgaaatttgttcttgaattcagtgtgtaaagtaaggtattattcagtttagcggttagtgctcgtgaagatctgatttgcattgcaaagcatctgaatttttttttcctgcgggaaaaagcatctgaattctgaattctagcttgtgaccgcacgaagaaatagtcagtactagtaattatactctcttcggttttaaaatatattacattgttatgttttggaaataatgtttaatcatttgtcttatttgaaaaaaagtttcaaatatgagaaatataggtatacaaaattacatttaatagtataacaagtaacaacaagatgctactccctccgtttcacaatgcaagtcattctaacatttcccacattcatattgatattaatgaatctagacatatatatctatatagattcattacatcaatatgaatgtgaaaaatactaaaatgacttacattgtgaaacggatgaagtagtacttatataagagtttttcttagaaataacacgaatgatcaaatattatatccaaaagttaacaatgctatgtatttttattttgaacattgaggtagtaataatcatggtcgttttgtttaacaatactccagacgatagggtttctagctgtatatctaaaatgctagtagacctaggatgctttattttactttgcttgaaaaagaataacaagcattgtacttttgtacaaagcggttttcctacatttggcatctactacctctgtattctctctacacatggccgggaatctgattttgagtccccaaaaaacaccacttttctaagcgtgcaaactttacttggagagggagccttttatctttattttgcatttcgtctttcgtggaggcttttccttttttcctttatttcacgtgcatttcgtcacgttactttcgaccaagacaaattcaacacgacgctttccaatttcaacgtataggtcgcagactcgtagagtcgtagtccccatttcaggccttgttgggcctcacgtccctcgcgatcatgctcgattgatgggccttattgggctatacgtctctcgcgatcatgttcgaccaatgggcctcattgggccctacttattattgggccattatttgtgggcccattcggcctgtcgtggatcgtgcacggagcagagagaacagagcagcagctgattcgcacgagctagcccaaataattgattcgtttgttcccattgaatttggcaatcgacagagtggcagacatgtatttttcaaggcgataaattacacttttacatggacaaaaggagcagaaacaaaacaaaaaaaaaaccatcaagaacaccactcgatcgcatcatcgtgtcgctggcaatgtcatactactgcaattatcagaagtatgtttgcaactttgcctcaatctctcatggcatccatggcggcgttggtcggccggtcaccggctgacgagggggaaccacctgtcgcggaagttggactggtaggacaccatgacgacgagcagcgcgaggagcaccccgacgccccacggcgagccgccggcgcggtggatggagtcccgctcgggcatcggcagcgacagctgccgcagctggtccaccccgcgccgctctccgtcgccgccgcccgacagcagccgcacggcgagcagcagcgcgagcggcgacgccatcagcagcagccgcgcctggtcggcgaaccgctccgccgccgacccgtagctcgtgtaccacgagaatccgaggaagacgagcagcaccaccaggaagaagcacaggtgaagcggcagctccggcgcctgcacataccccgcggccgccgccggcgagccgccgttgctgtacgagttccccatcggatcgttggaatcgaactttctcgcttgcgaggtgaagaagaagaggaaggagaagaagctggcaatggaggtgatcgagcacgactcggcgctcatttatagagccgagcatcgctgccacgtggcagtcacccatcgggcggcgtcgcgtctccggccaatcggagggcgccacggcgcggccgaccacgccgccatgggccccactgcatggatagccgacacgtaggcacgtgcacgcgtggggcgcacgtgggtacggctccgcgcgaggagggggcgcgcgcgctttgcttagcccgagcagagcccatcgcttcggcgctaaacaaagcgcgccggccaggtggtgggccccacctgccagtgggtgattaggcgtgcgatgtgggccccctattcctgagctggccggtgtgtggtgtggtgtgatgcgctgctgctgctgccgccttggtcaggcagctggatctgtactcttcctttgggatttgcagcctttttaagcccaaacatagcaagcaagatctgcagcctctgcttacttaacgcctaaaatgtctaattaacaggagacaggatagcaaatgtgtgtgtcatttagtggtttgtagaatcggtgtcacggcgcctgaagagataagggttctgtttggtgagtttacgacggctgaagcttcttctagaatcttcatccgctagaacctttctcaaactatacaattttatttaaattttaaaaagctgtaattataaaatttagaaaataaacaagaaattaatactacagatttttcagtttctttagattctcacaagctaattggaatgttacttctcaaataagaccaagatctagtaggacagtggcaaatgtggcacactgcgaactggctcaagactcgtttgatgaccagtgttttaatttaccgaggttgtgatcacgtggaatgtcgtcaaccccatcttgtaaattaccttctcttttaccgctaattgtccgtggttagttgaaacctttaattcattccagaacgataaaagtaaactgcgcgagcagtgtgtgtgcagataattaagcaagtacagcttctaaaacgcctattctatgttagcacattactacacaaataattttcccaaacgactacaatgcattttcgcatatgggtatagcacctgtggtgtatgtagaaataggaattttaccaagtggattgtacaaccgcatgtaaaagagattttcgcatatgactgactgcaaaaacaattttcggcaaaaaaaaacaaaagaaaaatcctaggaacctagctcgggagtggccatccactgccgccctccctgctacctgatccacacttcccaaggcccatcaccattgtcgccgtagggggaaaggccgctagaacaacccttctcatcgtcgtcgtaggcaaatccacgcacaagggatggagagaggcctctggttccacatgggaaggggagatgccgccggatccacccctcccgtcactgctgatgacagatctacatgcgtgaggggagatgcctctagatccgcctctcctgtcaccaccgccgatagatccacgtgctagggaggggaagaggcttgcggcggactgcacctcctaagggcgtcgctacttgatccgccaccattgaggccatcgctgttgtcgttgttgtcatcatcattcccccttctcgtcgtgatctggggtgtccaccactacccctcccaaccacttcgccgccaccaaatccacgagggataggaaggcaagggagggcggtcgctaccgaggtcactgtcgacacacgctgcattgctgactcgcgtcttgtgacatcctggctcaattaggatttgacatatgtgacccataagagctatgtgcgcatgcttagtaccacaattgctagttagcatggtagaaccaacttataagggtttgtccctctaaacataccacctctgttttaaccattttacatgaagcgaggacaaaagtgtaagtgaggtagtatgtgtaagtgtgttcactcgtcgaatggactgggctggctgttacaaatggtattagagccgggtctcacggttgcacgtacttgtcaatgcgtaggcatatggcgcttgtgggctctgtgtaaagtatacatggcatgccatatggagctgacactggacgtacggacatgtgttaagagagggcgtgctcctaaatatttgcctatatacgtgtgtggtccatgagagccatgtgcgcatgcttaataccacatttctagtttagcacaaacggaaccaacaaataagggcttgttcctccaaccatagtaccatcgggttaaccattttacatgaagcgagtacaaatgtgtaagtgggatgacatatgtaagtgagctcgctcatcggatgggctggattggcggttctggagaacgggctattacacgtccacgtgccatgagcgagagagagagagaaggcgagatgataagaatgaagtggagctacgagatggtgagtagataaggataagggagagaagatttagtaaattttaagatgaagaaaggaaggaaaggaggggtggtcggccttgtaggtgggcttcttaaacaggccctcctatgacctattttcatctacgggtttatacccggtacctctgaaatctttttacatacgggttttcttttagtccgtgtgtaaaaaaagatatgtttgtaaaaagtagtggcaacctgtataacccatataaaacttaagctacaatgcatcatttttataatatatgacatagacttgcaaagtgactaaatgaggagagcgtgtgaagatgttatttcttcgttactgtgaaagcgggaatgtccttccgtcccctcccccatcgtccgctcgagtctccctcattcgcccttgcctttaatctcaatccacctaggtagccaattctcaatcatatggaccgactcattacaaatcacaggagatgttactagttacacaaaatatctgagcctcccttcccaagtccaacactactcccatacgtcaaatcatttcgttgatgataatcaaatcatgcgaatagcagctactactaacttacaactaggaaccattaccacatactacctccgtctcaaaataagtgcagtcgtggatatctgtacccaacgtttgactgtccatcttatttaaaaaatttatgaaaaaattaaaaatatttagtcacacataaagtactattcatattttatcatctaatagcaataaaaaatactaatcataaaaaattttcaaataagacgaacggtcaaacgttgaacgtgaatagtgcaaaactgtacttattttgggacggagggagtaaaaaacaacaataatttgcttgtgaccattttgaccctggttcacgtgtgctaagcggcttgttgtgattgtgaagacgatgtacttaaaaaaaagagagaataaatcaagtgttcatgctgcaaatacagaataaaaatgggaagagaagcaaagctgatgatatagcgatactactgtcgatcaaacctaatgggccaccattttgtgtcaaggtttgacgcatcaaatcatgggccggcctataaaaaagggctgccaacttcaattttatcaagcctgcacgtcactaatcagggtgaccacaagaaagagccacgtttct

SEQ ID NO: 10679 - DNA, 1804 bp, Oryza sativa
taaaccctgtagacgaaaaatcactctcttaaatattcattgcctcataggttcatctattccgtcctgttttgtctgatatgtgtgcgagatttggaacaatgttttgcctctggaccctgatgtcatagactataagcagcaaattattaaatgccacgtcttaaaagtggcaaatagttaaatgccccttttctccagccaccgaatgctacaaagtggttcttggtgacatttggtacagagaaccgatgtttttttttttagaaaaaaaaaagtcagtaagaccctctttggtatagctcttgtttttttttgggagccggtattcccaactctacaaattcatggatctaaatccacgattacgtcgataacatttggataaattattttgtttgaatagatgaaatttaagattttaaaccactatattttaacataaaaacttcaaatctaccgtggaattgagaactggaattgtaccaaacaggtttaaattaaccctttttatgaaaattggcagtttgactaatttatgggaagaacaatgttcaattccctccgatttttttgtttctcgggcaaatgctacttgtctatgaaggatgagaatagcatgtacaccgataaatcgatcattcaagcataatattattgcatcgataaatcgataattcatgcataaaaatagtgtactctatttcatgttataaattgttgacttttttcttagtcaaacatttttaggtttaaccaatcttatagaaaaatatagtaccattttcaacataatgaaactaatttagtatgatagatattgctaaacttttccataaaacttggttaaacctaaaaaaaatgattatgaaaaaaattcaaaatgattataatatggaaatgaagggagtacatcattaggggcattgattgaggtctccttttttctccaacaatagttggatgattaagattttcgtggcacgcttttcaaactgctaaatggtgcattttatgcgaaaactttctatatgaaagttgatctaaaatagcatattaatctatttttcaagtttataataattaaaactcaatcaattatacgttaatatcacatcactttgcgtaaaaaatttaatcttcagaggaaaagaacactacctgagtatacaagtatacaacacattgatgcattcattatgcttcggtgcctgccgtcctgcagtcgcaccaaggtatcatccaagttccaacaaatgccccagcactgatgaccgcaccagctactatcgatgccgtcttcctgagcaacgcggcgacgccggactcatcagcgtcagctccggcgaaccaccgatgcctgagcgcggcggcggcggtcagcctctcgccgggatcgaacgtgagaagccccctcaggacgtcgaacccgtcccgcgacagcaacttctccgggaagagctcgggcagccagccgcgcgcctcctgctccggctgcggccgccgcagcgcttgccatcgccggacctcgtaggctaggagctcggacttggacttgaaggcctcgcgtgtcttgttccccgggacgccgagcatgtcgaagatctggtacagctggtcgctcgtgccttctccccggaacggcgcctcgccggagaggagcttcgccatgacgcagccgagcgaccacgtgtcgacgcggccgtcgtagtcgggcatgccgagcagcacctccggcgccatgtacccgtcggtcccgaccgggcggtacggcgccgccgcctcggccggggacatgtccagc

SEQ ID NO: 10680 - DNA, 2436 bp, Oryza sativa
ggcccgacgcggcgaggcggcgcttgacggactccgcgagcgcgtgctcgtcgggaggacggctggcgcgaggcggctcgagagcagccggtcgcgaaccgcagcgcgccccccgcatccctcccgccgccgccggattcggcggagatgaggcggtggacgagctccttgacgagatcctgggtttggtggtcgtccattggaggggctagggttcgagcaaccgattccaccgagcggggggggggggggggtttggtttgggggattttgcggagggaggcgaagtggtttcgtttcgtttctctctcctcgttttgtaatttttcggttttggatttgtgctgaatttggtcgtaattttgggcggggagaggaatcttttttgaaaaagggtgagggttgtgtgactgctaggtgggaccgggagtttcgaggtggggatgcgattttttttggtgtggcccactgtaggtggcgtgaatcgcagagaaagcgaagcccgggaccaccaccaggtgggacattggttcctctttttgtgagttgtactgctgatgagtgatgagcagaaatttaaaatcgtccgtgcacagaataagctcggtttggattagagatgatcgggatcaacaaataaagttgcatttcagccctacaaatttctctccaacattttatcaaatacggaggaggatagacttcaagcggaattaggaaaacagaaaaacagacttcaagtggaatttggaaaacaattttaaaaaatttgattataaattaaaataaaactcctgcaaagaaaaagctggaacgggatacacacgccatacacctgacaagacctctcctacttcgagcaagttagcagcatgtgtacaacttctcctatttctcaacccgttcatgagaaaagagatatgcacgaaacaagtatgggctccttcgattgctagcccatgaatcaattacagcctcgacaagctttcacaatcatcttaatcaaagaaatcctgcttataccaccaatccgtgttggagccatcctctttggtttggactatatcatatgtgaatggttacaactagttggtgttgttactggttgcgcctccaataggctcgcggatgtgggcgactttatggtgcaaggtggattgtatccaatccggtcgggggcaacttcgttagcatggctggcaccttcttgcgaaggtagccgcactagtcgatgttagggataacctcgtcgacatgcaatgttgcagtaaaggagtcgttttacgagcgcatgtggttcttgtccttcaccactagtcccaatgtgcaacaggatgcttgccaacaagctcaatgctgcacggcattaaccaacatgcagtgtcttggttggcttcatacttgtcttgtgctgatatcggtagacatgcttcttcaccgtggttcgatgataagggaacttgtttccgtcgtccaagaatggtagcaaaagaccggggcatgctttttacaaaatggatgcatcgaggcatcgatgaactagcgatgctcagtcatatgtatcttgcttggtacctcaatatcaatcagattcggtactttttatgcatatagtataagacttgatatttatcgtgttgtttcggaatggtatcccgtacaacagcgtaaaagcgaaagaaaaattaaagtaccagtataagaattgctataaatcaaattctatatcacaatataagaatttcttttactaatttatcatgtttcacaacacttaaattttaagtgaaaccaggtcaatttgatgcttcaaaagggaatctgatccgttcaaaatcttaaaactaacaactgaagtgacttaaaagatacggagtactaaatattttgatctaattttaatactactaaataaacaaattaaaagaccttcatatttatatcttcaaactgagagtttagatggagaggtagaagtagactctgcagaaaggggaaaaaaacagaaaccttccagaccggagtggagcctctctgtcccgtggcggccatgtcagccggaagcgaaagagcccacgccgccttcgcgagcccctcgccggtgtcgggggccttcttctccgcctccggctcaatcctctccggctcaatcctctccggctcaatcctctcctcctcctccgccgctgtcaccaccaccaccagcgcgggtaggaccccgtcctcctcctccggagcgcccacgaaaaagaagaagaagccgccgttccgccccgtcgccgacgacaccaagcccgtcctccgcgacccggttcgctcccctccccatctcagaacccatggggtgatttggttccttcccattaatctgttcggtgttgtgatttctgcagatatctcggtcggacccggtggagaccgagcaggccgtgctgc

SEQ ID NO: 10681 - DNA, 2184 bp, Oryza sativa
cttgtctattcttcttttccccagggacgatgttggctaaccaccgaggatattgtatctccttgataaaacccaagttgatgagtcgatcgacttcggcgatgacttggtcttggaactctggccttaagcgccttggtggttgcttcactggccgaaattggggatcaatcgccagcttatgggtggcgacacgagggtcaagtcctggcatctccttgtatgtccaagcgaagcaatctcggaattccatcaagaagcttcgatagtcttctcgctcttctttcgtcagcatgccactaacgaaaatagggtgtggatcatccttagttcctaaattcatctccaccaactcgtcaatggttggttggccaccgtcgtcaagttgtttaagagcccctgcaacatcaagctcctcttctaccccaacagctgcaacctcaaaggggtgttgttggagtaaagcatcacctattgtagtggtacttatggtgcagcaatgaaatatatcgtcttcaaatacttcatcttcatcatcgggttcatccacgttgatatagccgagaccgtactttggcgttctttacatctcctcttgataaactcttccgcttatgcccaccagtcctcacatactgctggaggtggtggcaacctgttgtttcgctgtaggttgatgcccgccttctccaataggcgagccattctaggctcagccttcatggtcgtgcacgcttcttctgtatcagaatgaggcttagggaattcgattatagaatcacactcttgtacctgtgggaccttgtagagaatggtccgggatgtagaagaagatggatctggaattgcccattcctctaacggggtagaaactgaagtgtagagggctgggggctgcatgcactgagcacccgcttttacctcctctatctctgcaactctcttcttgaccactccctgttgtgcaagcgcggcttccttgcttggaatccatcttgcctgtaaggtgatggtagttggcacatcgccgttgcttttgggcggtttctcgcttcctcgagaggttgcccccaaggtgatcggtgttgaggtagagcgtcttactttgagcaatattggtgtaatagatggggcagacgtgctggtttcagcgggagatggaagcttggtgctgaggttggttgctgaagaagaatttccccgcctactattcttgcgattccttgacgaagattcgctaatgattggggagcacggcataatgaggcgtctcacctcaggggttgtctcggtgccgggttcaataatgatgtcggctgccggtgctgttcgcccaagttgttgcttgttttcttcaacagggaagtaatacttggcgtcggcatgatatgattcttgaatagtgtatggtgagaagttgccaatgatgcgctgttgcactccattgccgtcaaggaattttaggcattgatggagagtagacggcacgacacggtacttgtgaatccacggtcgtcccaagagagcagagtatgatgtgttggcttcaataacaaagaaccgcaccttgaagctgaatgtagacatttggatcttgatagtaatggcgcctaatgttggcttgccctggttgtcaaagccacagatcaccacgtctgttggctccaagtcttttgttgtgaaacctactcgagttagacttcgaacaggtagaatgttcacagcagatcctgggtcaatgagaatccatcgaagatgagcagaaccaatgtttccttcaatgtagaggggacgattgtgatcgcccccttcgatgatgttatcttcatcagcgaaggtaatctcattcacaaacaaggggttgtcgtagagtcgatgcttagccatatcaacttcgtaaacttccggagcctgcaacgcctttataagagcttcacgcagatcaggcacattcataagagcatcatagacactcaatagtgctgggatccgtttgagatgcgcaagaacgttgtagtcgacagcaggcttctctttgcttccagtttttgtttttggagcttctggagcttctccaggaggagaggcctccttggtaggcttgtctacatttggagctttggacttgtgtggatccggcaaggtcttcccccctcgcaggcttatgttgacctcttctacctt

SEQ ID NO: 10682 - DNA, 529 bp, Oryza sativa
tttaaatgggcggcaatgtcgggttgggagaggggaaccggcattggacggtcaagccgcgagctggcgctccggctagcggccaaaacggcgacaggaggtgacgccggcgagagggaaaaaggggaaaagagggagagaaaaggggagctcgccccttgcctctttgggaaaaaggaggaggggagcgggagcgtcgcggcagagggaggagggctctgcctccgtcccttggcggcttgcgcgcggggaggcggggccgaggtgatgacgacggccatgacggcggggcggtttggagcggcgcgacgacacgagcgacaggcgctgacgacggcggcgaccaggcggtcggccaccacggcacgcgcgcgcgggaaacaacgggcggcgcggcggatttgagcggcgcggctgatttgagcggcccggcttgggcacgcacgctggcttgcggggccgggcggctgcgcggctgcaggcgcggcaggcgagcggggccgggcggcacggacggcgcaaacggcgc

SEQ ID NO: 10683 - DNA, 1251 bp, Oryza sativa
tggtaatggagtcattgtcagattgagttgacgtgcttcatgatgattgccacgtacggatcgagtccgaagaaggcagttgtaactattaattaggaatagtttgttagtttcctttttatccttaggaaagtgtgtttagtgtccgattatgactttatgttttccttttatctttaggaaagtttctttcttgtcctacaaggactagtatctacccatgggtataaatatgtacacccgtggtcattgtaatctatcgctacgatcaatacaattcggcgcatcgccaccctttttacttctacttttgtttttacgttccggcagaacttggcacccgacgcggggctgcatcgtcttcgatctccggcgaagggataagtctaatgttccaccggtccaggcaattgtatcgtctacgtcggcatcgttcaaggctgcatcagtacattcgacctcttggattactctggtttggataatatatttgcctagctatttatcatatgtctatgttaatctagtcctagcatctcaatttagctctatcggctgtctctcgctttagggtttctgccggtatcggctaaatcgccttgctagattagattagcctaggcatctaccaccctgaaaatcagtcaacggcttgattgtctagatattgtgtttcttttcatacttagtgctgcatcagttaagtttgatctactaagtcgtgcttagaaccataatctctagcctgcgtcttgattgccaataagggtttcatcggggtttcagctaatgagttatctggacgttgtatcggcttacaaggattgcatacatattggatttagccgatcgcaacaaaggttttactgtttaatctaatcttgtggattttatgatatcggaccaccagccgatgtatgctttaaccttcagatcagtgcttattatatcttgttctagccaattggtttctactcgactatattgttattacatcatcaacagccgattgcatttatatcattatctacattggacatatagccgattgcttaaaccctatcactatcggctggtatcggcgtcggctggaatcactacatcggcttgtcagccgatcggctgttttatctgttgtttacatatattgtcagttgcaggatcaaactgactggcacacccgcatctcatcaatctttggacctgcacaggagttaatcagatctcccaggctggtgttttcgatttttt

SEQ ID NO: 10684 - DNA, 2139 bp, Oryza sativa
tcctgcagccctgtgaaagaagcacatgaggagcccaaatcactacacggtggccgctaatgcgcgaccagtcgcgcgtcccccggtgcgcgcggcgcctcagctacagtactactactagtagtactagtactactactagtactagtactactactactagtagtatgtattactattactagtctacatatgtatatatatgcgtatacaaactttacatacgcgtatacaaactttgtatacacgtatacaaactttatatatgtgtatacaaactttgttatatgtataaaattggtatatgtacatttaaaaacaaaaaaaatacatgtatataaagttttatacacgtatacaaactttgtatacgtacccgaagtgtaaaaaaccagaaagaaaaaaacgaaacagaaaaccgcaaaaaagggaaaagagaaaacaaaaaaaaaaggaaaatccagcgacgtgtcagcccctcacctctccgcggggccctctcgcacgcgccacgtgtccaccgggggggggggggagtgggttgcgcattagcaatttcgtcactacacacataaactccatccgccacccctaatagcagcgatctgcagctcccagatacccatccaaatcacctccattccaggacgttcaatggaactcgggcacaaaaaagtcgacgaatccttcccttgtcagccaattcgacgcggcagatcgataggccatcggtgacaagttgaatggccacggatatttttgtcgttggtgcagcgatgggacagaatggctgcccggtggcgcgacgagattaatttgaagatgatttgttctggcgttcttgattgataaagggttgcattatgtctataaaaatgcatcctctcatgaataaagcacgttactttggccgtacttgattgagaaagggttgcatcctgtctataaaaatgcatggtctcatcattaagtcagatctactaatgggggttaatattattttgaaggttcttttttatttaaaatactaccaggcctagcctagaagttatatatcaaaagaaagagtatttacaacattgtacaggagaacaaagaaagaaagccttaaattacaagaagttgtaaccagctgaggacagaagagctaaggacttcattcatccacaaacatgtaagagaatctcatttttaaaagcaacaaatcaactatcttcacttggtagcacattatcaaaaaccttcgtatttctttgcctccatatatgcctttactgtaggatcgaatcacaagaactaagccaaccagaaggggggtgaatggttgatatacccaaaaaccaaaacttttagcggaaataaaagttaccctcgaattcgacggatcgcggtctgaccgagatagtcctgccggtctgaccgagtggaagccactggtctgaccgaggttgaaactccggtctgaccgccgagatcgcctgtcgcgcctgtcgccgccgccggtctgaccgctgtgctcccaccagtctgaccgccgctatgccgccggtctgaccgccggtgagttgccggtaagaccgccgaaacccggtgaaacacaaatcgaagaactctcaaagtggatgacgactttattgattctctctgtgtttacaaagtgtaccaacagcgctccttacaaaaatttcgactaaacttgaaaccctaactcaaaactcaactctattgctctgaaaagcgataccgggaagcctcacgctccccctctatttatacatgaggtaggcagcataaagccacgaaccaaactcatactaagagttctaaacactttaggaaaccctctagtacaagaaagaaactttacataaccaatcgtaccaaatttggatccttccaaatttgactccgcatcccatacgcacacaataacttcatcgtatgcgatatggaatctccatcaaccacgtgcatcaactctagccttagtatcccgcatgatatctgaccaccacggacatcgtcttaccaccaagccgactcccggtccatcaccgcaaatactctcccgaggcatcgagtcacctacacatgaaacaaataaagaaaccatattccgagaccaagctatccccaact

SEQ ID NO: 10685 - DNA, 703 bp, Oryza sativa
atagtcattcaaagcttctccagtttcatctcaaatttaatgtactcctttttaaaaagatctcgacgaagctctttaatgttatttgttccttgatgaaaattgctcaaagcaacccaaatctcatgagtagtttgaagatgagcaacacgatcagaatccgaacgagaaataccactcaaaagaatgttgcgagctttgcaattttgttcaaaaacagttttttcagcagcagtattaatagcttcaagaatcacataagcatgagaaacttttctccaaatatcataatcttcagccataatataagattgcatcctactacaccaatgagaaaaatccgttccatcgaaaacatggggcttagttgaaaacctagcgggagtagccatggcaaaaactctagatcaataaaaatccaaagaagaaaacaaggctctgataccacttgtaggatcgaatcacaagaactaagccaaccagaggggggtgaatggttggtatacccaaaaactgaaaacttttagcggaaataaatgttaccctcaaaattgacggatcgcggtctgaccgagattgatctgccggtctgaccgagtggatgccgccggtctgaccggtgttgaatctccggtctgaccgccgagatcgcctgccgcgcctgtcgccgccgccggtctgaccgccggtgagttgccggtta

SEQ ID NO: 10686 - DNA, 1028 bp, Oryza sativa
tcacatctcctaatgctgaaagtgactggtttatgtactgtgcttctttcagcctgtctcctacaacctcagacttatcaactctttcactaccagctagatccacaagatgcatgcaacctctcaacattgccccagatgttaaatattttccttggacatgaacagacaagcagctgcatgtagattcctcagccataagtacagagctcaaatatgaagttttctggacgttctcagtatgaaacaattgcatacctatgagagcggctacttcgatcgttgatggctgttgaacccactgcacgattcttctggccttgattcatcaattcaacaacatcggccgtagatgtgacaggaactatgcttgcatccggaacagcaagccctttctgtggagtatttcttatttctaatgtagattaatgttaaggagatacaagatatgcttcatagtaactaagataaaaaagagaacaacagaaaaaaagaagacgttttactggtaaagaaaaacacaattcaatggaaaaggatatctcctgtttccaccatcctgaaggagatccctcacttgctcattgtagatctcaatcatctgcacagaaatttcataatcgattgtcccctttctctgtgctttaatattaaataagtcatttagtgctctatagttaacaccgaggctttcctctgtcaaaactttcggtccactctgcacaaaattcataaagtggtttgaacaattttgaaaaggttatcaagacatatggaaataatatttttttagtacagttcattaccatggtaaaagtctttcctgatccagtttggccatatgcaaatatgcagacattgaaaccatcaaggactgaacggatcaaaggctgcatgtctgaaaagacctcttctgcattaacaaaaaaaaaaaagaagcaaagttcagtggtccatacaaatcaaagcagtttgagaaaaaaaagggaaatccagagcaacttataagttaaccttgagtagatgct

SEQ ID NO: 10687 - DNA, 644 bp, Oryza sativa
cgccgccgggaattggcccctcgtgacctcgtcgccgttttccccttctcccgccgccggttgccgccgccgcgattcgccgccgtcaagcttcctccggcgaatccgagccgttggctcgtctcccctcgtcacgtgcaaccacccggtgtgctcgcttttgcctgtatcgccgtggttcgctccgccgctcgccgccgtcgtccaccgtccgttccggccggcgtcgtcgtctacctcccgccggcccgcgtggcagccacgtaggcgccacgtcggcaccagctcagccaagaccgggtcgagccgaccccagttagcccctccccgtgcgcgcgttccaccgcgagccgtgaggctgcgcgtgggcccgctgcatccgcgtccaccgcgaaccgcgcacgtgcaccgcgtccttcccccaccctagcgccgcgccgcgtgctccctccgcacggtgagccgagccgctgacaagcgggtcccacccgggaccgcgcgtggtgagcccggtccaccggctctctctctcctccctcccgcgcgcgcgcgtcttgggccgctctgggccgccttcttgggccggccggcccgttaagcccggccgagccgccctttctctcgggccgctccctagccacccg

SEQ ID NO: 10688 - DNA, 9269 bp, Oryza sativa
gagtaactcggcgacatgttgcaagtatcaatctatatattccggtgaattacttatttataaacacgatcactatagtggtgatcatcatttcatgtgttcttatatttcatgggagattcgattcaaatgaattagatttaatcttactatttctttagctaattgtgacatcaagctatcaatcatggttcgaatatttaatacctaatttgtaatttgtaatagaaattaatatttgacttaactatcttgtgcataattatttgtaggattaaatatattctcgtaaatcatatctattgcttaaatgtagttcttttctttaccttcttggtgatcatttatggtttggcaagcaataggaatcataacaaccagcatgatgcaaaagttttaaaaagttcgaaattttagtgatttttattgttgggaatttttaggatgttacaggtgattccttggaagattggtttcaaggaggacatccacacgtacaggagtcggatgaggagcaagagagataccgaggcgaagattgcagacctagagttccgggtatcgagctacgaactcaacatgcaagaggaggtggcaaggaaggttgatgaacgcatggccgcacatcggtcccatgatccccagccgaccattcctcctgcaatggtgagtccgtcaggaaaccgtagcagctgcgcctcaacggggcaggtaggatcacagagcatggacgccatgcaaacacaggacgaatcgacctgtcccgttgatgacatcactcagcggacaccatgtgagctgcatattcctttcaagaacttatcaataaaggtaagatttagccattccgctagttgctgcttatatatgttgattactaataaataatctctcacaacatgaaggtgacgtcgggcatggccatcccaacagacccttcaggtacttaccactgcaggccgattccagcaggatactcgaaggtcgaagttgagttggtcgaaggcgcgtacgaggacctcgagctggattaccctggaggagacggtgagacgcatctacgagacacatgacatgccattattctatggcgcaggcggtacatcatcctccctgggcgacaagcggcgtctcgtgcaccatctcctccggctccgccatctcctcctcaggatcctgcaccgtctcctcctcatgctccgccagcaccgtctccacctcaggctccagcatcgactcctcctcaagatcctgcaccgactcctcctcgtgctcctacacctactcccccgcaagctcctcttccggcaccttcaaagtcaagggcccccccagctccaccgcctgcccacacaagggcaacgaagaaggcgaaagttgacgccgccaagaacaaggacccggggtacgattgcacgcaagaggagcttgacgcttacgttgcatcagaagtcaagagacaattcaagcctcgaagtccaaaaaagaagattcctatagaccccactgtcaggaacttcttcaggggtatgtctgcatctgtcaaggaggccatcaagctatcggactatgagcgaacgctgaagaaagcatcttctggaaagtccaaaccagtccctcagcttggagagcaaccaaaccaggagatcgagccgttggtgaccggtaaagaaatgacgatagaacaatttattactgacaccggtctaactacggatcaattgctaggagtcgcaccaatcgaaaaggcggaagtaaaatacatgtacgaactcggtaaaccgcttgtcaagcctgagctgctgcagtccctacccacacaaatgtacaagttccatcagctgtacatggagatgagcgccaccggtagagagatgatcggagcgaggatcagggacacggacttcttgcaaggagatgacattctctggatcaatttcaggggaatctacgaactataccagctggacgccctcgacgtctctattatgagttgctggattttgtaagtatatcgttcagttagatttcttactatacgtctcctttaattaattaggtccttgtatataagtagaccatagaaaataatatactcccttttatcgttgtagaatggagattcaaagggcccgacggcggagggttttcgatactggattcatcgaccctcggaaagtaaacgtcgcaatgctcgaccaatatccacaagaaacagaggacaatctcgtccatctcctgaaggcgcaacattacaagacgttcatactgttgccatacaacacagagttagtttaattttactgtcttcctacataccaaatttcattcccgtacgaacttgctaagtgtttcatatgtaatgcatcccacgcacattgcagattccactaggtgcttttattcatcgacctggaggcctgcaccgtcaacgtatatgactcaatggataaaaaagagtctacatttgacaaggttttcgaacttatagacaggtaccgtcataagttcctttgttaattaagaaaatcttgttatgttaattgctactatgaattatagctttaaactccatgtagggcttggtatcggttccgtcatttggtccgcggcaaatggagagaaagacttaggcggaagttcaaatttcctgtgagtacacatgctctacatttatatttctccgattcaaatacatacaagtgtatattaattagatctctcgttgtttgtcatttatttgtagtgcgcaaagcaaaagcagggaactaacttgtgcggctattacgtgtgcgagtattgccactgccttgcagaccaaatcatcaccacaagagagctcgatgtaagtacaaataaattcaaaatttcattacgtagcgatttcttgtttaattactaatcaatttcatacattcatatagtttattcgcatgagggataacctgaccacacacaaggaatttatcgcggcggttcaagaacaactcatgggattcatcaacaaagaaatccttgatcccaagggtgaattctactacgacggaaacacaattcaccggtccttagcttctgagctagcagcgagtactactacgtcgaaatcgtagctagctaggacatataatggattgtaattaatacatgactacatatgtttctatatgcatgtgtacacattttctataatgtaaatatattttggtcatatatatatatctatatacatatgcatttgcataacatatatatgtataaatacatatatattatgcatgtatatacatataatataatataatatatatatatatatacatatatatatgtatgcatatatatgtattgaaacatatacatgcatggtttatatatatatatatatatatatataaaccatgcagcaacagggccatgcaaaaaaaaaaaaaggtcagctcgatctttagtcccggttggtgttaccaaccgggactaaagatcgatctttactcccggttatttcaccgctatctttagtcccggattggtactcccggtttggaaaccgggactaaagggaggttacgaaccgggactacaaagggtttctccaccagtgctaatagaatgatcaacaagctgcaaactagagtgagccattggaagcaaacatgagctcgacaccaccaagtaacgagcttctggtaggctcgagcttggctctgtcaaagctggattatagcacaatcgcagcagaaagaatgaaaaggttgtatttctcactaacagtgctgacaagaagctgttcaagctttgaaaaataaagcttgcaaagtggcgagtttgcactgggaagctcgcatttgtcaacctttttacaaggccatcctgctagcgtgcgagagctggttcaagtgccatcaatccataagttctttatatataaattgtcgtgtattatgtaattttgatgtctaaagaaaagatcgtagacgtttatgaaattaccattttttatttcgtaaggacacacaattgctttggcccaacttatatgaacactattcacctgttacacatagtgacgaaaacggatctgaaacaaacggaaactagctagtgtgcgtagtgtctggcacttcttttgtatttacgatggtctcccaccactcatgtaccgtcgaggttggttgccagtaaacagggcttaggtggtcgcaggccgtctaatgtgcgatttcattctagattctctttgtgtatctgtattctgccagtaggtatagagccgtctcttgcaccagtcaaaaattgggcgcttaattttctagacatgaacacagtagaaatagaaggcattggaacaatccctacaatctaatagaatcgatgaagagctgtgaactctttcaaggccgcaatggccccaaatacgagctcttcatcagctaattaagccagggccacgatccgatccagcctgcagccatgggcagatccggattctggtccgttgcccaaatctcacacacttgtttcttcaatttctgtttgatctgccgcaaaaggcgaaatggctaatgaacgactctattattttttttccttttagcaaataactaaaacgacttgattaatcacgggctcaacctagttcttcctgatttttcacacacttgttctcttttgtttgtatgtattccacggaaggcccatcgagcaggcatgctatgtggtctgccccaagcccatttggacgttttattttatttttgttttaatattcatttgcataaaattttgatatcttaatatttctatggaaatttctatctacaaagtttatatgtataaactttgaatatataaagtttctttggtgttatacactatgtataatgtcaaaacaaatgaatttttaatggacggaaaaataaaagtgggttatgcagacaattttttttctaagccacaaagtatggctaatcaggggaaaagagagacgtgggttgagaaaatgcttgagaaatataaatggactaatacttgggccatccagttcacaatttttttttctctgtttgtacttcttacaccatttctctctgtttttctttgctcaaagtacacctatattactacaaaatatgcaaaaaaaaaaaatgcagccattatgttaccaagagattattttgtagtaaactgacgaccaaaaaaggaccaagtttgaagtggcagagcttcagttcccctacctagcatgccactgttactttatatatgctaataaactgacgactaaaggtgagcatatataaactgatctccattgaagagaatggcattgtgatgttattgcaaggcaagcgtagaacccgttagaatttcatgctctttgaacaaatatatatacggaaactatagaatggaatgcattgggacaagcgatactacgaagtgtacaagaattggtagagcagtgtatttgtcatccattgagctagagtgtcatgataatttagtgtcatttgactaaatagaagaggggaaagccatcaatcattgaagaaataggagaatttttataagtcggtcaccgaaatgaggagtagctggctgcgtcggtggtgcataggtggcggcgtcctccagttgtgaacttgtgaaggcgacggcgatggcccaggtggatcgagcggcaccggcagcccttgtggatccagtgggcaacgacgacaataacgacgtcgatggcgatgggctgggtggattgagcagcaactacggctcttgtggaaccagcaggcaacgacacgatgacctcagcgatgacaaccccggcggcgatgatgacaacctcgacggcaatggtccgagtggatctagtgggctagggttttgggtgatggtgcaaatcgggtggcggcggatccttctagggtttctgggctagggttggatttttggaatttttttttgcgatatttttgtcgcaatcggttggtttaaacgccctaaatttcacatactattacggctctacccacttgtaaaaatctgcgaaaatcgattttagctgcatggaaaaatggattatatagtggtgtgattagacacccgatgagccccaacagggccagccagaacattctaattacattgagcatttactgcgagaacaagtacgttactaggaagattatatttttaatttctatagaaacatcgatatcctacagcatgtttgccaatggtcgagcttgggggccgcaggaatagggatggatgccctcagccctcattcaaaattaaaattcgtaaaattatttattgttgatagtataattattctactctaaaatatgatgagtcgataataatttcagatttttcatctttgcttcaaacttttcttatcatgccagcttgattaactagctgttggtccgtaggagtcctgtctgattcaatgttctttctttaggattaacctttttggcacagttaggttcttctacttgtcctttcagaaagtacaaccacaactcgttactagttatctaccatgtgcaaaaaaacatatccaaattaaagtgatataattctttttgcactatgcatcaagtgctttcgcttataaatgttgcatatatcatgttacatgtgaagtgatgcatgctccttctgttagctgcttgtagggtaggctcaagcctaccagaagctgcttgtagggtaggctctcgttacttggtggtgtcgagctcgtgtttgcctccgagggctcactctagtttgtagcttgttgatcattctattagctagtatacacctttagggcttattcggaatataggataggaaaaacgaaggaataggaaaaatataggaatatggtaggattgtatgcgtaaaacagaggattggaaaacataggaatttcttattctccgttcgcaggattcttacagcaaagaggctagagtggattctttttttcctgtgaaaacatgggtagggaatagtattcctatggaattcaagatagctaaccctttcaaacgaatgcatctaccgtacccagttcaaaggaatcatcaatcctccatttttcctttacatttcctccattccgaatgagcccttagacttggaaggcactgggaatacgactagcactattgagtacaggtaagggggctttcaaagcccatctccttctgcccgccatcctcaccctcgcccttgggccggttcatcaagttagctgggaggtacatacgccatattcactgatgcagcatattttattacaattattactgttgtttgattcaaaactgtttttccttgcgattcaactatctcgcgcaacaatatttaatttctctttgttttttttttccattttcagttaagacgaggaagagcagagattatggtatccagtgatctccgtgactccgtgtgctttgttaaaattaatggagaccatcagcggatgatgagcgtatactactacgtgccgatgtcattttagtgctactactacgtaccttactacaattccggccagtaaagatgcattttggtgctactacctaccgatgaatgaaaccattcaaagatgtagtggtgctcttgagacgtacatcggcacaaaactaaaaggaaggtgtcggaaaaaacgaaaagtaaattatatgtgaaaaacactttaagctggctgtacgatctcgcatagagtttttgagagcccgtgttctgtatgccatgggaatagaagaaaggaaggacttggtagaaaactattattaactagataaatacatcgtcgtgtgttgctacaagaaattaagttgtataatatgtataaataatgtgcaatatattttataaaaccaaaaacaatatggattcctatgttttacgtaatttgtacatggttgtaaatatagttgttaacgccaaaatttgataatcccgaagttatcatcggcaaagcaaacatattttatttgaccaatacttgtgaattttgagcctaaaaaactattcaaattgcacagttttatgagagaagaaagagataatttgtgccatatatatatctctattatccgaagggtaaaaataattgtggtgatgtgacttcatgagaaaagatcgagaaataatattttctacacttagtgaggattgtatatataggttgtttgctaattaagaatgaactttagttagatctggttcatgtcactccctacatagtaatatttcagtctgccaatgaacacaatgctgcatattggtctaccgtgagttcacttgtcggtgttaattttttattttccaagtattgaacacagcaccgtcaccaagtatacttatgacttgttcggcatagctccaactctgtttttttttcctgaactacctagcttcaatttttcttttgcagatagagttgctgctgcatatatatatatatataacagttatcagggtgatattttacaccaaagtaaaaatgattaagccacattaatttaatgtataaactctattttctagaagaatttaagagttagaaccatattaaacagacctaatatgaactaccaatcgggggccatatcaccattcatatcattactctgcccattcatatatgtaaacacggaaatccaatttcaatagttgaagagatttgtaccttgcagttaagagtgatcagcgggctggctatcctttttcgcatcttctcttaatttatcttcctgcatacatactatgcccatttgatactatgtttttttttcaatgtacactgaacacgcagttaataaactggatgatacactactggagaaacgatctttggagggtcgagcgatttctacaatagtctcagttctaataagaaccgggactaaagattgtttttagtccctgttaaaaaaaattgatcttgaccaaccggaactaaagatgatttttattcctggttcatcccctgtcagaagcttgtgagagggccgaggatctttagtcccggttgacactaccaaccgggactaaagattaccactttagtcccggatggtactatcaaccgggagtaaagatcatttagatctttattcctggtttgtactaccaaccgggagtaaagatctatctttagtcccggttggagttaccaatcgagagtaaagatttatctcccatctgtgatcggttaagtactagataagatcagataagtcccctcgatctctcctccc

SEQ ID NO: 10689 - DNA, 15437 bp, Oryza sativa
ttgaaacaataagatgcagggtaaagttttaagatgccatctgcgtacaagaaaaatgacaaacacttggtgtgcatagaaaaacttagtgcttaacaatttgctacctgccgtcatatgcacttgactgccttagggtcttgaccgtcttgatcaccaagcacagatccaccaacaccaagtgaaaatgtgatggtgaggtcgctgttgctgatgtgtggcacgcacaagggacatgtaacggggacgcacggaggatgctagccacaccgcgcgagtcggaactggacctggattcctagggataggccaccggggcggctagggcacgtctgcaccggcgtggaggcgaccggtggccagcgctgcaggggctcgggcctgttttggtggctctcgtcaacgacggagtgctggggaacgagactagattggatgaagattggaagggagcgcacaggcctacacgtaggagatgagcgtgtttctcaatcggtatcacaactgcttctggataaggagaagtgaacccaggaaattgagaaagaaacatgcaaaaagatgtttctagactcaattgatgagcccaggaacttctttttttttcatgtttttcaggaacgatataaatagattagatgcaattcttttctttttaggaatgagagaaacagataagatgcaattcttttttttaggaacgagagaaataaatgattgccatttttttaggaacgagagattttcttttgtaggaacgagtgaaatagatgattatttttgtaggaatgggagataggtgagatgcaatatattagctaactcttctgaatgctagaacacgtgtacacattttaagtgctagaacacgtgtacactattttatctgtgccattgcaaatgtgtctttttagataaatactactccctccgtcccaaaatataaacatttttagcctaatgtaaagtcaaccatttttaactttgactattaatagaaaaaaataaaaatataatcatgtaaaattgaggttactagatttatcattaatcaaactatcttaatatgtaacttttttatttaaaatattttatttttataaatataatgtgaaaatagcatgcatctcgaagactttgtcggagtacaaaaatacttatattttaggacatgagcattaaaattcgtctatttgtaagggatgttgtgcgtgaagctccacaaggagatctatgctgctgccctccccggcggctgcgacggcaacaccaacagctgagagcccgagaacaacgcatcaccattagtctttgtctttagaaagccagccgccggcaacaccaacagtagagagcccgagagcgacgcgtcgctgttagttctatctttagaaagccgcactcgacacgttaacactacaaattctcctagcatcggaccctataaatcaagtttgaccaataataaacgttggaccgtacctactaattagaggctcggtgttattaagaaatgtgataaactaaaagcatatttgtccgtacaatgcatggctccccttagttttgtattatatgatatgaaaaaaaacaatcgggtaaaaagaataggaaaaaaaagaaccattagtttcatattatatgatatagatacccttttaaaataatattattctgctgaataaaaatgaagggagagctagcagagggacacagtcattaggggatcacgttaatcacataaggaatttccttaatttttatcagtaaggtacaaaattactaatgtagtaattaaccaattttgtaaaaaaattgagatgtatctttttttttcaataaggaaattccttgagttttttcatgcgtagtttgcctccaaatacttcccgccaaactcaattttccctccaagtagtaccgcaacattagagtaacaaacctgctaatctctctccacatctctctcaacgaataagctccctatataatccccattcaacctggaatcagttagtcagtcttctgctccccactatctctcaccagagcactcctccatcgcctcctccaagatcgcattctcaactgctcagccgcgcagggcctccggccatggctctccccctcatctggccatctctctagactctctcccctatttcttgagttgtggaatctgcagactcgaagatccaaaccaccccatccttttcgcctgcgcttggtgagggcaggtcacaggaatcgacatttcaaccaaaggattcctctctacagtttgtgtaccttctctctaaaattcctgatgcttatttctgagagttagatcaactagggttaaataaaactggatggcttgctctctgttagagctatatacaccatgtgttcgatgaaaagcaccggtaccaccatctaaattccatgtttatttctgtacaagaaacaaaattagttcccactgatgattattgaagttctgatcaaacatgcagttatttgataaaccgtggtagcatctgctagacaatctgaacaggttaatgacatatgttcagtgacattgactacattattgtgaaatgaattaattggatttatgttgccagatctatgtaattagttgtgtgcaaaatattcctgtttagatatcttgataatgctaagtaccgaatcaaaatgtatgctccgactaataatcaaagtttatgcaaagtacagaagcaggggaagattcttgtgtgaaatagtcaattttaggttactgcattcattctcacttttatctccacctctaccatgtggaactgaaaatttgttatgctcgtatctctggctgtacttccaaacccaaacaagcaggtcatatgtgtgttcttgtctataatgaatatagtgcccctgtcttaactgaaagtttagtagtacttaccgcatttaagctcaattatatgcatccagttatatcatattaagccatttataatttatagttatctctttgaacaattcataagttttcaatagatgtagttttccaatttctgcaaagcatacgattttcatgtagaggcggtcaacctgtagcttttctcttgtagctgccatattacactctgctttagctttaacatttaagagcaattgatgatttatttgctttccagtactgtgggaatggaaggtgctgagaaaaaggaatatttatttgtttggttcttttctggattcttctctagctgaaagtgctacatccattatatttttgtcatgcatatactacacttataactgtatagtcttctaatcttttactccttgtgcagagatagttgtagttggtacaatattcccgtatagtcaagcatacatacacatagattaattcgtgctcttgaaatacagtaagccaattttgcaggcaaaatggctggaaagaaaaggttgaacatagtacatagcagctgtcaccatggaaatggagagggaagtagcagcggacaatcattgccacaagtcgagcctcctctaccatatgaagacgaggtgattcatgttgagcagcaagatgatgagcccctcaacatgcctggtaaaactttaactacctgaatcccaaatagtttgtgattgcatatatatggttaacctaaagttagtgagccttatgtcaattaattttgtagtacaagatgaagaggtgaagaagcgcaaggggacaaccttgcgatatgtttgggatcttccacctgggaaacgtatagttgtaaaatgcaacagattagggcaacctatcggggatgaaggtggattgctaggacagtttttgggcacattagcaagaaatggagcttactgtccattagataagatgacctggagaaagatcaaagcagatgaaggagatttaacaatactacaatttgtccaggtacctcaaacgctaaaatagcataagtataatgctctgtttgtattactagtcattacttttttcctactctcagattgatgcatctgttcatatccatggcaactgaatgttttcgattcaatgtttatatgtattttacagatattcaatgctgagttttcttacttgctgttatcccttgcctaaccattgacgtaatcatgcaaattcaaatacttctactctcattattcctatgtatttcagacaaatttcctgtaccctccatcatgcgttcaatggatactgaaatcaattggaagagattggaggcgatacaaggctgcactaaaagataaatattttaacccaaagaagaagcgttctgctctgtataagctttgtccagacgatgtagaaaaagaccaatggattccacttatcaaatattggaagtcaaaaaaaggaaaggtaaaaaatctgctccacaatctgtactattgtctcattgacatatattgtactgttgttcctaccgtaaacaacattggaagtgtgaactcaatgagactacattgcttctgtaataggccctcagtgcaaagaacaaaagaagtcgttcaatgttacagaaccctcactcagcagggacaaagagttatgctcgttggtctgaggacttggtgagccaatttgttttgttcaaaattcatctatacatgttcactttactttcttacattacctttcattttcagagacaagatgatccaaataagaagcagccacatagagcaatggtttacttagcaactcacaaaaaaaaggataaagataaaaatcaacacgtggtatgccatatacacataatccttccataaatatctaatatgtatgttatctaccttgtacagtgggcatatattttttcacttgcaggtcacattggagaacctcatcgatgaacaaccagagttggcacaaaatgaccaaggaagagttgcatgggaaggtgatgcgctaaataaagtattgggcaaagaaaaacctggccaagtgcacggaatgggattacttcctgttcctaagcaggtttatggtcgtacatcacatcatctcaagaacataaacatcactacagtgaatgactcatcatcgaatgaagagacacatgttagaggggaagtgggggaattaaaaaaattagtcaaaacactgggtcagcgtattgaggagttggaaaacaaaggaacaagcaatgggaatagtgaaccaactatggtaaacgttataaatacctttgtccttaacattgaatttttagctacttctgatttcatttttgtagatgcttgtaaaataaaaaatttatgtgattcacactaaaatcttaccccttcctgatttcattgttgtaggcaacatctcagagaacttttgatgatggtattgaagagggagtagtacggactaatagaaaggtaatgtcaaagtaatgcattctatgtttctcaccatattttgtgcaacaatatttaaatatgtgcacatacagagggttcgatgcagtagacctgatcaagacgactcaatgagtaatcaaagaaatatatcaatggtattttgtcgtttctaattgataaattttatttgaacactcaatacacatactggcatctatagtaaatttttattgtccattccactatagaacaaaagaagatgtgaggaacagcaaaatatgcaccatgacaatattctggatctttgtggcaaaaaggttaggatttgttgttttcattcatatggtgcaatgcaatttatatatggttttacatggattatatatcatggaaccagcaccaggaggctgataacaacataggatcaccatgtcaagatgattcatcatcacagccacaccttgctcatgatcttcggtgggaggtagttcttgaatgcctattaaaattgtacttgtttctcaatgtgttttatccatctcactacgatattagagtgaaatataaacacgttgttgggagaactcctagttaggcaatgctacatctgtgaatgcatcatttgtgtgaaacataaacaaaatctttccaaggagtactgctatatttttatagacattaatcaactgaaaattaagtagtagcttctagtgctcaagtttagctttggacccttcatctatgccatttagtgatggctcactggtcttcggcgatcagatacgagaggctgcgcgacgactaacagatgcagtggaagcctcctctcagggcacgttccgaccagacagagatagggacgagctgacactcgccctgcagactccagagcatccaggacgaacacgagggaaaggggtgatgtagacccccgattttggcaatcggaaatcttctgtgtttatccgtaccaatccctggatcagtagttggtacacacatacatagttggatcacaacatatcacgaatgaatttaggctaaaggagttaaatacttacattagggccaggtaggccaacaactatcagagaacaacagcggaagacaaaataacataagggcccggttaacatgccacaggcagtcgactggggaacgagacctagaacaagaccgcactccgatcatcttgtgggatacgcaagcgtaccgacaagggcttctcttcaacactctcctaaaagatatataaatagcaagggtgagtaccaaccgtactcagcaagccaccacaataacaatgcatatgatagagggtatttcaaggaatggcttcaggtccttttgcataaagctaattttacaattcttttcacaagcctaaaacctagcatagactgatcaaattttagtaccagtgttcactttaaacaacgacggttctgtccaccatccattgtgatctcaaggatagcttcccgccattgaatcgtcatggttttctgaggatgtccaccttccctcctctcgggatgtggctccatcagcataaaattcatcatgcaatatcccattccccacaagttaagaatttagagtctagccaagtgtaatacatgtcccggtgctcaataaccgcgagcgcggctattcgaatagatttggtttactcacactgcagtggatgtacactttacccgcactccgcgactgcccaacacatgagcctcgtcccaacacatgagacgcgtcacggcaaagcttttcgataacctcgcattggcagtacccgctccatgaacttaaatcctcatgcactctaggcgtccatgtttctagcagtgagaggagttctggcgctcccgggaaagagaagtctcacacacatattaaattatggttcaagttaagttctctctctcacacactcatggcagtcctaccaatggcgacaccgatgtagggcacgcctctcggccctacctcaacggctgtcccatcgtagcgcacctgcctcactcaggggtgaaccatctatgcagggatactgcctccgctcggctatctaatccgctaggtctatacccattcgagaagtacggttgtacgggggtcgtttcatgcttaacttcatggctcggtccttaattgaccggggacggtactagccttttccagataccacccaaatcctccgtccgccccagtcgaaaacagttgtttaattttatttctcctttcacaaatcatgtcatcaacatcatggcaatgtggcgctcatgtctccacatgccgcatctcaattaccttcccaaaggtaattgcccaagcatatagcatttgataaatatgagtatgcatgattctagaatagcatttctaagcaattgtcataattgactagggactcatacgtaatcatgggtacaaggattttaagggtaaacaataatcaaggcatggcataatcacaagtaggatgttcatcattgcatgcaattttatttgtaaacaaaacaatttcgcaattaggatcaacatgttcaaggaatagtgatgacttgccttgctcaggataatccttattattgatataatcttgatcaaccttcacctcctggaagttgcagacgttgcctcacgactaaccgatacacaaggtctataatacgcgagaaaaaccaatattcaaacaacaatcaaatatgcgcaacaaaatgtactattcgtgtttgctaatggatcccaaccacgctaggggctaaggtttcttaatctttctattgtcaacgtggcctatttaggagttaaccatcatagcatttatgggatacatatatatttggctaatcggtggtttagtctatcaaatggcttatggaaggattatggctaagcatgcatccatctaaataggacagtcatatactagaggttatgttgttagatggatttaggatcaatcaaataattacagtgaatcatttgtattatttattttattgatggaagctttaccttgattatgaacatattttacttgtcacaataaattataaaaggttaataattatccatgctctatatgttaaattcgggaagtttataatattatagttacatattatctcttaatgaacaatccggagttacaattgaactatgaacatatgaggtcaagatttataattagtacttatctactattcatgtttgttatatactcccagtttaatatatgaaaaagataaattaattgtgtaactataatgggatgtacaatatatgtgtgcaacaacgtataaggttttggtcgcctactctacatgagcttatttagaaagtgtactacccaatgctccaagtgattcctgaatatattgtagtttaattatacattagctagtttctatgagtgatattgtatatgtgatgcgataagtttaagcactggttctattgggttactaataagtggtaatcaatttaggcatatataagctattctatatggtattgcgtcgattaatttacttagtgattcctccacatctagctctattattattctcctaagcaggttaaagattcatctatgtgtgtttatattttagttgcataatcataaggctacacttgatttaaataacctataagccatggccatcgaatattaaataagtactagtattttcctatacatccattcatttgagacatcacataaaattagtttgtgtggttgttacagtggcaagacatgttagagacaaatattattacatccactctactgtacaatactaattttatttattagcatatttttaagttgactattatgcatcatcttgatattaattatttaatatttataactatattttatcaaatagtgaattatatatcattggaaagcttatgaatttagatgaatttaggttcaagtttcactcaaattggagctaaatatcgaacgaaatcctagaaatattatatgatttaatttagtctatgactaaatgattaaatataatacacggctaaaatccctagtaactaaatccgaatttctaccgtgaatcgattacttatagggattacccaaaaataatctataataatctataagaattcatctatttgtctagttattaatcacatctaaattactaccgcgaattgatttctcatagaaattaccaagaataatccataatttatattaaattttgcaattctacgactataattaatctataattaaattctaattattttaaattttctaaacttccccaaactccctctaatttcctatttatttccttttcctttttctccctttcctttttcttttcttttctctttttcccttttctttttctctttttctctcttttccttttcttttctttctctttccccttttctttttctctttttctctcttttccttttcttttctttctctcctaaatttctttttccctttattctctcttttccttttcttttctttctctcctctctttccctctctttctttttccttctctctctccctcccggtttctctcctccttccttcttctttctctccctcggcttctcccttcctccccctctctcggctctctctctacccggcggcatggcgacaaacaggggggaaaggcagcggctcaccgatggcggcggcggcgacgacggcgcacggcgcggcacagcgcggcggcttcgtggcggcggcgtggcggctcgaaggtggcggcgcggcggcacgacgacggcgacgcgtggagaaggggagggaaaagggagaggaggaggggatggagtggggagaggggaggatggtgggcttttataggggaaagagaggataagggggagagggaagagaagggaagggcggtggagggggggtgaggcgacggcggcgatgtgacggcgcgcggcgcgcgggtggagatgacgacggcgcggcgcggctcggggcgcaaggcggcgcggcacgtggcagcggcgcggggcgcgaggcagcgggcgcgcggcgcgaggcgacgggacggcgcgcggcgcggcagcggcacggctcgaggcggcgatggaacgcgcacgcggcagcaggtggtgacagcggcgacgcgacggcgcggcgcggagctcggcgcggcacggcacggggttcggcgcgacggcgacggcgaggcgatgacgacgcggtgcggggcgcgaggcggcggagtgacggacgagcggcgcgtgggcgcggggcgcgaggcgacgatgagacggacgagcggtgacgggacggccgacggcgacggcgcggcagcggcgacgcgacgcgagcggcgtggcgcggggcgcgaggcagccaggcgcgcgcggctgaggaggctgaggagggggaaatagagccagggaccacatcgagcacctagagtgcaatgaacagtgccattttctatttaacccgattttagtttatcccttgtataaatttcattctataaatcctaatttttacataaataaggtttgcccaatatatgttttaatttagatgaaagtttaccaaattttaatattacccatattttattcttatatatatatttctattgtattatttaaatgaggtctaattctaaaattagcctagataattttggaggctttgagggttctaaaatatcctagtgtggcccttattattacaatagcacattgaatgaacttatagcaatatattttacacggataggttgaatctatttattctataaatagtatattaagactcggtacaacattaatctaattttaaacactcacatattcttgtttatatataaggattaatttatttatatgaccattattttatatgagtgattttcatgtcatgagtaactcggcgacatgttgcaagtatcaatctatatattccggtgaattacttatttataaacacgatcactatagtggtgatcatcatttcatgtgttcttatatttcatgggagattcgattcaaatgaattagatttaatcttactatttctttagctaattgtgacatcaagctatcaatcatggttcgaatatttaatacctaatttgtaatttgtaatagaaattaatatttgacttaactatcttgtgcataattatttgtaggattaaatatattctcgtaaatcatatctattgcttaaatgtagttcttttctttaccttcttggtgatcatttatggtttggcaagcaataggaatcataacaaccagcatgatgcaaaagttttaaaaagttcgaaattttagtgatttttattgttgggaatttttaggatgttacacatctaccccccttaaagaaatctcgtccccgagatttagtgggactacggagacattaaactattttggcttaaatattgttcgacaaacaaacatgcaaatcaaaagtaggaaatcccgggtcttcgtggcttctggatgtcatgagtcgatgggcgaagcgaagcgacactctttgtacttccgccgtcttggtcagcaacggacttagttgacaatcttggggcacatgatccgtcttttcgcagaggaagcacgtgatcttcgttgttgggcattctccgtttggatggtcttcgtcacagtaggggcattgagtaatgcaattactaccgtagtgtcctatctctccgcaacgactacatgccttaatcttcgaaacttctttggatgggtctggaactctatccttttccgggccgatctgtgagggcagtgtttcttgttcttcattggtgtcttgagtacaacctatcgcataatgtccaaattgtccacaagaaaaacaacagccatctctctttcgttgccatagttgtagttcttcaacatcttcaggcaaatcaccgatttctattcccattttactgaggttaagttcagcatatgttattcgtgatgacgcttttcttttccgttttcccttccaccaatgtggtgtagttccttgtctacgaaattgctgatacataggttttggatagagtgaatgtggcatcggttttggtggtattcctgccctcattttcctttttgggtgtcgaggtatattccttacttgtccatttcctagctttttcttagggcaatccaaggcacaatgtccttcctcgccacatctataacacgtgacatttatccttcgttttgctggagtcaggtggcacctttcattcgaagaatattgctttaggtgattcagattgatggtgtagtcttcaggctttagtgaggcttggactcgtcctttgttcctggaagcttggggaggatcttcaaagagtagcatgggctggtttattcccatattttggggtcttgtagattggaggaattcttgtttttcgatgtcgattggtccatgtcttcacgtcctgtggtaggtttctcttgttagaagttagtaggttgaaagttagtaaactactatactagtcatcaatagtagcatgacaatgctgaattgttgtttttcttcttcatttgttcaatccttcgttccttaatatttattatgaatcttgccgacgagagttaaggtcacaccctttgcagttttactatccaatgatacttcaaattccctgtacaagggcaaatataccttgatatatagtattccttgtccatattttcccacaagttattatttcctcgaggtttctccatcataggctaccccccttaaaataagaaattttgaaagcaatttaaaaggagatatgcttttgcgttcacaaagaagatttttttttttcaaaatgattttgcagaaatatcctttggaagtgatgtttgcaaaacatttaaaatattcaagagatgcagtttctcaccaaatataatttgaaaatagatttttcaagcaagattttgtataatcatacatatgtttaacaaaaagcaacatggcaactaaaaacttttgtaatcaaatttttttttttaaacaacatttgattttatttcgcaaaagagcactcttgccaatagggccaaaataccatatagattgtatgcatggttcaaagttgaaacaacaataattttgaacacctcaaaggaaaactcatgaaagaaatttatttttttactattattattattattattattattattattattattattattattattattattattatttttaaacaaagctttaggcaaataattattggaattcagcttggaaaaccttttgaaaggaggctttcgaagacatgcactgaaaaattggttttgaatgaagttttattttggaaaactttgcaatacattatttggaatcaaaatttcacaaataattttcagagaaaattttcttttcaagctaatttcgaccattcccaaaatttaatataagttcagtgcggctctggggacaattttgcaattacatagtttgaaacaaacattttcttcctttttgaagtaatttttttttgtaaggctatatttcaaaatgcaaaaattaatttgcttcgcaatattttctaaagacattttataaaataaagttcagaggatttaagccatatgagttcgacttgtccttggaattttgaagcaaccctcaagctaatatccaataaattcaaatctctttcatcattcgtccatgtactcttatccaaataagggttccttttattgaatttccatatctacgtagcatcttatgttccttcttgatccataatctttagatccttgtatgtttagtattcttgctgggctttctcataaatacgtagtctgtttcttttctctttattgttctttatgaacttccatgtcgcaggtcgagcttctatggtcactaacggcttagtcgagacttcacttctactatacgagtgtgtgactagagcaaactagtactaacaatcatgagttatcatgattgatgagttaatttcgttcttttcttttgtttttctttactttgtttttcatataatcatgatgcaatcgtctactttcgaggatgaggtttcggcacaatcaataatatccctatagcgtcttaattgctttcggttcttattctaaaattttgaaatgtggatgagaatgtagaaccaatatttttcaatcacaaatcaagtgataaaatcgccttgtcaaaggaagggttgagatgtaaggtatcaaaaatatttttttctttttggcgtatcggaatcagatatttttgaagagaggtaagatgagaaacaatatttgaatgttttcataacctcttttttttagcattttaaaaatatatttgtaaaatataaggtcctgcaactaacggccattctatctagggtctcgacctacagtcgataggctctgataccaaccctgtagacccccgattttggcaatcggaaatcttctgtgtttatccgtaccaatccctggatcagtagttggtacacacatacatagttggatcacaacatatcacgaatgaatttaggctaaaggagttaaatacttacattagggccaggtaggccaacaactatcagagaacaacagcggaagacaaaataacataagggcccggttaacatgccacaggcagtcgactggggaacgagacctagaacaagaccgcactccgatcatcttgtgggatacgcaagcgtaccgacaagggcttctcttcaacactctcctaaaagatatataaatagcaagggtgagtaccaaccgtactcagcaagccaccataataacaatgcatatgatagagggtatttcaaggaatggcttcaggtccttttgcataaagctaattttacaattcttttcacaagcctaaaacctagcatagactgatcaaattttagtaccagtgttcactttaaacaatgacggttctgtccaccatccattgtgatctcaaggatagcttcccgccattgaatcgtcatggttttctgaggatgtccaccttccctcct

SEQ ID NO: 10690 - DNA, 506 bp, Oryza sativa
aacataatcatccattagcaacagcagagatgtcagggtcgatgaagcagaggtgctggtgatgatgtcagtgacaataatccatcaaattaatgttataactgttgtagatgcttcacttggaggagagttgatgttgttgctcaactcgtctaaaccgaaatatttgaagttgttgaagtagaatgtctgctccgaagcaaagatgaagataatgactcctggagttgactcgtgggttgatgaattgatttcttcagcttgacataaaatttgtcaaattttgagccttgtatttgtgtagcccccgactctttgattagttgggaaacaactgaacatagagtcgagaactgtagcctcttgtcgtcgaatagttattgcttgattgaagatatgtgttgaagatgtccaagtagaaatcatgaatgttggagagcctcttgttgtagtaaaataacatggcatcgtatgccgaaatgtcgaggctcacaaagacgtcgtgg

SEQ ID NO: 10691 - DNA, 595 bp, Oryza sativa
caaaatatgtgaaagatgggtgcaaatcattcagttttaacagggtctttggtccagcatctactcaaggttaaacttataagttgctctggatttcccttttttttctcaaactgctttgatttgtatggaccactgaactttgcttcttttttttttttgttaatgcagaagaggtcttttcagacatgcagcctttgatccgttcagtccttgatggtttcaatgtctgcatatttgcatatggccaaactggatcaggaaagacttttaccatggtaatgaactgtactaaaaaaatattatttccatatgtcttgataaccttttcaaaattgttcaaaccactttatgaattttgtgcagagtggaccgaaagttttgacagaggaaagcctcggtgttaactatagagcactaaatgacttatttaatattaaagcacagagaaaggggacaatcgattatgaaatttctgtgcagatgattgagatctacaatgagcaagtgagggatctccttcaggatggtggaaacaggagatatccttttccattgaattgtgtttttctttaccagtaaaacgtcttctttt

SEQ ID NO: 10692 - DNA, 846 bp, Oryza sativa
caggcgtcgttatagaagtccgagtcccatgtcttcgccaattatgagacccaacctacatggcaatggatttgggccttggaatggcatacaccaagaggtatgtataatgaattaattactgaaaagtgcaaaaggaaaacaagcttttaattactacaagaatcttcttgtctatacatttactcattgttttcaacttctgattctgaagaaattttcttcaattgtatatagaaggtcatcaaaactctgtaccattgattcttatgttctttggctggcgtacattaggttgtgtctttgtgagcaatactaataagatttgtttatatgacagagattaggctttcctcctcctcctcctcctgggacaagtatggactggcaaggcgcaccgccaagtcatggctcttatattgtcaagaagattgtacgcatggaggttccagttgatgcttaccctaatgtatgtgttcctcttatgcgatttatcatccagcagataaaatgtcttgtttttaatgtctgctattttcgctttgctccagttcaatttcgtgggacgtattctaggaccgaggggtaattctctaaagcgggttgaagcatcaactggttgtcgtgttttcattagagggaagggttctatcaaagatgctgataaggtaacaaacgtttgtaaatgttaattactttacatttatatactcatataacatgcgttatataaattaaaactaagtattacagctagctaggatgataaacttttttgttatgtttaatttaatatcctttgtagaaatcttggaaatccttcattggactcttccctgattagta

SEQ ID NO: 10693 - DNA, 1252 bp, Oryza sativa
  unsure (1)..(1252): unsure at all n locations
tgtcctcccacagctcctgcggctctgcccgcactcccagtggcccgcgctcccccagctcgcgtgcgccgtactcaccagtgtactccccctacccacacccagttagcccctcctacacccccggacacaccccagttgcttcctcccgccgtggcccacgctttatccgcaccgcgcggaagcgtgttgttggttcttccaccgtgttccgtttccactacccagctcccccaccgccagcggcccgtgctgctgtcggccctcgacaggttccgccggtcccttcgcgtcagccgatcgacatttcttcgactgaggagccgactacaggaggcagccaggccgacgaggagtagaggaggcagtctacagcagccgcccgtgtgttaggcccttttgttccgccgccaactctttcggagtcgtggcaaggtagtgcgtgcgtgtgtttgttgtgggtgttgttcggtagtctggttctcctaggtggtgtgcgcacagtcaagctcggcgtagctctgtgacttgtccacacccgttgtatcaggtgtttttatgatttgaaaaatccagtttatgcttagtgtgcgctatctgagtggctatttacgttgctccttgccctcctaagtgcttatttgattcttacnccgccctcttctgggagtttagatggctagccgcccccgccgtgcagctcgtgcaccagcccgctttggttttgaagatggtagagccgagccagaagcaaatcatgagcagtctcaccacagcaaccgttcgcaccgtactgcttcccgcaatgcagaagttgagcaaccccgccgcagcaaccgctcgcatcgcacggcttcctgtgatgtagagatggaacagtctcaccgctctcaccgcactgccagtcacaattctggagaagaacgcctcccttccccacctcatgtggaaaacaacatgcagcacttaatggcagtttagacacaaatcttgcaaggattagccgcagccgtagccggttttcagcatactgcgcatggaaatggccaccgtcacatgagcaacaatagatccaagctgacagactttctgaggtctcgtccgccagagttctctcagaccgtcgagcccgtcgaggctgacgattggctgaaagatgtggatagaaaactcaacttggtgcagtgtactccggttgagaagacgctctatgcctctcaccagctaagaggacctgctgcagattggtggg

SEQ ID NO: 10694 - DNA, 2538 bp, Oryza sativa
cccgacacctgggtcggtgcttgcgaattaaatgaatttccaaaaccgcggaccggggaacgtaccgggtgtacggttttccgctcttgcacttaaagaccgtttccttggaatttcatccaaacataagacaagtacgaccacatgggtggaatgggacacccctggctgagtaactagcttatcaggggagccttgatgccgagagacatgtggattcgccggggtggtgttggggaggacccctgggcttcctggcacagtatggtctgggacctaacctgttgttggtctgggacccctctcgtcggcatatggtaaacctgtgtcggctttagaaatgccttgtaatgaaagcttggaggtctcccaacgtggctgatccccacgggctgggtgatccgggttagtaatgtcgtgtgggtaaagtgtaccccctctgcagaggttaacaaactgttcgataagccgtgcccacggtcatgggcggatgtgaggtgattcctagcgtagttttatttgactactgcttgtgaaattgctgttgtggaaaggggttcgatgtttggaaaatctgcagctgatgggatcagctacgcccgggtggccgtttggaagttgttggcccgggtggccgtttgaaaagctgttggccgggtgccaaccttgtttcaaaatctaaagactaatacattgcacatactccgaccggacgagacgcactgtctcatccgtgtcgtttaagaagcactcacttagttgtttcagaaaagagttcaaataaaatcaattgcaaaaacacccgcctcttcttgaagcctgcattaaacacttatataccctggtttgctgagtactcttcgactcacccttgctctatataaataatcccccccaaatgcttaagaagatgaagcggatcctgctgatgaggagttcttccaggagcaagccggctacgatgagttttagggtttcggcctagttcccaagtcgcgcctgtgttgtttagcctgagtcctggcttccgtttcccttttgtaatgcagttgtgagctcgggatctgtccgcagcccaacatgactgtactcctactctataataaagagacctctgttgctgtgatattctatcttcctgtgataccagcactgttttctaggactggtatcgattaacaggttaatttggagcgtcacggtttagttccagtcgggactagttcggggcgtgacatttagctagggtgaacttgactgtgagaattcgcttggatatatttttctttgagaaaatcatgagctataattaggagtctgactttcatctgaaattagtaagtgagtttttttaaagagatttcttatacgacttcttttgtatttctaaaagtaaacgaacttaaaatctgattcaacacggataatgtaccaaaatctcggcaaaaacatcttcaatttacacacagacacaaagtattatgcatgttataccgcaagatttatattttagagtactttaatgtgatgctaattttatatttgtccgaaacataatatgaaataaattaatgatcaagtatgttattgaagaccgtatagaaaaaatataggccttctaatttgggacgcagggagaatctgatttcaaggttttactgcagtgtatatatgtattgaagtttatggaactatggagcctaagactgagaggtttgaatgggttagcacactgggacaaggctgcaaacttcttcagattacgcctagcttggggaaagcctgtagatcatcgtgtaataccctgtgttctagagaatggttggacgaattcgagggcgaatttaattaaagggggaagaatgtaatgccccgagtttccaattaatatgtttcgtggaatattagaataaacgcacaaaagttcaatttttaaaccgttgtttgaataggcgatcaggaaatatttcgtggaatattagaacaaacgcacaaaagttaaatttttaaaccgttgtttgaataggcgatcaggaaccgcggatgcgtagagctcgccgagtagtgcaaaatagacaataagtttatagtaatcggtgatcgaattaatatgggccattcgatcttcatcaggatatctattaaaccaactgaaaaaaaacaaaaaaaaaagaaaaggggaagagatcgatagcccagcagctgctacaagccctagccgccatcacccaaatcgctgctgccgtcgcgatttgttcttcactactgcatttttcagccatttaagttactgatgtacatccggatgcctcctaaacctactgcatgatgcacacccaaaaggtcatatacatgacgaggtgtaaattcacatttgagtgagcaacaggagaatatatgtttcattcggaggagtcctctggaccagaaatggtactggcaaacaagcgacttatattatatatatagtcctcaaagctggatacatatggtgtcacaacccatttattcgattacaagggagacatacatcgagca

SEQ ID NO: 10695 - DNA, 31923 bp, Oryza sativa
cctcattccatctttccctctgaatgttgttttctctgtttagagtcctagatggactcttgggtaaagttcagaggatatttggacttctccttcctgcagagattacatttttttcgcggtaagaaatctaaataataagagaacagaaacaacatcattttccatgtagcattaagaggcttaacatcaacaccgtgaatgcagggcatgtaacactcagcttgccagagagaggaacccaaaaaaaaaagatgttctacaaatgcacgagtaaacataagaacgtagagccagctctaccttatagccatttcattgatagaaatgataagttacattgttacatgattgggaaagagtagaaaaaaagaagagaagaacagcaaaatggaatgtacaaaagtgtaagaaaaaaaatactatacattggcctcagatgattaaaggccgattttcactttgattttattactgaccggcacgagtaatttttaatttcggttttcagatcgattatcagatttccccggcacacagttttccaatgagggtatggattaaaataatacagattatgtacgatttaattaatctgatttcgattgacacagctaggatgctcaattatcacttccatttcggatgcccttgctctaggcaggagttcctcagcttctttcacgagggaaccaagagtctttaggctgctgctacagccagagataaccatgatgtcctcgatttccgacatgttcctcgcagccttcgacagtgatttaatcaagttctctgcttcttctacggtgtaacggcttccatgtctaacgattagtatgaatatctcagtgataagcttcaatgtgttcaatctgttcactatagtcaccttactcttcattgacagctttgtgaccatcgattggagctccgttaagatgctgaagccgttggctgccctgttaattgcatcgataagaggaggcaaatcttcagcatccattaagtttcgtgtcatcgtcacaatcagagataaaactgccgccagcatttgtctgtccacagattcggcacgaagtgttctcacaagcacctgcaacattatgtttatcttcagtatgacaagcgtaacgatccaacacaaagactaattatcaccctatatatgatgctgataaaaataaagcaagtgtttcttttcttgcctcaaacagactatacctctggactcttaacctttaaggcttccttgaggctctggatatattcatcatcatcagtgtgatgaacacacagctgctcgaggatttgcgcggcgcttattctgtattccttgggatatctgtcttgtacaagtatttttgtgagatcaccaacgacatcatctttcacttgtaagattaacttggcatttgctttgccatgggaacatagcgtcgcaagcttttcacctaccactgccaacccaaaaatgatgttggcctccttataaactttgtgagtgaagatgagtaacaatttctcaatgaaatattccctcgtcactatgttagaaagcgtgtgctcgtgcattcgtgtgtaaatgtccaatgcttgcataaacagggaactatcatggaacgatccgagcccacatccttggcaacctagaatcctctccatactagccatggcttccacgtctcctgagattttgcggcggagttccttgccagtctggccaggagcatccacaagccggagaatcacaaccatcgaagcatgcactgttctgaaccacgcactattagggtcatcgttgtggttgagcaggccagaccgcagaggcgccatgatcttggctagcaggccctccgtcttgttgatggatcgctgacagtcctcgtgtgcagcgagcttcatgaggatactcaggccctgcagcatcagttctcggtaatttacagggatgttgccatcacaatccttagggggaccttcgagcagagaagctatgcaatggatcccttgtggaaactgctccaggtggaggtcaccagcaaggtgcgccacgatccttgcagcgtgctccctcgcctcggcattgtatgccctcgtacaatcaagtgactgcagcagtgtgtgcaggccgccatcttggctgtaggatgccgataggaggagctgctttaccattgctttctgctcttcgacctcgacctcaacctcgagaaagaaattgtacttgtacattggcgtattcaggagggagtccaggatcctcaccccagagaggaagccatcaggggatccagacttggttaaaccgacggcatatgtgaccaggttccttcctttgacgaatgacgggtccttctcacacccgatcatcgtctcttgcatgtacgccatcactgactcgctcaaactagtaacaaagcgatatttgttaaccaccaaatccaccagccttttctgctcatagcacaatgtgaaccggtaacagaagagcacaccctggagcaaggcgatggagtagacgaacttcagcgcagatttcaggttggcgccgccattgttgacctcacccccgtagtcatgctgtatcagacgacacgcggatatggcagtggtgatgatcagcccaaacatgtagagcaccgctagagggcagatgatggtggcaaacacgaacaaatggagcagccatatgacaactactactaggttgttcaggtagtaggagcgtgaccgtgatcggccatagaaccagctaatggcacccctttccgtttccaatgtatccgtagctgagaaaaagcctaaaaacgacctccaagtatatcgtagcttttcgttcagaaagatgtcggagactctgtgggtaaatttcattgttccagttagatggtgagataagtaatcaagagctatataggctggtggtaaatctgtgcatttcacacttatcaggatatattacatagattttgaacctatctagcactaatatttttttttggaaaatacatatcaacagccatcggatacttacatttttcatatgtattcatatacaaaataaactttcaaatctctatccttgcaggggaaaaaaaccgatccattataattttgaagtttgaaatggattaatgtaagttttctattcattctggcctttgtgtgtcttcgacacaacagccctgatccattatactaaaaagttcaataataattcaaagttcaaaaaataattattaaaaatatgtatttggcttcaaaattacatgggcaatccatcctaaagtgttctcaccaatgtattaggataatgtcgaccccacgatggagtttggcacttggtgttgcacaaacgaccttgtcagcggtggaggaatttggagcttggcactgaggcactagtggagtttgaagatcagtgcactgcatggacgcactgagtaatggtggaatttcatgctcaggtaggacgatatatagaggtatgttttcctaattgaggaaatgaagctcttctcacaattgagagagattacaagataaagaatacaatcgtgtttggaataggccagattgtgcatatgctcatcgcggtattagtgtggccgtttttgtattggtcatagcctgaagtttgtaccaaaactaataaagttgacaaaaggtcaaaaagcacttacaccaaaagtgagacctttctaactcgcaatgaattcaattgttgaggtttgctagctctagaattcgactcaaaaaggagaattgtccaatactcgaatagttgttaagctattgagatttgctagctctagattttagctcctgatgtcctacatgccagtgactgaatggatatgcccacatgaactttcatcaggggatgtaaactacttgccagtgactgaatatttagaaagtggaactgtcttagcagaaaatatagctccaaaataaatgttttatgcgagcttaaaatataaaattaagatattgagcagtgcaaagagactaacccagcggtctggacaagggtaattattgtgagacaccaaaaatccttcttccccagtatggagacgaagccaccaagaaggataacagtggtccataaaacaagaagataacctagccccttgacggccatagacatgtgtcccatgaacagcgcgtagttgttgatggagctaacttcctcccactctgagtcatcaacgggctccattccactagtcattcttcccttgcagatgtgcagagtggaggtcaactgcaagtctgcaacgcaacaaagccaatatgtaagcccgcatgctcagaactctattcgttgtatactcgtacataataaagcctggagatgcacgccaagaatggaaaaaaaaactgatctacaagaagcatggtcattcttaacataaatatgtccatcctattaaatttaatcagttttgattagcatcaagcaaggtaggctgactttggttttgtcaaaatctgttcagttgattgtttgagaaagtcaaaggaaaaaaaatcatatggtgaggaagcaaaggcctcggctagctggctggagttagtgtaactaaagaagaacagcccagatcagtggatcacagatgttaccgtaattcgtaaacatataatctggttgtcagcataaataattgttggtgccttttcgggccaatacagattcacctaaatatttgttgcaaatttggcctagtgccaaattgtggtggtcaacaataatattccgttttctcaaatcgaatcccaatagatcaagttgacattatatatgtgtacgatgggaaagcaaataccatggcgtctgagctgaacagcagaatagtcaagctaactgttggggactttggaacagtcagtcacctgtttaaaacaagaaaaataaaattgattcgatagcatcaaaatttcacgatttcagttccatatagcacataaagtcagtgatttcagttcccttttccgaattggttgacttgcgttgaccggctcacaaatccaaacagcccatttcgctgcccaataaagcaaaaaaagattatccatctagggagcaacatgcgagagaactgcaataccttctcgtcggcgatgggcgaggagggacaaggcagccgggacgagggacggcggggtgaggctgatgctgccggagagccgcgagcccgcgacggacgaagctgatgcggggcgaggagcacgccggcggacggagatgaacgccggggacgatggccgccggcggtggggatcgactgataaaaggttgtgcagccaagggcagtatagtaaaaaccgagtcactcggctaggtcaacacaagtcaaccaaaacgggtaagcaagcagaatgactgatagggatatataccactaataaagtgaaatgcggagtttgtatgcaataaaactgaaattactacgaaatttcgacgatattataataccaatttcacctatgaaagcgattttgggtggaatttgccgtacgtgtatggcaactttggttaagtatgcgctccctctgtgatcaatctatctatacctctatactcgtattaattaggtactttctacgagcttttacgttaacatgaaagatccgaccattagattagattgatggtatactagggccgtagatttaaactgtaaacatggacttttttaagggaaactacggtgggtgtttaaggcaccagcctgaagttttattgaaatgaagaaacatttacaggagaggggttacaggggatgagagggggagaattaaattaagaattaattacaaagaggtataaggcccacttgcggagctattgtttgctcttaacatttttacatcgatgggaccaaatgtcaatgtcgctagcacaacgccggagaactaacttagcaggttcatcaagagaattgaagaccttgttgttgtgtcgtttccaaatattccacatgacggcaaggaggatagagcgccagactcgtggagtggcgggttgtctgggtggagggatgtcccagacaccttcaagctgcggcagggaggcgatctgttgttcgtccaggccaaaggtgtgccatattgttgccactccggtgcagcgtaggaagaggtgctccacatctttaacagaggagcaaaaaggacaacgtgcggatgctactaatccacatcgagcttgtctctcattggtgaagatgcgcctcttgtgtgtagtacaaaggaagatcttgcatttgacttgagcgtggttgtcccaaatgggcttagcgaaaaggtcatcctataaccctaagaagcttaagtcgtaggctgtttttgctgtgagggggcgatttgtggacaaggtgcgtctgttttttatctctgggtctagctttaggtggcataccagggcttggatattggccaattcgtgtatggccactgtcgacacagtcggggccggagatgaaggagcaattcaggagcggtctgttagaataattgggctaggcccaacttataatattaaatctcaaaggcccataatacatgttgaggataataataccacctctggatttaagcgagaaatatctcaacctaaatagggagttattagaggctccctgttgaccagttgaggtgggggtcggaatgccacacgcgcgcgcgcgcgccgggccgggccgtgggcgaggcgaggcgaggcgtggctggctggcggcgtgcgtgcgtgcgtcacgtcgctatccttttgcagccactaacccacgttcccacgattccctccgcaacagcgcgtccacgttctttctcctgatagataaggaggccgcgagtccgatccgagttcctcgcttctttcccggtgttagtttctccttctccgcgcctgagttgctctcgcttccccgcttctgatctcttgcgcgcacgagagattggaagaagcagtgcctccgaaaccacaccttcgcctgatatctgcaccgggtaggcgggtgatcaggtttttggggagtgcctcctgcacgactgctcatcgccatgtctggagttgctgccgccgctattggcggaggtggtgcgccgccgccgacaggagctgcgccgccgccgacgccgacaggagctggatccggagctggtgcgccaggaggaggtgccgtgaacgactacaacaacggaggcaattctgcctcaccatccagcggagggccattctcggggtataatcttctccttctactgctgttagcgctactcctgttcccattgttagcgctatactgtgtgcgctatgttcttgtttctgttctacatgatgcctctagcatgttatcgcattactggtatgttcctgtttctgacattcatgatgcgcatagtatgctactggttatgttaagatcaccctacactgcttatgccatgatcatagtttcaatttcttggattaaaatatgccgaataatgactatatttccaacattccaaaaacctgataggtcattttcggtagttggctttgctgctgcactgaaaccacatgcttttgatggttcaaactataagagatggaaagcacgtgcactattgtggttgacagcgatgcagtgcttctatgtttcacggggtaaacgaagtgaaccacctctttctcctgaggaagaggctaagttcgaggcttcggattgcctgttccgtggagcattgatcagtgtactcgctgacaacatagtggacgtgtacatgcacatgcgttctgggaaggacatgtgggatgcacttgaggccaagttcggagtttctgacgccggcagtgagctgtatgtcatggagcagttctatgactacaagatggttgatgaccgttctgtagtagaacaagctcatgagattcagatgctggctaaggaacttgagaacaacaactgtgagttgccggacaagtttgtggcgggtggcattattgccaaactaccaccttcttggtcggactttgccacttctctaaagcacaagagacaagagttcagtgttcctgatctcattggctctttgggtgttgaggagaaggcgagggcaaaggacgtccggggcaaaaaggttgagggaggttctagtgccaatatggtacagaagaagaaccctcatgcatcccacaacaacaagaaagtcaagcctgatgtcaaacccaaggctgcaaccaattttaagaagaaaggcaagggaaaggcaaagggagactgctttgtgtgtggcaagtctgggcattgggccaaggactgtcctgagcgcaaagacaggaagtctgccaacatgatcattagcgagggcggaggaacatcggggtacggtaaaatattacctacagttctctctgtttttcattcacctgattggtgggtggatactggtgctaatattcatgtatgtgctgacatttctctgttttcttcttatcaggtcgggagaggttcctccttgttgatgggaaacgggtcgcttgcagttgttcatggtgttggtacggtcgatctgaagtttacttcgggaaagaccgtgcagctgaagaacgtgcagcatgtcccttcaataaagaagaatctagttagcggctctctattgtgtagagaaggttttagacttgtgtttgagtccaataaatgtgtcgtatctaaatatgagacttttgttggaaaaggttatgacagcggaggcttgttccgcttttctttgaatgacatgtgtaataatcataacgctgtgaaccatattagcgagaatgatgagtctaatgtgtggcattcgcgactctgtcatgtgaatttcggttgtatgatgcgcttagctaacatgagtttaattccaaaattcactttggtcaaaggttccaagtgccatacttgtgttcaatcgaaacagcctcgtaagcctcacaaggcatctgaggcgaggaatttggcacctctagaacttgttcattccgatttgtgcgaaatgaacggcgtgttgactaaagggggaaagaaatatttcatgacactgatagatgattgcactagattttgctatgtgtatctattgaaaacaaaggatgaggcattgcattactttaaaatctataaagctgaggtagaaaaccaacttgaaaggaaaatcaaacggttgaggtctgatagaggtggggagtatttttccaatgagtttgcatccttttgcgaagagtttggaattattcatgagatgacgcctccctattcaccccaatcaaatggggtggccgaaagaaagaaccgtactctaactgagatggtgaatgccatgttagacactgcggggctttccaaggaatggtggggtgaggcagttctgactgcgtgtcatgtcctgaataaaattccaatgaagcacaaggaagtaacaccattcgaggaatgggaaaggaagaaattaaatctctcatacctacgaacatggggctgtttggccaaggtaaatgtacctatagtcaaaaagcggaaacttggaccaaaaactgttgattgtgtgtttcttggttatgctatccacagtgtgggttatagattcttaatagtaaactctggagtacccgacatgcatgctggtacaatttttgagtccagagatgctactttctttgagaatgaatttcctatgaaatatacacctagcacttctagtaaagaaactgtcatgccccatgagcactttgcaccgatagaacacaatgatcaaacgcctgaggaaaatcctgaggaggacaacattgtagatactcgcaagagtaagagacaaagggttgcaaaatcctttggagatgactacattgtatacctcgtggatgacaccccaagaaccatagaagaggcatatttatctcctgacgctgactactggaaggaagcagtacgcagtgaaatggactcgattatgtctaatggtacttgggaagtcgttgagcgtccatatggatgtaagcccgtaggatgcaaatgggttttcaagaaaaagcttaggcctgatggtacaatcgaaaagtataaggcaaggcttgtggccaagggttatacccaaaaggaaggcgaggatttcttcgacacatattcaccagttgctcgcttgactacgattcgagtactacttgctctggcagcctctcatggtcttctcgtccatcagatggacgttaagacagctttcctaaatggagagctggaggaggagatctatatggatcaaccagacgggtatgtactagaaggtcaggagggaatggtgtgtaaactattgaaatccttgtatggcctcaagcaagcacctaagcaatggcatgagaagtttgacaccacgcttacatctgcaggctttgttgtgaacgaagctgacaaatgtgtatactatcgctatggtgggggagaaggggtgatcttatgcttgtatgtcgatgacatactgatctttgggaccagccttaatgtgattgaggaggtcaaagactatctgtccaagagtgatttgggagaggctgatgttattcttaacatcaaactacaaagaggagatgagggtgggattacacttgtgcaatcccactatgtggacaaggttttgagtcgctttggatatagtgactgtaagccagctcctactccttatgatcccagcgtgctattaaggaaaaaccgaagaatagcaagggatcaactgagatactctcaaatcattggttcattgatgtacttggctagcgcaacgaggcctgacatctcatttgctgtaagcaagctgagccggtttgtctcaaatccgggagatgatcattggcaggctctggaaagagtaatgcgctatctaaagggcactatgagctatggaattcactataccgggtatccaaaagtactagaagggtatagtgactcaaactggatatctgatgctgatgagataaaagccacaagtggatatgcgttcacacttggaggtggcgctgtttcctggaagtcttgcaagcagaccatcttaacgaggtcaacaatggaagcagaacttacagcactagatactgcgacagttgaggctgagtggcttcgtgaactcctgatggatttgccggtggttgaaaaaccagtgccagctatcctaatgaactgcgatatcaaacagtgattattaaagtgaacagttcaaaggacaacatgaagtcatctagacacatcaagagaagactgaaatctgtcagaaagcagaaaaactccggagtgatagcattggactatgtccaaacggctagaaatctggcagatcagtttaccaaggggctaccacgtaatgtgatagacagtgcatcgagggaaatgggcttgatacccacctaaggttgcataatagtggaaacctgtccattgtgatcggagatcccgtgaatttggatggtgaaacaaattattgtgtgactgagagaagagacccttgaaaggggctcattttcatgatgtgcttctcttctttcctgcatggtaggatggcttatgtcttaatgtgatccgagtggcttttccaagcagagatgttgacctgcagaacatctcagaaggaacacacctatatgagttcgactgctagtcacagtctatgaggtttgggcaatctctagatactcatgaaaggcctggagtttgacttatatgctccaaacagaggggatgcgaacggcagcccagtaccagtcaaggttctgagtgaaacctgatcacacaaaacttacaattcaaggcatagtccattgttcagttgtggtctgatgtagctcatttcctaggtggaagttcaacttaacagtctccaccaaaaccctggtatatcaaacaggcacagccttgagaacatttcttatgagccttgaaatttggtggggattgttagaataattgggctaggcccaacttataatattaaatctcaaaggcccataataaatgttgaggataataataccacctctggatttaagcgagaaatatctcaacctaaatagggagttattagaggctccctgttgaccagttgaggtgggggtcggaatgccacacgcgcgcgcgcgccgggccgggccggggcgtgggcgtggcgtggcgtggctggctggcggcgggcgtgcgtgcgtgcgtcacgtcgctatccttttgcagccactaacccacgttcccacgattccctccgcaacagcgcgtccacgttctttctcctgatagataaggaggccgcgagtctgatccgagttcctcgcttctttcccggtgttagtttctccttctccgcgcctgagttgctctcgcttccccgcttctgatctcttgcgcgcacgagagattggaagaagcagtgcctccgaaaccacaccttcgcctgagatctgcaccgggtaggcgggtgatcaggtttttggggagtgcctcctgcacgactgctcatcgccatgtctggagttgctgccgccgctattggcggaggtggtgcgccgccgccgacgccgacaggagctggatccggagctggtgcgccaggaggaggtgccgtgaacgactacaacaacggaggcaattctgcctcaccatccagtggagggccattctcggggtataatcttctccttctactgctgttagcgctatactgtgtgcgctatgttcttggttctgttctacatgatgcctctagcatgttatcgcattactggtatgttcctgtttctgacattcatgatgcgcatagtatgctactggttatgttaagatcaccctacactgcttatgccatgatcatagtttcaatttcttggattaaaatatgccgaataatgactatatttccaacacggtctagggcgtccgtgatagagatgttgggggcgagttgcatgtgagaacaaggcaaggaacagttgaaagagggcgccgcctaaaatccaattatcaaaccagaaggaagtggaccgaccatctccaatgatggatttcgaaacactacggaagtgtgtaaggcccgcgacgatgtccttccagatgatcgtgtcaaggcgcaaaagatcgcctagatcacacgaggcagaccatccgtagtgatcgcgaaagcaatcgatccacggtgcagaatcaccctcgtgcattttgaggagaaatttttggagaagacatatgttctgtgtcttgagattttttatccagcaccacctttcgctttcggagagcaaactatgttacacgcaattttgcaattgccgctgtgacagttttcttcccccgtccagaagaaggcccttcagcgcttgtcaatagtggtaatcacttctttaggaggaaggatagcccccatcatgtatgatgggagggccgagagcaccgaattgatgagggcaagccgaccatcggaagacagaaggtgaccgcgccaaccggcaagtcgcttgtcaatcctagcgatgagaggttgacagtttgcaagacaaagcttggtaacaaacagagagagggaggcataaataaggttgggggaaggaagctatggagcaaccaagaatccccgccaactgaaacgccacgtcatgctgaacgttaatggggaggaaggtgcttttacccatgtcaattccttctttttaccatgcatcccccgttcgttttcccatgattttagatactttttttttgtccccgatcgaatcacagatcatttttcattactgcagttgcaaggatgtggcaaaaaatatcatctagaccagttggttgatttgtcacctacatttattcagatctaataagaatataagtcaacaagttggtttttaaattcgatgtgtatatatctttaagccgacgatatgtatttcagtaatgacctttacccggtgaagcttttttttcttaattggtatatacaggataatagtatgttttaaactctctatcaagaaagagcagctaagctggatgggctctccaatttatgttaatttaataattccctcgataacaagataaatgatctccagtcatttcttgaccattgttctactttacctatgactttataaaatcctgtagcaacgtgctgagtatcacccaataaacataagaaaacacaccatgcatgttctagtgagcatcttgatgctggtaggataactagcgagctaaataaagctaagggtcggatgcgacatgggtgctagcgaatagagcttttctgccttgttagggtgcgtttggaatcagctgttgcatgtccgagcagtatatgagcgcgtgattaattaagtattttcttttttttcaaaaatagataatataattttttaagcaactttcgtatataaactttttttaaaaaacacgccgtttagtagtttaaaaaacgtgcgcgcgaaatacaacggagagggattggaaacacaggattccaaacacagcctgaatcgtcattgatacaaggaaagatgggaggaggaacaagagggagaggagcaatagtttgggggatgatcccctccattaatttctcattctggatctgtgctacttcctccgtttcataatataagtcattctagcatttatctatctagattcattaatatcaatatgaatgtggaaaataccagaatgacttacattgtgaaacgggggagagtagctaggaatggataaataaataatgttatcccaaacagaaaaagttacgtacggccgggtatgtgcttcacgtgaaatgggaaatatatacaatcaatgacgactaatttggcagcaaacatgcatgcatgggccagttaattaattatgctaaatggatagtttgattcgatgagcagccggacgactgaggctttcttttgttgggaaaaaaattaggtttgattgtcacatcagatatacggatatacatttgaagtattaaacgtagtttaaaaacaaaataaattatagattctactaaaaaactgcgagataaatttattaagcctaattaattcgttattagcaaatgcttactgtagcaccacattgtcaaatcatggtgcaatttggtttaaaaattttgtctcgtaatttacacgtaatatgtgtaattggttttttcctacattaaatacttcatgcgtatgtctaaacatttgatgtgacagtgtgaaattttttttttaaatagggcctgagagcaaaacacatgctgcatgaatagtagtcgctcgctcgtgtatcatacttaaagaaagtttaactaggaaaaaaaaacctacttcatatataaaatcacaagaccttttatccaaaaattgaaactttcaactaaaagttcaaaaaaattatactcttggctcaaactttcaatataaaaacccaaaacttctaatccaaaaactgaaacttcccaaaaaaatcaaaaactttgtgctcatggctctcaatctttcgatacgaagttacagaatcatggtagggtagctagctaaataaagggacggatgcgatatgggtgctagcgaatagagcctttctaccttgctgaatcgtcattgataattaggggaggaggaacaagagggaaaggagcaatagtttggggatgatcccctccattgaataatttctcattctggatccgtgctagggatggatcaataatgttatcccaaacagaaacagctagtgttaggtacgggtatgtgcttcacgtgaaatgggaaatatatacaatcaacgatgactaatttggtagtaagcatacatgcatgggccaattaattaattatgctaaatggatatagtttgattcgatcagcagctgaacgactgatcgagagcaaaacacatgcataatgcataatgcattaatttatatatatgaatagtagtcgctcgctcgtgtatcacgcataaattatatatcaatgatcgatcacatgcaacaccggcaaattaaattgacccatcatcgatccatctagctagctatgcctatatatatacgccatatgcatgataaatacgcaagctaattaagctagctacatatatactctctcaaaagtttacattaattgctgatagctcatcatcagtttgatcgtgtccggaggtgtgaggtcgtcggcgagatgagctccggcggcgaggaggggaagacgtcgtggccggaggtggtggggctgcgggcggaggaggcgaagaaggtgatcctcaaggacatgcccgacgccgacatcgtcgtggttccggtggggacgccggtgaccatggacttccgccccaaccgcgtccgcatcttcgtcgacaccgtcgccggcacccccaccatcggctagagctagctactagcctcatctgcctgccttcagcatcctgcttatcttaattaaataatcacatgcacgcaagtgatatgtactgtgcatgtttcgatcgatccatcccccatctgaataatgttggttttaccctacgcacgtgttaatgtttttctcctacgaataaataaagagaccttcatttaatgcatggtagccaactactccctccgtttcacaatgtaagtcattctaacatttcccacattcatattcatattaatgaatctagacatatatatctatctagatttattaacatcaatacaaatgtgggaaatattagaatgacttacattgtgaaacagaggaagtacctagctaatctttaggaaacaactacaaatagaacgtcccattttattatttttctttaaaaaaatttggcggtgtttcgcctctcataaactaatgttgtagcatttagtgaaaaaatgttttagttcttaaaaagaagtagaacacaattggatagtcatatgaaacaatttgtttcaacatataaaacaaattttttaaaaccattcaaacatcaacaagatccaagtgaaaatcgaagagaatgaaacactataaaaatacccactaaaacacttcgatctaactaataaaacatctaaaccatttttgttcgctggcatcgtgtttcgcaagcaggcatgctaagacagccgctagcaaaaataccatttttgtaggcagcaaactaaagaggacaatagatgaaaacattttttgggataaaacagttgaaaatcgagatgtcgtcgtatagcggcagggcagggtcgacgatagcggtcggcctgcgagggtcaacggccgtggtccggaggaccaccgctgccggatctacctccttcaccgcccctcatcttcgccgctgatggaccctaagttcctctcgacactcaaggctgttgttggcccgatctttcggtgagttgtgataactacgatttgggagaaacgttaacgatccgactacaaccgtacgagacgttgtgttgcgccttagcgatcgatacacctctccgtgggttgttgatcttgctggtgcagatcaaccctaatcctgcagcaaatcgaagaaacaagcaagaccaagataaaagcaatctgatattgccaataggaatttaatacaaatgataagttggggttccgaatacaagcagacggacggtttagccgacacgcgcgctacaaggaagtagcaatagctaaactttcatctaaacaaaacctgactaaccctggaggggttactagctatttaagggatggaggaggtcagaagggcgtcctccctctgtttggggcacagccccccttgggccccacttgggccggggtcccagacgaagttacaggcccataggcccattacagacaatgcagccccttgtttcttcaattgcggctcactgagatggaatatcacaatgaggctggatccgttggaaagaggactctgagagctttccatcaagtactcacgggacgaaaacggagctcgaatggagatttggcggccgtttgaagtcagcaatgttgcaggtggccgaattggattccagcacttggaagacttgatcttgatatcttcttgttcatccatgatgtgaacaatgattgtatccatagtagccatgatcacatcagccgcagtcgaatctatcccctacactatcgccacccgtctccattgccactatggaggaggatatatgccaaggggaagccatagccgggaggaagtcgttgctgccagatccccaccatcgtcacctgccgccatcggattcgcgccaccgtgacccgctgtcgccggatccatgcccccgtgactcgtcgccgtcggatccatgcccccgtgactcgctgctgccagatctgcaccgtcacgacctgccgtcgccagatccggaccgagccaccccctcccctccaaccaaatctaggagggggaggggagagccaggccaccgcaactgctctgatccctacagtgcgaccgtctcgtcgtcgtggtcgcgtcctggacggaagcacaccgccgcctcccctccgctgctgccgacctccactacgtggctctccttgcctccgccaagcatggccaagtcgtgctgccgctgccgccgagcgccgccatcattgaccgccgccgctgcaccccttcgctgctactagctagagagagagagataaagaaagaaagaaagaaagaaagaaagagagaagggttggatctgaggggtcgaggaaaaaaagagggagcacgtgatgtttattccctcccacgatttttgcaagcgaggctcccaacaccccgccagtaaaaaatagtttttttttactggctgcatcttaagagcaccacttgcaaaaatacctctatttttgctggcggccctcttaacctggccaccaaggacgatccattttcgctgctggccattagcccccaacccttgttataattccactggtggttttcacgtatggccgccagagaaaaaaataagttgacgccatgaaaaatcaattttgtagtagtgagcgtgaggagcgggtggagagaaacggttgagagagaggaggggaatgcataatatggaaggtgggggtgcgagggctgggcagcgggtggagcgaggcgtggggcgcgggcgcccaatattcttgttcccatcgggcgcccgagtcaaagggttttcgtaatctttaccacatcgggagcagagaagttgtttttatcgaagtaaattgtttactccgataatggtggaagcaggatggcaggacgtgcggtggggtggggagcagggaagttgtttttatcaaagtaaatcgtttactctgataatggtgggagcaagatgatgggacgtggggtgaggtgggcttgggctgatgcatgcttggcgctcggaatactaggagcatgctgcgctcctagtagtatctctatataattcatagatttttcttttgttttgtaaggagtactccctccatttcatattataaattgttttaacttttttgggtttaaccaagtttatagaaatattagcaacatctataataccagattagttttattaaatgtagcattgtatgtattttgataatatgttgttttgtgttgaaaatattgctatatttttctacaaacttggtcatacttaaagcaagtttaactaggaaaaaataaacctacttcatatataaagtcacaagaccttttatccaaaaattgaaactttcaactaaaagttcaaaaaaattatactcttggctcaaactttcaatataaaatccaaaaactgaaacttcccaaaaaaaaatcaaaaactttgtgctcttggctctcaatctttcgatacgaagttacagaatttgagaaaactttcaactgaaactcctcacgagggtgtcaagtagggatgaaaacggtcggaaacaatcggaaaaaaggctcaaccattaccataaccatatttttctcagaaacaaaaacgatatcggaaatatcgaaaaaccagaaagggcagctacgctggatgggctctccaatttatcttaatttaataattccctcaataagaagaaaaattatcctcagtcaatttcttgaccattgttctacaattttacttataaccaaattttacttataaccaaatattacttatgactttatagtaataaaatcccgtaggctgcagcaacgtgctggatatcacccaacaaacataaaaaaaaaacatgccatgttctagtgagcatcttgatcgtggtaggatagctagctaaataaagggtcggatgcgatatggatgctagcgaatagagcttttctgaatcgtcattaatacaaggaaagagggaggaggaaccagaaggagaggagcaatagtttgggggatgatcccctccattaatttctcattctggatctttgctagggatggataaataatcttatcccaaacagaaaaggctagagtacgggtatgtgcttcacgtgaaatgggaaatatatatactatcaatgacgactaatttggcagcatacatgcgtgcatgggccagttaattaattatatatgctaaatggattgtttgcctcgatcagctgccggacgactgagagcaaaacataatgcatttatatactcgctcgtgtatcacgcataataatactatactactcctatgtatcaatgatcgatcacatgcaacaccgacaaattaaattacccaccatcgatccatctatctagctatgcctatatatatacgccatatgtatgacatatacgcaagctacatatacactctctccaaagtttacattcctgatatatagctcatcatcagttgatcgtgtccggaggtgtgagaggtcggcgatgagctccggcggcaagcaggacggtgcggcggcggcgggcgaggaggagcggaagacgtcgtggccggaggtggtggggctgccggtggaggaggcgaagaaggtgatcctcaaggacatgcccgacgccgacatcgtcgtgcttccggcggggtcgccggccggtgaccaaggacttccgccccaaccgcgtccgcatcttcgtcgacaccgtcgccggcacccccaccatcggctagcctgcctcatctgcctgccttcagcatcctgcttatcttaattaaataatgatcacatgcactcaagtgatatgtactgtgcatgttccgatcgatccatcctcatctgaatcatgttttacctacgtgttaatgttttttttcctacgaataaataaagagaccttcatttaatgcatggtagccaactacctagctaaaaacaactacaaatcgcacatcccattttattatttttctcttaaaaaaaatcggacggtgtttcgcctctcataaactaatgttgcagcatttagtgaaaaaaatatttcagttcttaaaaagaagtggaatacaatcggatagtcatatgaaacaatttgcttcaacatataaacaaatgatttaaaaagaagtggttataagaggctcagtagcaccataggtcgtggattcgactcctcatgggagcgaatttttcagaatttaatggctttgtgcagccctggattcaactccccatgggagcgaatttttcaagatttaacggctttgtgctttcagtggtaggtaacgtatccgtcgacagcgaggcgcctgtgatgactttgtccactccaggatgaatttgccggcccagtcttcaaaaatgctcatagggatagggtttgcgtgcgtgcgatcataggggtgattgtgcgtgcgttgtgagtgtctgttttgtaccatgtaattctaaaaaaaaaccatcaacaagatccaagtgaaaaccgaagagaaaaaatgaaacactaaaaaaaacccattaaaacacttcgatctaactaatgaaacatccaaaccatttttgttcactggcatcgagtttcgcaagcaggcgtgctaagacagccgctagcaaaaataccatttttgcaggtggcaaactaaagaggatagccaatgaaaacatgttttgggataaaaaaaatttgaaattcgagatgtcatcgtatgagggtagggtagggtcgacgacagcggtcggcctgcgaggatcaacggccgtggtccagaggaccaccgctgcctgatctacctccttcaccgcccctcatcttcgccgccgtggaggcggatccagtggtatcgaacaccaccccagtcagatctatcccctacactatcgccacccgtctcctttgccgctatggaggaggatatatgccaaggggaaaccatagccgagaggaagtcgttgccaccagatccatgccatcgtcacccgccgccatcggattcgcgccgccgcaacccactgtcgccggatccacgcccccgtgactcgtcgccgccggatccgtgcccccgtgacctgctgctgccgaatctgcaccctcacgacccacgatcgctagatccggaccgagccacccctgccctccagccaaatctaggagggaggggagagccgggccaccgtagcttctccctgcagcgcgaccgtctcgttgtcgcggccgcgtacgggacagaaccacaccaccgcctcccctccgctgccgccgacctccactacgtggctctccttgccgcccccaagcatggccaagtcatgtcgctgccgctgagcgccgccatcgttgaccgctgctcctgcaccacttcaccgctactagctatacagagagagaaatcgcgagagattcagagagagaaaaataaagaaagaaagaaagaaagaaagaaagagagaagggttggatctggggggttgagaaaaaaaagagggagcacgtgctgtttattctctcccactacttttgcaagcggagctcccaacaccccgccagtaaaaattgttttttttactggcagcatcttaagagcaccgcctgcaaaaatacctctatttttgtcggcggccctcttaacccggccgccaacgaagatccattttcgctgccgacccttgttaaaatttcgctggttgttttcacgtatggccgccagagaaaacaaataagttgatgccatgaaaaatcgattttgtagtagtgagcgtgaggaacgggtggagagaaatggttgagagagaggaggggaatggataagatggagggggtgcgagggtgtgggcggtgggtggagcgaggcgtggggcgcgggtgcccgatattctcgttcccatcgggcgcccgagtccaagggttttcgtaatctttacctattattaaaatttaagatgattatgtaggcacccaccttttcgtccgttgtgacattagtttactgatttttcgtaacctttacctattattaaaataatcttcctaggtggccatacgtgaaaatgatcttcacctggaaaaataaatgcaccccgtctaagaaaattgtattcataatagtgggtcctcccactgcagccaccaccgctgcccaatgcagttgcgtgccgcggcctgacagagccgacacctgctgcagtccacgtcaggagcagagaagttgtttttatcaaagtaaattgtttactccgataattgttggagcgggatggcaggacgtggggtggggtggggagcagggaagttgtttttatcaaagtaaatcgtttactctgataatggtgggagcgggatgacagaacatggattgaggtggacttgatgcatcaagagcgggatgacgggacatggattgaggtggacttgggctgatgcatgcttggcgctcggaatactaggagcacactgcgctcctagtagtatctctatataattcatagatttttcttttgttttgtaatgagtactccctccatttcatattataaattgttttgacttttttttgtttaaccaagtttatagaaatattagcaacatctataataccaaattagttttataaaatgtagcattggatatattttgatactatgtttttgtgttaaaaatattgctatattttactacaaacttggtcatacttaaagaaagtttaactaggaaaaaaataaacctacttcatatataaaatcacataccttttatccaaaaattgaaactttcaactaaaagatcaaaaaaaatattcttggctcaaactttcaatataatatcccaaaacttttaatccaaaaactgaaacttcccaaaaaaaaaaatcaaaaactttgtgctcatggctctcaatcttttgatacgaagttacaaaatttgggaaaacttccaaactcctcacgtgtcaagttgggatgaaaacggtcggaaacgatcataaaacaggctcaaccattaccataaccatatttttctcagaaacaaaaacgatatcggaaatatcgaaaaaccagaaagggcagctacgttggatgggctctccaatttatcttaatttaataattccctcaataacaagaaaaatgatctccagtcaatttcttgaccattgttctataattttacttataacaaaattttacttatgactttataaaatcccgcagctaggggtgaaaacggtcacggaaattcccaatcgaccgggcgctgtttctgtttaaggggtaccgtttccgaccataacgtttttggctattttaaaattttgttttttctaatttctttctgtgtcgtattaatgtcgatattgagtagtttaaatgataaatatgttcaattaccgaccgatcgagcatcgtttctgaagagatgctactgattccgactgttttcacccctacccgcagcaacttgctggataccacccaacaaacatataaaaaaaacacaccatgttctagtgagcatcttgatcgtggtaggatagctagctaaataaagggacggatgcgacaatgggtgctagcgaatagagcttttctgccttgctgaatcgtcattgatacaaggaaagatgggaggaggaacaagctagagggagaggagcaatagtttgggggatgatcccctccattaaataatttctcattctggatgtgtgctagggatggataaataatgttatcccaaacagaaaaagttacgtacggccgggtatgtgcttcacgtgaaatgggaaatatatgtacaatcaatgacgactaatttggcagcatgcatacgcgcatgggccagtttgattcgatcagcaaccggaccactgagagcaaaacacatgctgcatgcataatgcgtttatatactcgctcgtgtatcacgcatatcaatgatcgatcacatgcaacaccgacatattaaattgacccatgcatcgatcaatccatctctctagctatgcctataaatatacgccatattaagcaagctaattaagctagctacatatatatatatatatatatatatatatactctctccaaagtttacattgctgatatatagctcatcatcatcaatcgatcatggccggagttgtgaggtcggcggcgtgcagcggcggcgagggggagcggaagacgtcgtggccggaggtggtggggctgtcggcggaggaggcgaagaaggtgatcctcaaggacatgcccgacgccgacatcgtcgtgcttccggcggggtcgccggtgaccctcgacttccgctccaaccgcgtccgcatcttcgttgacaccgtcgccggcacccccaccatcggctagcctccctcatctgccttccttcagcgcccgggcccccggccatctttatcttaattaaataatgatcacatgcacgcaagtgatatgtactgtgtgcatgtttcgatcgatccatccccatctgaataatgttttaccgtcaatgtttttttcctatgaataaatatggaagaatcttctcccatcgaacgtccgacgtcccaaaaaaaaatcagacggtattccggtgaccaacgagtgaaacatcaaattatatatgactagtaatatacccgtgctaacgcaacggtgatatttagtagagtaaaatggacgggcggctcttaaacttgtagaggtgtatcatctaggtccctaaactcttaaaatgcatatccaagtatcagaacttgtcatagtatgttctctaggtcccaaatcgctacaaccttctggatcctacatgatactgatgtggcatgccatacgtgcatgacatggcataattttgactgacaaatgagacccatttaaaaaaaattctttttctttttttcttctttcttctcttttatttttcctttcttctcctttctctatgacccaagcagaagaaagaaaaaaaaaagaagaatgagaagaaaaccaaaaaaaagaaaaagaaaaagaaaagaagaaaaaaaagacccatcatgtccatgtggcatgccacattagtgccacataggatcttagaggggctgtgtcgatttgggacctagatgatacactttgataagttccgagacgtggatccattttaagagtttggggatctagataacataaccctacaagtgtaaggaccgtctatgtactttactctgtaatctccaaaagttaatattgtttttagtcaaaaagaagttaatattgttttaattataaagcatagaataaggctgctggatttattgaagaaatagcacctatagaacctttcaactgatatttgtaactattggttctatagaaatagcacctatagaacctttcaactatttgtataataataactttgggatttgaaggatcaaataacagtgacttcacagtcgaagtatgtgctgaaaaaggaaaaatagaaacgttgttgctaaatgaatagaaatgcccaatccccagctctcaaaaacaaatagaatgaaaaaaaaattgagaaaccgaggttaacttcaactgcttctctgtgtcagacttggcgagcgaaaccttcagccggtggcgagcgcacattactcttcactatgtgtaggtatcagctaaataccagaagcgtccgtattctattctaacaaaatacatatattatctaccctgcttatcccttgaaatgacaaattgaactgcagtctgaaaatgagacataattttatcaaaatactaatagtaattagagaagagtggcacttacattgtactcggaacaattctgcaagcctctctacatataaaagcatccggtcaaatatcaatggttgatatacatgcatgcatggttgctttttgcaaaacattcgatcaataaaggaaagggctctttatattttcttcggtacaacatctaacaaaaaataaaacacaacactaaatgctgtagcaattaccagtgtacatattctgtaaacatatacttatagtaatatgcctgtgctaatgcttcaaagccaatcagtaatgtaaattaaaagcataggatgagatggatttaagttagtatattgttgattccatagccgcatgcataaaataaaatcacaatttttatacatttctaactatctacaacacatataaattcgaccagctattaatttatcgtgttcaatacagtgtattacaaaaatatttttcctcacttttattcccagtgcagcctctcttctccactctacatatccatgatatgtacattttcttcagagaacaagtactacagtgttaatcagaaaaaaaaaggaccgtggaattgatatgcataacatcatttggaaaatgcttagtaataggacaaatctgcccgaaaaaaagattaccaatatttgactctggcatgccaacaacgagaagaaatgtttacataatcaattgatactttatttattacagttctaatccaaagcccaaaggtcaataatattagctcgtaggcagctacatatatcactacattcgtcatctgccctcttagccttgaagcctagtcattcattgatggaacatattaccaatctcacgaaccacatagtaaatattcagaaggtaccaagtagccaagcactgattattatcagtttgctgctctatgcaaaaagtaaaatataataaataataaataagaagaagaaagaaagaaaaaggagaatggaagttcaagaaatattaaataccaaggtgcatctttattttttacacatatgtacatgtaatggccaatcacattccagcattttttactgctgttacagcagaaggtgcattttgaaaaatcaagaaattatctggtttcgaattgcactgaacaacacgcaatgcacctgcatcaggtaaaattataacaccgtgtttagtccaaagaacattttaaaggaaatagcacttacatggcaatacctcagattgagggcaaattaccctgttgcaacaaccattagtaatccatcaatttcgtcccaaatcaatttccggagaggaagatatctgatgcattcagatccaattgataagccaaaaccataatgtcttgcttgcaattcctatcaggcaggatcagagaaatggacctgctcacgcgcatgagcttggaagtagatcagccagtggcctggttggtgtcgactcgggatcagcggcgtccgcgccgacggctgcaacgtcaggcggatggatgcctccacacttgcaggcttgcgtttccccaatcttcggaaggggaggagatcgcgttcgcgtgggggagggggaggaaatcacgcgcttgcgttgcggcgaggcgatctgcagccggccggctcagggagcaatagccaggcttggggagggggaggcgctactgcggccagggcgacgattgtgagggacatcggcgctgggagaggggcggattggcggattgcgggatggcgaccgtattctcgggcgtttgacgcgcgtgggaggtggagacgatcctgagcattggatttcacagaggtgatctgaaccgttgagtgatgaatgtaagagtgtaggagagaaagatgagtaaaatgagttggtgaattataaggtagatgaaataaaaaaaatcagcaactgacacatttaaaaattttaccattttcattttcgttccaatcgattaccattttcatatggcttggccggtagaaagtcggaaacgaacatcggtcagctaagaatttccgttaccgttttcatcccagtatcaagatttgacgaagaagttgtcgggtctccttaacgtcgctgaggagtgactagtgaggaagggctcgtaacgcctcgccgagtagagtagcgaggaagaagggaacccgggctcgcccaaatatcactgcgtgccattgggccgtgcttgggccggcacgaagcacgatgggccatgccgtgctagaccggcacggcccaagtccccacaattacctgagtgtgcccaacgctccagatttaatttcgcatgttgagccaatatgctttatggctaatctcaaacacaagcacttagctggtttttcacctatagtcttgattttgagattttatttattttcggctatgaagtaagaaaattatcaatgccttcagtgtccagactttcaggtgttgagaggctgaggtacaaatgagagcttctgggatgaaatatcaagcagtaaaacattatctcaagaaatgcaagcaccaaaaaagatcaaacgagtatcccttagcctcctcatttgtgggttgaacaccaatacggtgacaatttcataactgctgatcaagatatggctcatcagccaaatgaactctgcaactctgcacgagttcacctctgctgggagctatagtacaacagtgacaatcagtcatcggtcaactgcctgagataattttgaacgcattcatctgcataatgacttggaagttggagctttgctggtattgttctgaaccaattacagacatgccaggagatttgacaacagagagtaatcggtcaaacgcaaaaaagggaatgttgggtattacaaaaaaggggaatgtcagggtgtacagtcatgagaaggccgagctttggtataagctactttactctgctgatctgaactcatacataacccctcaaatcaagaacaagcactgcatccagttcttgcactgatctgggagcattactctacaagccatggtgtcagaacagattcccattcgcagagttcgccttctttgaaccatagagctacagacagaaaatgtgtaatgagtttatcatctgtttgtaaagaacaaaatagcaggtcacaataaagttaagtccaagctaacaaacatgcacgtctctaagcacatagtgctgctgaattattatttttaaaaaaaaaaaacatgatcctaatcactgtgtcaactacttcattcttcgtagtacttaaaactcatgattctatgcaccttatattgttataccatgactactgggaaaaggagtagaacttaccgatttcacgcttgccgttatcaggactgtcacttccatggacaacattcctggaaagcagagtccataagaaatttaatttctttgacagagatatatatgcagagatatccgctaaaatgtgaaagatgtggtagatataataatgttaaaacatgaaaggttgtttgattccaaccttcctgtttgaactgcaagatcgccccgtatggtccctggttcagcttgaaggggattagtagctcctattaacttgcgagctgatgcaacaacaccattcccctcccaagccttacagaacagaacaacaataaatttaattgaaaacagtttactgatcaaagtgcagagttacaaatatgtttggttctttacaaatatatataccatgcaaacaacagggccagaagttatgtactcgatcagaccgggaaagaaaggtttttccttcaaatccttgtagtgctcctgtgcacataagagagaattagcagctcgttgattaaacataatatactcctggtgattcccttcctatgtgaaaacaaagataatactgtatgctctgacggtgagcagaaaccaggtttaaccacaaatttcgatggcatttctacaaaattttctccagctgcttggatatttaatggatcacttttcgttggctgaatacaagaaaaagtgactcgaaagaactatctcagcagtcagcaaagaatgagtactttggatgatcaaggctgtcctgaaataacataccagacagacatgctatttatcatttattcgattgtgaaatttccattcacaacaataaaactgtgatctcctcaaataagtccattcaagtcttggcaaattgcccactaccaagaaaataaactgggcatgatattttgtcatgccacgcaaccatggtatattttgaaatggcaccattgctctccaacgatgattaaatggtgagtccccagatggtggaagaaaacactttacttttgaagaaaacggtggatattaagaggcaaacctgtgccaagtccttggggcactgaaaaagctttaagcccttcaacacaaagcctttcttctcgaaacgggaaataatctcgccaacctatatgaacgaatcgacaggagtgtttatctgagctgaaagaaactataatggaactacagtattcagtaatggaatatattacgtcaaaaaaaagtaatggaatctaaagttagaaaagtaagtaaaatgatataccaggcctcgctgaacaccatcaggcttgatcataatataggattgctcaacctacagaaaaaatagatttaatcttatggttgatcaggaagagatcacctaagtggagagttctcaacttctaactgaaataacagaatattgaggtaatcagaaatgtctgacatctattatataataaagtccattaaacttccta

SEQ ID NO: 10696 - DNA, 1426 bp, Oryza sativa
tacccgcacaaatgcagaacccagagatacagaggaccagctgtaggattatttcatacaagggacttgagcatctgcaaacttcagtaacctcagtggacacctggaaccaattcttcatacatactgagggacaactatacatgcaaaatcctttaaagtgtttcaaagatattcttcatgagcacaacaagccttaaatttgccttttttttgagacggagtcttgctctgttgcccaggctgcagtgcagttgtgcaatcttggctcactgcaagttccgccttccaggttcacaccattctcctgcctcagcctcccaagtagctgggactacaggcacctacaaccatgcctggctaattttttgtacttttagtagagacggggtttcacgatgttagccaggatggtctagatctcctgaccttgtgatccacctgcctcagcctcccaaagtgctgggattacaggtatgagccaccgcgcttggcctaaatttgactttttaaaaaaactttactgtgtaatgcaatttagcatacttatagagactttattggacaacaggtaagtaaaattatccttattttacatatgagaaaactgaatatgccagctactatttttgcattgaacacccagaaatgtggtgatgtaaagcaaccattttattaagttcacagattgttagtattggaattttggatagggtatagaaagaaaatcttgtctgtgctccacattttctagagcctcatttgggaagactcaaaggcaaggaatgactcagagggaagaatcatctggaggcatgttcatcagcatggctagagggtgatgttggctgtcagctaggacctgagcaggtctgtaggctggattgcctccatgtgccccctctgtgtgacctggcttcctccacagcagggcagcctcaggagagtggggcttctcacatgcagtccagagtttcagggatccacgtagaagttgcatcattttttgtgatctatccttgaaagttgcacagcatcattttattaccaaaatgccagaggtttggtctaagtcctgctgttcactccacagaaagccaatcactgagacaacaagtattgccagggaagaaggctttaatcaggtgctgctgttgaggatatgggagatcagtctcaaattcacttccctaactgactaccattaggggtttctaaagcagggaagaaatgtaccatgtgcggggaaacaggaattagggagaggtagggaagaggagttcaccaacagaaagctggtgcttatttaagcagtcatgatgggtgaggactctggcatcccattgtctagatgccatgatctggtaagtttccttccttgatactatctgggaagcatggggatcctctagagtcgactgcaggc

SEQ ID NO: 10697 - DNA, 886 bp, Oryza sativa
ttttgctatttagaaaatcaggtttctccaaattacttgggttccgaagttagtaataagacttgatggtttggtgtttttgttgacctttatggttaggacatacaaactttaatttgggtaagaaaaacatctcaggttaaattcataggagattgtgtaggttctgtgtcatgttccagattatatacaccatcagaagctgaaaatgcttctagttgtgaccagatgagggtatattatttatttgagtaaatttcacatcatttattctaaatctgtggttgctacactctactcaattttttggtactttaataactgatgtttgttatggtgtatatgaagatggatgaggaggagcaaaatctcttgaatatcacggaacaggtcaaccatgtagttgtaaatggtgatggtgaagttaaacagttccaactagaggcacagacaaattttgatgtgcaacaaaaacagatccaggtattacttttgtgttccctattctttgtttgatcttttataacctggattcccatgaatattatttctaacagtttatactaccataggaattgaagggtgctctttcttttgtcaagtctggcatggaacaactgagattacagtactctgaagaatttgctaaacttggtaatatacagttctatttgcgttcatcttttttgtcatcacagaagtatttaatatatccatttttttaccatgttgtaaaagggaaacatttctacactctctccaatgcggcttccagctaccataaagttcttgaggaaaaccgcaaattatacaaccaaatacaggaccttaaaggtataattttgaatgttgaaggaacagatgcctgttatctatggtattttat

SEQ ID NO: 10698 - DNA, 531 bp, Oryza sativa
tctttctcaccctctggctaatttgttctgttctttctttttcccaatataggttgaagcttacggaattgtgctaatgtaacaggaattggaacagaagctcaaggcatcttcgaaccagcgtgaccatgatgaactctaaattatggggtgagacaataatgaacttgctacaaggaaaacaactctcaccatacagccatactcacaagagaggtttaacaggtttattatatgaatagaatagcatatgaaactggaattcttggagttcagcactcggattgccaccgaagcagcattagtttggcaagaaaaatttttgaacaaaagctgtaggatatcgcgaaattcctcaccctgatttgtcggtagattttcttttaccactcttccctgtaaacgtatttgctcaatttttctatgccaccccaaagatgctagactgttgtttgtaacaatctgagtgtttctgagttatgaatagtatatttatgaactacatcctggatattcatcactctggatgta

SEQ ID NO: 10699 - DNA, 1089 bp, Oryza sativa
caaatgtgccatacctcatctcaatgatcttttgtttggctctccaggcctttgcatagcttatggtgtacttgaatttgttctcgatgtgcctaataattgattttggttcaaagccagtgttaccaacaacactgctgtacatctcacttgccacaaaagctgaagtgatgtttcggtgatacttctccaccccttgtaagtagcacttgtgctcggtcacaatgctaactttccaataatcattccatttacccttatatgcatggacacgccacggacaatccttcttcatgcacctcacttcatacacataatttgttgacttgaccaccctaaactctctctgcaatgaaactgcccaatgcttcaccgcctcctttatctcatccttatgagcataccttgcaccctcaatgacctcgtactccttatactcccagggtacatgatcacactctgatataacaagaccagagaagtcctcatttgcccaatcagtggccattacatcaccttcctcatcggatgatgcgtcgtcctccgcttgctcattatccgaatcttccctctccatttcatcaacaattataccgactgtctccccctcatccgccatgcccatggcctgctcctcccttggttgattttcctcattttgcatcgatggtccaacaacatcccctgcattgctaggaccctccacatcttcggtttgcattgaaacatttgtatctttctcttgtaccgacacaaatataacgaggggccatgaccgttcaaaagccatttccacataccgtctccaagcagcagtgctgtccatcggcattagttcccaaaaataaccttctattgcacgactcactacaacagatactgacattgtgtagacttcttggtctattctaaatcctctcaacaaccaactataaattgactgaaatgttctctccgcaggcctatcgatgcccttagatgtcattacaaaatctgacagatcaacaccatctggaccaaatctaatatttccttcaccgtgaactatctgaaatgtgaccttacttgacattgtgcctgatgaaaaca

SEQ ID NO: 10700 - DNA, 715 bp, Oryza sativa
agccggagcttcgctagattttattttccgctgcagttttcttcaagatgaggactaagtgccttataagtaagtatttatcgttttagttaatttgatgaatctgtatattaaattgtcagtttgtgtacctcggttgattcctggacgaggatcttatgcacaaataagttcggaaattactagtgaatttccgggcgtgacaggaaccatgtggtgtacgtgcaggtctaatgacgacggggtcgtgagcggtgaacataagggtattcatagtgcgtcccacacaatacaatacaactatcttaacataccaatacaaaacaaaaagactagaatatccttactttatcaaattccaatacaactatttctcactttatctattcacaatacaattattctctactttcacaaactccaatatactttcacaaactccgatgctacgattactctaaaaatgaacttttattttgggacaaatgaaagaaattaaaaatgaacttattatgagatggaagaagtatatagtaaccaacaggatgttgagagcccaaacgtgtataaaatcctcgtgtactgttttgtttgatgtccatgcttttgctgatcatgaccttctatcaatagaccaggacaccaatcctcaccaggtataatatgcatgtatttatactacccaagtgagagagccatgcatatataattgaaa

SEQ ID NO: 10701 - DNA, 1905 bp, Oryza sativa
  unsure (1)..(1905): unsure at all n locations
tgtaacaaacaataactttcttacactcgggttcttcatcttgtacttgatttctcagctgctgtattggaacttccaaaggtacaacgcagatactggcccctgtcttgtcagctggtggctggggctgaaattgagcattgacaccttgtggtagtgcattcattggaattggagctgttgcaacgcgggctataggactgcttcgggatgcatggatgacaattcgttgaggagcaagcttctgattgcagggagttgcgtggactgacgtgccggcagctatgtttctcggttttgggcacttgtcggcgaaatgacccattccttgacaattgaagcaacagatgtcttcccggactcggcattttcttttctcatttcgattcctctgtcctggcactggagttaggctgaaacggtgaccttggcggggatttgtgttgccttgatgcttctctccgttggaactggcgggttggttggccatcttcttcgtcagcagaaaactgaattgacaatcttttggtacatgatcagttccttcacaaaagaaacaagtgatcctgctcgttggacacctgtcgggtggatggtcttcctcacaatgaacgcatgtagaggcacacgagctggcaacatgaccgatttctccacaacgagagcatgccttaagttctattttattctggttaaagccttggggagacttcgcatcttcatcatctgaggagacttgatctgaatcttcactaccagacactctacctccattagctaaaagatgctctgtcaactgttgtgcacctcgggaggaatttcttctctgatgttttgtcattcctggtggaggccattctgtgctggtaatgatcatcttacggacttcatcttcgttcgcattcgtgcttttcttttctgctgaggacagttccttgcgtagtgcccttgctcatcacacataaaacagatgatacttgcttcttttgggtcaacatgtggcatggcatgaggggccttctgggatgttggcggtgcgctgacttgtggtgtgagtgcttggactgcctccaactgcacttgatgttgcatctgactcgggttcaaaattggcatccgatgctgctgtagtatctctataagcaattggttctggttaatcaggtgttggaccactgccacacaactggtgtctggtgcttcattcactcgggagcttgaagtaccaatgtcctgacttctgaccatattgcctttctcattgtcagccatctgttgcaaagtttggagagggagagagggaaaacaaaggggagagacagattagaaactaaggataggaccttaacagatttaagtctttggctgttatgatgtatgttaggcttattctgcaagttgattaagcaaacaacctagcatggttacatcacaccccactgatgcaaaccacgcgctacacacacaaacaaggaaacacacgactaacgactctaccctagagggtggcttaggttctgcgacgggttctccaagatcttcactcctgcttcacagctggcttcactgcttcctcacttcactagcggatcctgcagtcttccggagcttcggcaaacaattgacgacatcttcttcttcgcaaagctgaccatctagtactagttgaaattccgaagaaggaagaacggagtaaaccttntgcaaatagcattaggggaaggagaaaaaggaactttcgcannatagttttattcataaaatatgtccttaggttttatccacttggcttatcctacagtcgagatggctctgataccagcttgtcgcgaccgggaaaattgccttttcccgaacgctagtgtattaatccccgtcccaggaaaagccggggtacaccacaca

SEQ ID NO: 10702 - DNA, 1464 bp, Oryza sativa
agccaaaaggtgcatcctggtccaagtcaggtgaagagaagattccatctgcaacaggagatcgagccaagcagttccgagtggtaaagttttgctggaagttcgtcaagaagacgcaacggaagaagtcagacaagaagagaagaccgcccaacctatcttcttgctagcctcctcgaatctcggggacgagattcttgtaaggggggtggatttgcttgtcgcgaccgggaaaattgccttttcccgaacgctagtgtattaatccccgtcccaggaaaagccggggtacaccacacaaacatgatataaaagacacatctttattatatcgataatatttacattattacaaaggcgcttcaggcctgacaatcaaaaataaacagcagcggactagcgggcctacggctccatcttcacaggcgctcaactggggtataagccaggactccacctaagacatcttctccaaagcttctcttactgaagaggggagggattgagcaagaatgagtacaaccacagtactcagcaagccacaccggcggatgcataattaatgcaagggaggtacaagggaataataatagggattaagttttgcagtaaacagcatttaaaagtcacttagttgcccaaagccatttataaagacgatcctagagctacacagtattattaaacaaggccgtgaaccctcacgaacctgccttaacccaaggcctacgatgattcggaccgaactggcaacccgacctgggttccagctcgtcccaagccaacccaggccaaccattccatattttagttgttgagcaaattttaagaattaaaacactgacttgggtacattgctcggcttgcccatatccgagggctcggctattcgaatagatttactctgatcagaggtgtacatctttacccacaagacacatctttactccgcattccatggccttggaacccgtcgtaaagatgtgacataacccttcacccatcctagccgtgaacaaaagtaccgacccaaccctgcctacggccggtatcccgggacaggcaggccagggttgagcccctagcaacaagatctagaccgggtgcgccacacacataggggtgagaccacccgcgtactagtccagtgccatggcatctcgactaacgggcaccgacccgtgtagtttcatttgcctagacatctcgattaccgagccgcagctcgcgtagccttcatttgcctcagagatatccatcgtcgcaacgacttcatccatctctatccgtgtccttttgttcaggactagactgagcaccgagttaagccttacccattagacatgtggttagtcggtagtgctttgcaacagaggcccgagcttaatccttatagtggccggggtgctacttcccataactggcatgcacccaaaccccaccgaaaacaggttttaggggttt

SEQ ID NO: 10703 - DNA, 1556 bp, Oryza sativa
ttctcccggttcggcatcgcctccttcgggttcgcgcgacctcgccgacctcgtccacccctccgtttcgcccgccgaccaccggaacgccgccgtccccgtcaacccgagccgcgccgccgccttcctccgctccggtcgccattcccgtcgtcgccgtcgacccggggtgagccgtggaccgctgtttcgcttcccccttcccacccctctctcggccgccgctccgccgtgcctatggccgccgccggcgaccataggggcgcgggcgcgccgcctcccgtcggctgtgccggcgtggccgccttcgggcgcgtcccgcggctgccatgtggggcccggccgtcagccgcccgcgccctcgggtgcggctgacgcgtgggacccacgggcccggccggcgtaagccgcgtgcacccagtccaccgtggaccgtggggctgccgcgtgggccccactcccgtggacccggtccgcgcgcccctcccctcggctgacgcaatagatccgattttaaattaaaatttaaatgaagaaattcgcaaatatccattaaagagcatataaacttcaaatggccataacttggccatttgaactcggaattggaccgttcaagtctctaatttttccttaagaagtcaagaacccatttttgtgctttgtttctgcttgttgtatggggtttattagagtaaaagccttttcttttccgttggtcgtgtagacgctgcagcttcggaagatccgctcttcgtggaagttgaagccgacgtttgggaaagcgagcaaggcaagtcacatcatctttgaacatattgaatcccagtttacaaaattatgttgatttaaattattgcattatcgctttatttaaattcccgcgttatcactgttttatttagccatgcctatttacctttgttatgaccttattattattgttattgttattattaccttattcaccctagaataaacaaaaccccaactagtggacactctactcatagtaccactagtataattttaggtagatgcttcgcaatttaattaggtaacattaggcggtttacaactctagactttgggaatattcatatcacctggacactttggaatggtttggttgttgtggaattggcttcacaccgccccctctattcaaaatccccaaaatggttttaggctgggctcggggtgcatggttttgatagtagcacctcggccatataaggaccggtcttcgggcctctgttgcaaagcactaccgtacttccacatgtctagtgggtaaggcttagtttgtggctcagtctagttataaacaaaagtacacggatggagatggacgaagtcgggggtgacatctctagggcaaatgaaggctacacgagctgcggcccggtagtcgagatgtcatggcacagggccggtgtcctgctgctaggggctcagtcctgcctgcctgtcccgggggttccggccgtaggtgggatcgggtcggtactcttgtctatggctaggatgggttggaaactatgtcccgtcttccg

SEQ ID NO: 10704 - DNA, 1041 bp, Oryza sativa
gataactgttgttgtacgaaaattctgcataaggtagattcttatcccaacttccaccgaaatctaaagccaagctctcaacatgtcttccaaaatttgattcaccctttcggtttgtccgtctgtctgcggatgataagcagtgctaaagttcagcttagaacccatctcttcctaaagtttcttccaaaaatttgaagtaaactgactgcctcgatcagacactattttcttagggacgccatgcaaacacacgatccttgccatatacaattccgctaaccgacttccggaataggttgtctttaccggaatgaaatgagctacttttgtaagtctatcgactatcacccaaatagagtcatggcctgatgacgttctgggtaaaccagtgataaaatccataccgatttcttcccacttccattcaggaatcttcaaaggctgcaacaaaccggcgggtttctgatgttctgccttgactcgctgacaaacatcacatactgctacgtattctgcgatttcacgcttcatacttgcccaccaaaatctttccttgagatcctggtacattttggtactaccagggtgaatagagtataaggtatcatgagcttttttcagaattgcatcttttaaatctttgttgtcggggacacagattctctcgcccaaccatacagttccttgctcatcctccaagaaaccgatagcttttcctcttctcatattcttcttgatttcttgaatatcaggatcccttaatttgggcttctctaacttgatcaattagagtgggcttcgcttctaaggctgcaacgaaacctctactgacaatccccaaatttagtctttcaaattccttgcataactccaatggcaactgtcgtccttccgtagcattgcaatagtcttttctgctaagagcgtctgctacaacattagcctttcccgggtgataatgaattcccatgtcataatccttaattaattccaaccatctcctttgtctcatgttcagatccggctgagtaaagatat

SEQ ID NO: 10705 - DNA, 642 bp, Oryza sativa
tacccccgttaaacggaatctcgaccccgagattcggaagaactggcgaagagatcgggatgggctgccttcagctcgtcttcacgctcccaggtagcttcttcctcggcgtggctgctccactggaccttgcaaaaacggattaccccggttctggtcctcgcgtccatggtgttcaagatttttcctggctttttccccgagggcaagtctttccgaaccttaatattgctctgagtcggcctgcttcgatggcactcgaaggcatttcttgagttgcaacacatggaacacatcatgcacgtgcccaaaggaggcgggcagctccaactggtaagcaacttctccgcgtcgagcaatgatacggaaaggacccacataccgaggtgcgagcttcccctttgtctgaaacctgtgtacaccgcgcaagggcgtgacccgaagatacacaaagtcatccactgcgaattccaggtcacggcgtcggttatctgcataacttttctgccgggactgtgccacctttagattatcccgaatggttctgaccttcgcttcagcttctctcaggatatcagtcccgaacacttggctttccccaacttgatcccacaatagcggtgtccggcatttgcgtccata

SEQ ID NO: 10706 - DNA, 582 bp, Oryza sativa
aagcgcctccccgctccaacaatggtggtaaggatgttattcggggtcgtgtgaaccatgtgacggccgaggacgtgctgacaactccagacgtcatcgttggtacgttcctcatccattccatccctgctaccattttgttcgactctggagcttcccactcgtttatatctgtgccattcgtggggagaaatcagttgggggtagaaaggcttaggaaccctttgctcatcaccacccctggaggggttatgacagcaaagtattatagccctgccgtccctatagaaattcaggggattccttttccctcggatctgattctgctagacaccaagaacttggatgtgatccttgggatgaattggttggctcaattccaaggagtagtggattgtgcgagacgcacggttactctgtaccgagggccggaacaaccggttgttttctttgcacccccaacctctgtcagaagttcagaacttcatcagatagtactgtcagaaatccccatcgtcagagagttcggagacgtgtttccggaagaactacccggtatgccgcccaacagggagattgagt

SEQ ID NO: 10707 - DNA, 1229 bp, Oryza sativa
aaaagaaagaccatacccagagaatgtgtgtggattatcgtgcattaaacgatgtgactatcaagaataagtatccgctacccagaattgatgatttgtttgatcagcttaaaggtgcccttgttttctccaagatcgatcttcgatcaggatatcaccagttgagaatcaaagaggaagatatacctaagacagcttttaccactaggtatgggttgttcgaatgtactgttatgtcttttggacttaccaatgcccctgctttcttcatgaacttgatgaataaaagcgctgtttaaatggaaatacctagacaagttcgtggtggtctttattgatgatattcttatctactcccgaaccaaagaagagcatgaagaacatcttcgccttgcattggagaagctacgagaacatcaactgtatgctaagtttagcaagtgtgaattttggttgtctgaagtgaagttccttggtcacgtcatctcagcaggaggagttgccgttgatcctagtaatgtggaatccgtaactaattggaagcaaccaaagacagtttcagagattcgcagttttctaggcctcgcaggatattatcgaaggtttatagagaatttttctaagattgctaagcccatgacacgactgcttgtcacgaccggaaataacccaacgggcgttccttacgtgcgtgcattaatccttgtcccaggaggcaaggtacaccaaaagttgatacatttcagagtttaacaagcggaagcgtaaatagttaatttattacatgggcagcgaaggcccagcacacacagagacaaacgagaaacagcggaagactagggcgacgaccacaggcacttgacggcaggcacgagctagacaccaaagccttcatcttctaggggctcctcttctggggttgggaaaaattgagcaagactgagtacaaccaccgtactcaacaagacacacccacaagtgcagaataaatgcaagggagtacaaaggagttatactataaagggttagggtttgcagtaaacagcatttaaagatatttagttgctcaaagctattttgtaaacacgattctagaactatacaatattattaatcaaggccgtgaacccacacgaacctgccttaacccaaggcctacgatgattcagaccgaactggcaacccgaccctgggtcccagctcgtcccaagccaacccaggccaaccat

SEQ ID NO: 10708 - DNA, 1652 bp, Oryza sativa
ccgcccatgtaataaagtaactatttacgtttccgcttgataaactctgaaatgtatcaacttttggtgtaccttgcctcctgggacaaggaataatacacacacgtaaggaacgcccgttgggttatttccggtcgtgacatttgtcaaccgtgggtaataaatcgactagttcatgttacttatgtgacctagctagaactatatgcttagccctgcttaaataacactagctcagttgatgggataattacaatattagacctttttagtatcagaatgagctgcgtgctcgagacacctggccatgcttcatggtcgtaattatccaactaaaatgcgactgcatgctgggctgtgggtgcatggtttcgctagtcgcacccatggcaattaaggaccggttcgcgggatgccctggaagaacttatcgtacttaccacaagccagcgtgggcaacggctgggcttgtagtgtagcttttctctagccgacgtacccaggcgagggtgggcgtgatggagttgggtcggccggggtgtccggttgatcggcttccggattcaccgcggcacgaaaggggggctgcccgttgcctgctggggacgggggcgaacccgaaggtgtggtgcgatcggttagagggggttatgcgaagggtcctgtcacggcctctttccggtatgtcgtgttggcatgtcggcgcacggaaacgtgtcgtggggctgtgtcttgtgggtgtacagttgtacacctctgatcagagtaaaactattcgaatagccgtgcccgcggttatgggcggtcgaccagattcaccgtgattagtcccaccttaataaatcgactcaatgcactgaagttcaggtgggttggttgggcctgttcaacgtggtgtagcgttgatcagtggagattttaatgttactttaattactcaacagctttactgttttgctcaataaaatgttttacaaccgcctttatgcaaatagccacaaaccgtcattgtatccctttgcacgtctgcatcattggtgtggcttgctgagtacggtggttgtactcagccttgctattattcccccttttcagaagtgtagtgcttctgagctgaagacgaagttagaagaccaaggctcagaccccagttgagtttttcctgtggagtggagctgaagtctcgctaggatcgcctttttccgctgctgtcgttctgtttcggtgtgaggactaagtgcctcttctgtaagtattttacgctttatttacgtttggaactgtatattacttgtcgttttgtgtaccctggctggtcctggacagggatttaatacacaaaatagtctggaaatttgggctaaatttctgggcgtgacaaagaagcaggatgcagattgttgtgtaacatggccaagctaagctaaatgtggaggagcaaagcatatgctctagtctctctattgcttgatgagaagtataaagctgaaaagatcgaagatgtccccttgtgataatgagaaacttgaaaaagggatagtgcgtggcctcgtgctcgctgcatgtgcaccgtggagcggagcctcgcggcgcctgttgttggtgcgcaaggacggggacgaggcgaccacggcggtggaggagaagaacgt

SEQ ID NO: 10709 - DNA, 2650 bp, Oryza sativa
  unsure (1)..(2650): unsure at all n locations
cctaaagcagcagctcaatcgatttatgagaaggaggcaatggctattttggaggctcttaagaagtggaggcactatgtgttgggcatcaaacttattatcaaaactgatcaacaaagcttaaaatacatgatgaaacagaggttagtagagggtatacaacacaagttacttctgaaactgatggagtatgattacaagattgaatataaggctgggaaggaaaatgttgtagcagatgcactatcaaggttgccccaaacagaacatgacaatgaggattgtcaggccatcactgtggttattcctgagtggatacaggacatccagaatagttatgaaggagatatacaagcacataagatgctgagtatgattggaactgacagcgaccctgataggagttacagtctagaatctggaatactatgatacaaggggagaatatatgtgggagactctaattccattagaacaattctgctccaggattatcattcttctgcatttggaggacattcaggaataagggcaacctatcagaggataaaaagtttgttttactggcctgggcttaaaaagaaggtggaaaattatatcagagaatgtcctatgtgtcaagtcaccaagtctgaaaacattcacatacctggcttgctaaacccattagaaattccagacatggcatggactcatatatccatggactttattgaggggttaccaaagtcacatggaaaggatgtgatattagtggttgtagacaggcttactaaatatgtacattttgtggcaatgtctcatccttacagtgtggagcaagtagtagaggtattcatgaacaacatacacaagttatatggtatgccgatggctattgtcacagaccgggacaggattttcaccagtcaatttttccaggaagtgttcaaagcaatgaaagttcatctcagatttagcacagcttatcatcctcaaaccgatggtcaaacgaaaagagttaatcagtgccttgagtcatacttgaggaacatgacttttaaggaaccacaacactggtactcctggctcgcgctggcagaatggtggtataatactacttatcacacatcactgcaaatgacaccatttcaggccctgtatggatatccacccccacgaatcaatgaattttcactcccatgcaatgtgtcagctgaagcgagggttaccattgagcagaaagaggaaatcttatagaaacttaagacctgtttggctgaagcccaaagaagaattaagcactatgctgacagaaaccgatctgaaagaactctaactgttggggatatggtgtatgtgaagctacagccttacagacagacggtttttggcattagaggatctcttaagctgagatctaagttttatgggccattcaaggtgatagaaaaggtgggacaagttgcttatcggcttcaattacccaatgatgccactattcatccagtcttccatgttagtcaactaaagaagcatttgggaaagagagcaatacctatgcctaatctgccatcggtaggtcctgagggacagatcaaaacccaacctactgcagttttacagaggagaatgatacccaggaatggagttgcagtaactcaatggttgattttgtgggaaaatttggggccggcagatgctacttgggaagacgctgatgtcatcagaagtatgtttccaaccttcaatccttgaggacaagaattgtcttttggaggggatattgtcaggactctagatcagaaatgggaagtgagaagaaagtctgaagaaaattcagagataagaagattcagagaagttcagtgaaatgggagagagatatatcgagtatgcaaatccgatggtggcggatcagagcaaagcggtatcaacatcatctggccatcatctttgtcgggggccactgttaatgtaatcgttgtcnntttcctgaacttaattacgtaaacatctgtctgaaactgaggccacgatgaatgtggtccttacccttttttaagactatttaagtgttcgctggagaaaggaaaaggatatcaaaaagcatattctttgtcattaggagtagatagatctagaaccctaatttcgtcttgcggcatccactgaaatttgcgattctgatctgaattttttgttgaaatttccatttctattcccagctcttgacagaggggaaggggaagaagcccttgcagacgaagtcagactcagaggaggaaacatcctcagagtcggagacggaggagcagtacatggagacggacgacgacgacaactacgacgacgacgacgagtatggttttgtaaaggggaggttttgcaacggtctaggtgagctctctcagttgacatctccttaatcccattcccacccactctgaccggaaggaaacccctaaccctaaccttgtagttagtgttcgggaattggatcccaggattaggggagtgcttaattgctgcaccgggtgtcaagggtttttgtgattaggctgtgttttgttggcggatctggtgagggctagagagcctttggccagcgttttgatttattttgcttgtaattctgcttgcctgaatttccttgatgaattctatctgt

SEQ ID NO: 10710 - DNA, 7610 bp, Oryza sativa
caccctttgttctctgcatgctctgatcacacacctctctttttagtgggtaatgagaagaggagcaaatctcccatcttcagatttgaatcttactggcttaaagttctaggttttctagaagtggttcaacactcttggcaaaagccgattttgtcgtctaaccgactagccatctttcgcctaaagcttcggcgtttagcccgtgaccttaagagatggagccgctgcaatgtgggagacatcaaattgcaattggctgttgcagctgaagtaattttccagctggagctagctcgagaatccaggtcactatctgatcaagagaacctactcctctccaatctcaaatcaagatttctaggtctctcaacccttaataaaattaaaattaggcagcgctcgaggctcacttggctcaaagagggggaggtcgattcaaaacttttccatatcaaagcaaactctaggagaagaaagaattacatccaatcacttcaaactcccttaggagtggcaatatcggcacaagacaaggaagacgagctgttccgttttttcaaaactagacttggggcaaatgtgcaaagatcgttgggtctcaactgggctgctttagggctcccgtccttggatctttcagaactagaggaggatttctcggaggaggaaataaaagcgacgatcttctctttacctcccaaaaaggctccgggtccggatggttttattggatcctttttcaaagtctcctaggagattatcaaggatgatatcatggcggcaatcaattcgttcatgaaccttaacacatatcaactggaaaaactgaattcggccttcatatgtctcattctaaagaaagatgacgcttctgacgctaaccactatcgacctattagtctgatccatagctttgcaaggataatcactaaaactttagcgaatagattagctccaagacttaatgagttggtttcccagaaccaaagcgcatttctttggaagagagcgttacatgacaattttctttatgttcaaaacacgatacaactgcttcatagatcaaaaaaaagcagagcttattcatcaaggtggatatatcaagagctttcgataccgtttgttggccctacttacttgaagctctacggaatttcggttttgggaacagatggataaactggatcactcatatcctggcaacatcctcttctcaggtcctgctaaatggttcgcctggtcactcgatcaaccatgctagaggactccgccaaggcgaccctttgtctcctatgctcttcattttagccatggaacctttccatcgaattcttaaagcggctgaagatgcttctgttcttcaaccggtaaatggacgcaatgcaagattcagatgttctctttatgcagacgatgtggcaatttttgcaaatccagatagtgccgaactgtcttccctctcacagttcctggatttctttgcaaaaatttctgggctccatccaaacatcaacaaaacagaaatctttcctattagatgtgatgagatagatttgaacaatcttctttcaagtttcccggggatgattaaatccttcccttgccgataccttgtacttcctcttcactatcgaaaactaaggaagattgatttcatcccgctaattgataagattgggtcacgtctaccgggatggaaggggcggttcttcacctctgctggccgtaaaacccagtccattcggttctaagctctataccgattcaccatctaacggccctccgcgctcccaagtggagtgggttttcaaaaggattgaccgttttcgcagatcctttctttggaaaggcgaggaccctgatcatactaatcccggtgatagtttgattaattggcaactagtttgcagaccacaatctctagggggggctggtcttcctgaccttgaaagatttgcaagggccttgcgcctccgctagctgtggttttcttggaaatccgacaacaaaccttgggttggcatgaatattccctgcgatgatttagacaaaaaactgtttcaggcggcaactacaatctcggtggagaacggcgctaaaactagtttttggcatgataattggctgcacaagaggtgcccaaaagagttagcccccctctgtttctctttagcaaaaagaaagaatagaagggttcagttcgagttgatgaacaataactggcttttatcctttagacaaattacttttgtcgaagagttacatgagctggtgcaattgggaggcctgctccaataggttcaactcactcaaaatgtcaatgacatagtctgtaattggactgaatctggaacttatacaaccaagagtgcttacttataccaatttgctggttcatacactacaagcgattttacctcactctggaaagcccccgctgagcctaaaatgaaatttttcgggtggcttgtcctccatcaaagaactttgatggctcaaaacttgctcataagacattggctgtgtaattggatttgctgcttgtgtacctccgccttcgaagacaccaatcatctgttcgcggaacgcccgtttatgagacaagtatggtctatagtacatttgtggcaaaacttgccctcagttttcaattcccttccatcccgcgtctcaacctgctgggatgagcttaaggacgcaggaacagaagatcaaaaattattcgctcgaggtgctatcctgacaacttggtggaacgtttggctagaaagaaatagtagaatctttcaaaatttatctagttcggagttgtcagtagcttatcgggtaaaacaagacttggatttgcgcaaagtggctttcaggccaccctaattctccttttgttgtaacctttcccatgccttcctgggtgaatttttttgactccttttaattaaattccggcaggtcttctgccgtcgttcacctcaaaaaaaaattgaatcatagaaatgcttttggtttggaacaaggggaatattagttatcttagaggactattttccttgaaataactccatagttttgaattcctcccaccttaccctactaaactcctaatacacatttaattggagcattataatattttttactccatcatatctccaaaacaaactaaaatctctcttatatttgagaacgaactagatatctggcactagtacagatccttccatctgtgacggcccataacaagactggaatttgcgggccgtcacaaggaagtaatctcaatcgggccgaagtttcgcccgattgagatatggtcgcacaaccatggtatatcggcataaaactaaagtccgtcacggatgacacttatctgtgacgggctatagttgaggcctgattgagatgagggttccatatctcaatcgggccctaaaagaagcccgtcacagatgagggtcatctgtgacgggctccaactagaggcccgattgagataagtttattgcccgtcatagatgacactcttttttgacggccttttattaagacccgatagagattacttgtatgcccgtcacggttgattgttttagggccgttacagatatttgttgcacaatataaataccccccaccacctagtgtaactgtatcccactgttcactattttggtgggaggctgtagggggcgattttttgtcctttttccaaggaaaacagaaattaaattcccaaaagtgatcaaaatggatcaatcaagtgagtaatataaatcattaattgagcaatttcatcacgtcttacttttgcaatactgatcttataatatgtgcctctaatttgttttttttgtagcaattgatcgaagttggatgtatgccaaaaatttgaaacgtcattctacggagtaccgaaagggcgtaataaattttatgaacgccgcggaggaggatcggataagaagaaacagtgattacatgtgttgtccatgtgcagattgcaagaacgagaatatgtttgatagcggagaggacgtacacggtcatctgatacaacgaggattcatggagggctatacatgttgggtgaagcatggagagcaagaatcaggaagtggagcagcagcagacagaagtggtgcgcataatcaggaagatgaaaatgagcatgacatgtttataccttctccattgggcggtgaaatggttgatgtggatcacgatctgctgcaagacatgttacgtgacgttgaggacccagtccagaatgagagagatggaatgaaattcagcaggttggtaagtgattccgagacgcctttgtacgctggatgcaaagcaaaacacactaagttgtcagttaccttggacctaatgaagctgaaggcaagcagtggatggacagacaagagtttcacagatgttttaggaattttgaaggctatgcttcctgttgagaacacattgcccgagacgacatacgaagcaaagcaggttatgtgtccactggggttagaggtccgtagaattcacgcttgtcccaatgattgcatattgtaccacaagcaatatgcggacttggatgcttgtcctgtctgcaaggcttacaagcgaaagaaaagtgctgacgaaggaaataagtcaaagaggggtggtccggcaaaggttgtgtggtatctacctatcattgatcgtttcaagagaatcattgccaacccgaacgaagcgaagttagtacgttggcacgccacagaaagaaagaatgatggtatgcttagacatccagcatattcgattgaatggaggaatatagatcgaaaacacaaagactttgctgccgaccctagatacatgaggatatgcctttgtacggatggcatgaatcctttcggtgatataagtagtactcacagcacttggccagttcttattgtgaactataacctcccgccatggttatgctttaaacggaaatatattatgttgtgcttgttaatccaaggtccaaggcaacccggcaatgatatcgatgtattcctggagcctgttatcgacgatctggagattctttggaaagaaggtgtggaaacatgggatgcatatggtcaggagaacttcaagctaagagttctattgttctgcaccattaatgactaccctgcactcggtaatctttccggacaaactataaaaggaaagaaggcatgctccgattgcaaggaacatacacgaagccggtggctaaagaaatcacgaaagatggtatacatgggtcaccggaggtggctcccgctacgtcacacatttagaagaaagcagaaaatttttaatggtaagagataactttagcctgctcccaaagatttgtccggagatgaggtccacaatatggtcaaggacataagcaatgagtttgggaagaaaagaaaacgtagcaagacaaaggagaagggtatgtggaagaaaaaatccatattttggcggctaccttactggaaagatcttgatgtccgtcattgcattgatcttatgcatgtagaaaagaatgtgtgtgagagtttggttggcctgatgttgaatattcccgggaagacaaaggacgggttgaacgcgcgccttgatctacaggacatgaatattcgcagcgaactccaacccatacgagatgcagagacaggtaaagtgtacctccctccagcctgccacacactgtcgaaggatgagaagatcgcaatgttctcatgcttgaaggatattaaagttctatcgggctattcagcgaggataagtaagtatgttaaattggatgatctaaaacttgttggaatgaagtctcacaattgccacgtgctaatcacacaaatcttgccagttgctatcagaggcattctaccaccgaaagtgcgtcacacgatccaacgtctgtgcgccttcttcaatgcaattggacagaaggttatagatccagaagatctagatgggctgcagaccgatattgtgaataccctctgtcacctggagatgtttttcccactgtctttctttgatataatggttcatctccctgttcatctggtgaagcaaacaaaactatgtggcccggcttttctaagggaaatgtggccgtttgaaaggtacatgggagttctaaagtcgtacgttcgtaacagagctaaacccgaggggagcatcattgaaggttacacgaccgaggaggctattgagttctgtgtcaattacatgtccgatgccgatcctatcggagttccagcgtctcgtcacgagggaaggttgttaggtgttggcacaatcagaaggaaaagaattaggcccgatcaagcgtcgtacgcgcaggctcattacgctgtgctccaacatatggcagaagttggcccatactttgaggagcacttagcgaaaatccgagatgagaacttggggcgatctgatgcatggattaacagagaacataattctcggttcaacgaatggttcaagaatcgtgtgacaatgtctacggatgtcccaaatgagacagtacagttgttggggatgggaccgtcttggaccatagacacatggcaaggatacaatataaatggatacacattttacaccgtcaaacaagatgacgaaagcacagtgcaaaacagcggcgtccgtatagatgcattccaggatcaagttgggtcaaacacatactacgaccgcattgaggagatctgggagctaaactacgtcaagttcaaggttcctttgttctgctgctgttgggtgaatctacgcactggtgtcaaagccgacaaggaaggtttcacttcagtagatctatctaaggtgggatacgccgatgaaccatttgtacttgcgaaataggtcgagcagatattctacataaaagacccttcaaacaagaagatgcacatcgtgagggatggaaagcgccgaattgtaggagttgacaacgtcgtcgatgaagaagaatgcaaccataatcttcatgtaagacctcacattgaccttgacgatgatccccaagagcttgtggcatatgctcgttcagatcataccgaaggcataaccttgtgactgatgcatttgtacttatctattgtaatgaatgaagtattttgttttattgcaaagagttgatatgtgtagtcattaatatggctaattttgttttattacaaatgaccaaaataaaagttgtagatcgtgatgagaggatcaactttgttgttgaccatatttcaatttgaaatcatttagtatttacaaatgctgttaattagatttgtcatattgtcgaaatcaatttcaagctgttgggaaaaaaattatatagaataatgaccaaaataaaaatagtagatcatgaaaggctttacaactttgttgttgaccatatttccatttgaaatcttttactatccgaaaatgtattatgactaataaaatgaattattacacagctgctatatattttgcactcacaacaaatgaaagatggaaaatgagtcatcggtgacgggccttagtttacggctgatagagattaatctatctcaatcgagctttgccgtagagcccgtcacagatgactcatc

SEQ ID NO: 10711 - DNA, 13109 bp, Oryza sativa
ctaagggacattggttgcgtatagcatactcctgatccatgaaggtactagtgctcccactatcaaccagcccaacagctcttttcccattgatgaggattatcactgaaaatgtatcacgtctggtagtcccctacatggcattttgtgagacatatattagctcctcagtctccaaatcctctggagttttctctgggatttcttcctctccctttcctcagttatgtcttctttctattctccctccttctctccagattcttcttcttcttccagcaacagagcatgtaaagccttctttaccttgcattgatgcccagagaaccaagcttctttacaaaaccaacacttcttctccccatttcctctaggtggtgctttggtcatattagctctgctttgatttcccccagtatggatcagaggtttgtttttgttccaattcagagcaaccttcctagcattagcagccttttcatagtttttagcataccaataagattctagcagcccctggggtttgtaaccacacacatcatgttttatatccccccttaattctcctatgaaacagctgttcaggtatagttcttgcaaacaaggatgatcccttctcactaggtccacatattcttcaaacttgtcaatgtactgctcaaccgattggttatattgtttcacattctggaagagctctactgcctcatgtacatcagcagctgaaaacctggtgcaccatagcgcaccattggggccaagaaatcatctgccagggaattcctatacccctgtacaacttaagagctctcccctgcaagtgtgccaatgctaaattcacccattgatccatcggggttccagttatctcataaaacttttcacactgtttgagccaatcaataggatcttctcctccaaacaatggaatttctagccttggtcccttaatcacagcctctgcataatgattaccttcagcccccattctaccatatatactcccctgtcgatcaataaaatgcacccctggacgtccttgaaatcccccttgagttccaaccccatgctggttagcaactgttggaccacttcccccaaagttcatattctgcctttggtgaattccatgaggtggctgctgcgtatgaagtccaccctgtccatgacccatggtatttcccccagaagtagcccatagattaaccagttcattattgggtgcattagtgttagtttccaaagcaaaacgtacctcaggagctgatggctcccctgtgggaggattacttggtctagcaccacgagttgcttgaccagttgcattctgaattggcagcgtagcagctgcttcctcagttcctccttcaccttcttcaacattcttctgcttgcacaactccctcagcaatcctttgatctccctcatttcagtcttgagcgtctttaaatcagctacatccctcttcaaactcgctacatccaccctgaattcattcatctcctccatatctaccatagactcgttggatcgagtctccgtaaccatccagaaatctgtaaggtcggctcggaataaatttttcctccccttttgcctcacagaacggtctaccgccgctaggaacaaagtcaagctacggagattttacaggagcacacctatacaggatggctcgccaacccttgctcaaaccctgctcctactctcgccgccggattggatcaaactagcttaaggaattttacggtgaatctcgccgccgccttccaccaaccctcaccagatcgatccaagagccaagaaatcgactaagctctggtacctttgtcaagagctgggagtagaaatggaaatttcagcgaaaaattcagatcagaatcgcaaatttcagtggatgccgcaagacgaaattagggttctagatctatctactcctaatgacaaagaatatgctttttgatatccttttcctttctccagcgaacacttaaatagtcttacaaaagggtaaggaccacattcatcgtggcctcagtttcagacagatgtttacgtaactaagttcaggaaaacgacaacgattacattaacagtggcccccgacaaagatggacggccagatgatgttgataccgctttgctctgatccgccaccatcggatttgcatactcgatatatctctctcctgtttcactgaacttctctgaatcttcttatctctgaattttcttcagactttcttctcacttcccatttctgatctagagtcctgaaaccctcggagaccaaggaggccatctccaaccctccgcggtcgcctccagaattcgaaaggagagagatttgcggcggcgttttgtcagtcgggattctcaacatttggagaaggtggtcaaggagttttttacctagggatatgggtgacaatctagttttagaattggtggtccttaaaactctgtgcttttgaaggagatggccaaggagttgttcatgagtggcaatttagtcgttagattgatggttctcaatactccatgtcatttttttttcctttcgagtgtggttttgtttgttcggctgtgtgcatcttagttatgcaaaggccggaagtgttatcaggataattgtatcaccttgatgtaattggctgagttcaataaaagcttccattatctaaaaaaatcactcgtgtgatttgttttttaggtttgcactcgaattactgcccattcgatcatgctaggattcgtgctgtcttttgttatcgagcctgtggccggagcatactcggacccattttctgtgcggcccgaggccgagtcgtcgaggcagctacgccggcttctgcggctatcggcgagacggctacatcgttggagcatcgacggcggctcctgcggccgctacgtggtgaggggtatgttatatcactaattcactatatcctgcggctgttcgatctcgggaagcagccgatcgatgtatcgaccacggtgattcatatggtgacacactatttcactgtagttttatatatgtccctgttatgtgtttgattttactgatttatgtagaccgggaggattttgacttttttttccacatctggatttgttgtaggggaatggagcatgtagcatttgaagctggatagaaccaatttttattgtactgaaattggacttacaagttctgttttcttccaaggtgagttcttgtcactgaacataccctcttatataagccaaacgcatgatctgttttgtcttctactaataaatagtaagttttgtaagcaaatttctgtaagtaggccgggttttgtcatctactaacaaaaaatacttagttttctcagcctctacaattacttacaattaattgtaaatatttgtacaatataaactaattgagttttgtcatatttcaaatgcatagtctgttaacaaatttcagaggaaactagtagtctatgaatacatagtactagttttgtacgttttgttagtacctaacaaatttcaggcaatacagatgagtaattttttagttttgtttgaaaaattcctacattatttttagttttattagtacctagtataaaacttcagtcaatagagattagtaatttttttttagttttgttagtacctagtataaaacttcaatcaatagagattagtaattttttttagttttgtttgtaaaactcctactttttttttagttttgttagtacctactccctccgtcccataatataagggattttgagtttttgcttgtaacgtttgaccacttgtcttattcaaaattttttgaaattattatttattttatttgtgacttactttattatctacaatactttaagcacaacttttcgttttttatatttgcaaaaaaaaaaattaaataagacgagtggttaaacgttacaatcaaaaactcaaaatcctttatattgtgggacggagggagtagcaaatttcagtcaatggagattagttatgttagctaatagtgcttacttcagagctaccacctataactagttttgttagttttgtaagcaaaggggtcggccgatggtcgatggagtagcgaaggggccgccggcagcaacggcaccgggaggggacttcttcttctcatcgagatcacgaggaccttgatggacatggggatggaggggacggaagccggcggtagcagtggatgggcaaggagatcgattggcgtgggaggccccctcccgatccagtggcacgacgacgagcaggccgccgcttgctgctgcaatcccctcgcccgcctgccaccgtcgttgctccagtgcccgccgccaccactccactgtcgccacggctaaaggggaagagatagagagaggggttaaagagggatgctgacatgtgggtcccactattttttgtaaatgataaataggtcccacgtattttttttaattctaatgccacctaagtgccacgtaggatgaaaaccaagttaacaccgctatgtaggcgccacatcagcaaaactgcgctccaaaaccaccgaggaagtcaaattacaccggttttgataattgagggatcgagatatccggtattgtggtttagggatacgaatcagattcggacactagttaagggagtcaaagtgaacttattgccctgcaaatctaggtccagtttgttcctgcaaagtggacaaatgcaatctgggctcagaaaaacagacctgcaaatgctatgggcttaacaaaacgggcctgtggatagatccgacccaagaaggataagttacagacttacagttccgcacgcactgtggatagatctgacccaataaggagggtctcgttcgggagagggagatcgttccacgtttctctatcgcacggcaagaaatttgagtgcaactaaaaaaaatcaccctattgatacctaaacagacccttaaagtattatacaaccctcctactacacgaagtagtccaaaagggtcacataattctataaaaagtggagacacaaagtttagggggaggctctcttttctaatcaatcctccaatcaactgtactaatgaatacccctctctctctctctttatacagtgcattccaatatatggaaggttcggtgatgggtccgataagagtatttgggccaggcctttatgggccaagcccaaagtttcttaacactcccccttgggcactcaccgcgtgatgtccatgcctctttaaaactccataaaaaccagtaagaaaaattaaagaaagagtacatagcatatgcacgtatgtcgtatagattgcctcattaaaaagagggctgctagcccacgggatactgttgcaatgggatattttaagtgactctccatttttctttcctctgcccacgtgtgctcccctagtacctggtaccttaggtaccggttggtacctggtacctgatacctttagtacccaaggtatcaatatctgatgcccggtacccaaggtaccggatggtacctaggtatcagaccttggtaccaaggtatcaagcctgatacttatggggtatcagagggtcctatcaaaaagaggagacgtgggggagagagcgccgcaacggcggaggatggtgtcaaggaggcacggcaaggtgagggacgtgtgctcccctagtacctggtaccttaggtaccggttggtacctggtacctggtacctttggtaccgactagatatcgaccgatacctgatgcccagtacctaaggtaccgggtgatacctaggtatcaaaccttggtgccaaggtatcaagcctgatacttgtggggtatcagagggtactgtcaaaaaagagcaggagatgtgggggagggagggccgcaacggcggacgatggcgtcgaggaggcacggcgagatgagggacgaggcccgagccaaagagtgcgagaagtctcgaggaggaggttgacagccatacctgttgcaggtcgacgcgggctgccggtgtccatcccggaggcgcaaaagtggcaagccgcagcggggacgacggtgacgcagaggccgagggcgaggacgaggggagctcccgcttctgccctccccggggcgacgactccccggcgcacacccgaccgacgagggcggcgagccagagtggcgcagcaaggggaggcgagctcgagggcgaccccgccgagggttggccgacctcgccgacgtagtgccatcgtcgtcctcctcggccgccggaaacgacgacgacgaccccttcctcccggccggcttcgtctctgctcggccttcttcagagagagagagaggagagggagagggagggctgcagtgccgtgtgatttgggggaggagagtgaggcaggaggagaggattcggatgattttggggagaggagtgaggtaggaggaggggatcccgtctccacgggatgccgtggtgtaggttttctgcattaaaaaccttgataagaaactgcaggaaaacttatccaaggaaaaaagagtacaatctacccaaattcttgtatcgattttcttaatcggttttgggtacttgatttttcagttcaagcttttgttaatagactggcagaattctccccctgaattttgcatctcttttaagtgtgaaccatcaaaaatcgttgctcatatcttttcaaaagatagttcgagtgatgcttcaatggtcaaatcttgcatgatttttccataacttatagagttcgtatagtctattagtgctagtgcgacgcacatatcattatcttcttgataatgattttggggtttggacaaagctcgaaccaggttacttgctagaaatggtgaactatatccaaggaacctatgtattttcacattctgatatactatggttcacttcttcatgtgttgtaggtttacgggcctaagcaacataggtttctatctattttatctcaaactcgttcggaaagagtgagctttatttctttatgcgatgatattcggatcatcaacttggtttgggacttttaatgcttgtatgtgagtgcccaatccaaaatttctttagccattcattgtcaactataggtcagctttgtgggttgatcttttagttgattttcaactccgggttgactgccaatgatttgttgtatgaagagaatattgcccatagcaggtctcattaccaattcctattggttgtatgtgccacttatgtgagtatccatggatatatggggatatgcaattttcttatgcttctattctttgatatgggcatgactctttcattttatcggcattggtgtgcactccaactgctggttttcttccttgataggaagatgtggtatgcttgttctgaggttccataccatttgccagctctgaactggctccccttcaaataccggggttacttttagtgactatgagcttgagagttcctttttgcactactacaaaaaccttcatagggaccggctcataggtgctggttcatttaaaaccgacaccaatagagcttttcccacctcctagcggtggaaaaatacagaaccgacacctttaaacatgctagaaccggcacctataatatattataggtgccggttcatgaaagaaccgagacctatagtatattataggaaccggttgtttttaaaaaccggcacgtatagctttgagtcgagccgacgagccgagcccatccacgcaccacacccaccatgtccttatttactcgtatccttctcgatctctcgtgttatctctccctcccctttctctttcgcgtctctctccctcccccccccctctttctcgcggcggctgcccggcggaggaggcgggctcccgcggtcggcgcggctgcctggcggaggcggcgagctcccctccgccagatctagcgtgaggagagccagtgggggatgtagtgggtggcagcggctcctctcctcctccgatctccccctcagctcctcctccgccgccctcccctccagccccctcctccttcactccttccacctccgcgacaggcggcgtccccctccccctccgcacccccctcgacaagcggcgtccccacgggcggcgtgtggagaggcggcggatccgctcggatctggcctcccatggccggcgcggcccgtgcccggcggcggcgcgcggagaggcacccggtggcgcgcggtgagggactacagccaggaattggtgagagtgagttcatgcatttcatctgtgattgtgatatggatttgatttgtgatatgcattgttgttcatctgtgatatgtatttgtgagatggattgttgttcatctgtgagatttgattttggcttggcttggagccggcttcctttttttttaatcggggagagcacaaaggtgccggttctatgaccgacaccaatgacctagtgtcattggtgccgaccaattggtgccggctgggaaaccggtacctattgacggttcccaaccggcacctatagcgttttgtgtactagtgttgtctcgttttcaccagacgtctccagttactttagggatttaaggagccggagttcttgtcccattatttttctcgaggcctctagacaatatgaggtatacctttgcattcttcggtatttcaccctcctccggtgcattatattcgggtaatgcaacttagtcatgctctccaaaatcacaaaagtgataggcagttatccaattacaaagtgtgcttttcatactttgcatttgctagtgcttgattaaatgtgcatccatcctttctttgataggcagttatccaattacaaagtgtgcttttcatactttgcatttgctaatgcttgattaaatgtgcatccatcctttctttgaccatttttcctgacatttatcatttaagggttatttctctccccctaaatgactggaaataatccttcttattgtcaaggaatttaggctatgttcatacttctattaaaaatttccaattttttcggagggagcccttatggttgtgggatatgcacatgtgtcgagtcaatactagtattcttttaagtggacaacacatttcaaatagtccgaatattgataattcgctgcctttggaactacaagtccattcaagtggcgggattttcaataatggtgcaggggacatttttagtcctattcttgtggacgtccggtacttagtgcttttcttaacgcgctgacgccaacgtgcatgatcttgcaggatcgatttggcaagggcgtagtgtcaattagacacaattgcagctttttcataagcacagtatgtatcagatgatccattaaagggttaaatatgtatgcgaattcatgcggtatgcgcgaatttgttccggtataccttaaggtacgtcggaattcatgtggtggtcggcgtttgacacgcatctgatgttcaacggcatgcgcgaccagagtgaccatggggtatgcagccggtgcaactatggcgcatggtaggagttgcatggcgtgtgctaatgcttcatgattcgtccagtccccagtacagcggggttgctagttggtgcatagtacggcatttagaggagttgcatggcgtgtgctaatgcttcgtgattcgtccagtccccagtatagcgggattgctagttggtgcatagtacggcatttagagcacggcgctagtagcggccttagtgcgtgtcatgatgctatatgatgcgcaagcctggcgcgaggcgctcaagcagtgcgcgcaacaaatatctcatcgttgcgatacgacagatgacgtgggcttgtttgttgatcaatccggcctaggtggggttggccgaggcccaataacttaaggttgcccggaccccaacagttctttggcacacccactcggagaaaggcccaatctccctaaaagactagtccaataggggaagggtggtttcctcctcccaagctaagcaaggtgggattattcaaaggctcatacggtcgccacccgacttttgcgtctttgccagcgggtaatagtggaggatgtcctcatcgttcccacccccttaacaagggcccaactctgataccaaatgattaatccggcccaggtggggttggccgaggcccaataacttaaggttgcccggaccccaacagttctttggcacacccactcggggaaaggcccaatctccctaaaagactagtccaatagaggaagggtggctcttccttttaaggtggcttcctcctcccaagctaagcaaggtgggattattcagaggctcacacggtcgccacctgacttttgcgtctttgccagcgggtaatagtggaggatgtcctcatcatttgtgctatgttcatttgcaagattctaaattctaagaaaaactgactatgaaatagtctactttagcctacatttcttagtgaggacattgttctcgcatgcttaggtgatgagtatgcttctctaatcttctagttcctataagggaacttttgtatgagagtttgcgattctcaagagaattgaggtgtaatcgcttttctacgggaaaaacgatatccttcacaatcattgcgtgcggttgtgaaggtagttcacgtctttccatagactgaacttgtctcatgtctctcaagattacattttgtggtgcttttgttccacaatgttcctttcaccttaggctatgcatattgtctatgtggataaagtaaaacattactatatcaagacagggagtaaactttaccgtagagcgaaatgcaacaaaatattggaaataaagtctagccatgcaaggcaaatcacaaaataaatgttatgctctcatagagcttacaaaaccattattcaaattgttcataatgtaacttagcttacgaaataaagtaggggcatcaaatactcaaatggaatcaaccagagtattgagctctacaaagatctgctcctgtgtgacggcctcttcatttgttgtacttgctgcagctgcaagggcgtcaagtggagtagtggtggagggagtagccgtactgtgagcctcaaccatgtgtgcctctgcggacgccttggcattcctgctggcctagtatgcgtcgacgacgtgctaaggctcctcgcaaatatagctccagtggcccccaaatcccacacttgtagcatgtctggtcctgctggccatatggcttgtcattgcgagctggcttggcttccttcttgcccttgcctccctgtgctccctgggcagctggagctttttcctttgacttctcggctgccttcttcccatcacgcttgcccctcctcctctaggtgggcttgcggaccttgcaacttctagcattgacttcaagaccaacactcttgccaggtggctggaagacaaaattcttatggagaacctcatcatgagacccagacacctgcatgatgtcgatcatctcatcatactccttgtatgacgcttgcctgtagttacgagcgctctacacggcgctagggtggaaggtggagagcgtattctcaatcttttccacatccatgacaaccttgccacagagggagaggctaatacagatccgtgcagtgtggagttgtactcggagacgctcttgaagtcggcgaaccttaggcgagcccagtcctactctgcttggggcaggatggtgtacttcaatttctcgaaccgcttctttagtgcagtccaaagagtgagtgggctccgcaatcccatatactcattcttgagcgtggcgcagaggtggtgtcgcaggaagtgcagcgccttatcattctcataaggtgtaggcgcacggtcctgcggggtgcccatcccgatcgtctggcggagcttcttggctccaaggacgatctggacaaaatattcataagttactactagtaacatgattgcaaatatgaatgcaaatatttcatgattttccaatatttatattcttagggaatgcaacttgttcaataggaaatgcgaattattcaatagggaatgaaaattatacgtaggagatgcaagtttttcaataaagaaatactagcgttcatataaattcatacaaatattcatataaagaggacaaaaggatgcatatattcatataagtactcaaaaatgaaatttcaaactatcaaataacagtaaataatgcctcatgaaaatcaaattcaaaaattcatgagacataaaaagaaaatgcttaaatatgaaatataggtgaaatatgcaagtacaggggccctttactaagtttccatgtggtggagggataaaaatggaaatttctgaaattctagggtctaggcgcaaggaatctccatgctgagagatatgcgaacagttttaagaaaatccgggggcctttttgcaaaatcaccaattactttcttttttcttttttttttctttccttcttttcttcttcctctttccttattttcccgttgaatccggcgtggttgctggcggtggcgcgtggcagcgccatgcgaggcgcggccggcggcggctcgcggcagcgcttggcgttgctgccggagcgtggccggcgcgatgagggagcggcggccgtgcggtcggcgcggcgacggtgcggcggctgtgttggcggcgtgacgagggtgcggcgttggcgtggcggagcgcggcactgctggggccgtgcggcgccgtggtcaaagccgtgcgtccggcggcggctcgcggtgagcactgcggcgggcggcggcaccgtgcgaggcgcagccggcggcggtgcgcggcagcacacgaggcggtcgcggttctcggcggtgccgtgcagcggcgtggccggcgaccgtggttcgatgccgtgcagtggcgtgggcggcggcgtgacgccgtgcctcaggtccgtctccgatccatgcttgtattagcaagttcgtctctgccatgatggaggatgccgagaaaactccagtcggctagatgccggcgactccaagtcggcgatggcggttttcgtcgggagttaaaaaacggaacgtggaagacaggggtggaggcaggcctat

SEQ ID NO: 10712 - DNA, 6905 bp, Oryza sativa
tggaaactctctattatgggaatacgttttattttttattccaccaaaaatatttcacctagtgtacttataatgtttcactatgtatagacaaaatgttgcagcaaactaaaatattctttcactatttgctgaaacattatttttatataaggtgaaaccgcgcccgatttaaacgattgaaacatttttgatctactcagtgaaacaattccgatatacttggcggaacatcgtgaaacatttaaaaaaaatccaataataaggtaaattttttttcgtcggaatatatctgtggtcttgttttaaagatttaacaacaaattaatggtgtaatcagatcatgatttgcataataaataatttaagagaaaaaatagtttaaagtggttttgcacgcatgcatcatactaacgtcaacatgacgtgggcgcccgatcctaagttgcgtccaattcatatatgtagctcatctgtattgcaagttgcataatatctgcacctcatcagtttcgtggtacgcttggcatggctgaaatatagaaataaagacaacaaaacaaagtaaagagatcccaaagtacatattaagaaggcatactgttgttaattccacatttaaaaaatttgagcctcttcacctacgtaatagaatggagatatctggactaacttcactttcagtagagcatataccatataataaataaaagctaacagcgttaggaaataacttaaacgtaatgagacggtaagtggtcaaaatatgttacgtgattctatgatcctgaactaagtttgatgtttatctaacaaaatggtcctctcttccttcgtacgattcattagaaacttcagatccaaacttgaagatcagatgtccctgtacaacagaaaaacataactcataagcttgatggatattaggttaaaaaaggaacagatggaatctcaggaatagaccaaataatttactatgccaaatagataacttcagacaaacatcacaaacatgaaacatatatttgttggtgaattggaatatcacttttcctggcatggaagcaccatgtatttagcaggtgctaagattatggagtcttaaatttccttcgaaatttgttaacgttactagtaatactcgagggttcagatgttggaactctaaaaaagatattgtttgaaaatagagtaagtataagcagaacaacatttgtagcctatatgtcagtgaaaacttccaaactggctagtttgggacaggagacaccaaccgccaaaacatagctgtacaattcttaaatatcaactgttaagtatcaattgccattacaactgaaggtagtaaatccaagagtaaattccctgtgtacccctgaaaactcactcaatccctttcatacccaatccctttcatacccctaaaatttacccgatccttctgtacccctgaaatttcaatttcaatttgattccttgtatgcccccactgttacattttccatcatttcattgtgaaatttcaatttcaatttgatttcttgtatgccccccctgttatattttccatcatttcattgttacgtttggttgcaaatgtcatttttacccctgatgctttaggtttaaatataagcttcaaaaacaattgaaaattttatttgagtgcacagtatgtgtattttataaaactaatgagactaaataattagtgcagaaaattttgacataaattttgaaaataaaataaatgtaataaattaaattttttatttgaaattttaataggacaatggatttttttatcgggagcattcataaaaaaaaatgttgtgaacatgggtagtcctatctttatatgaatgctcctcatttttatgacttcttttaaaaaaataaatacgtattttttatttcattatctaaaaatatcttttgggataaataatacatcgcacaacaaactcataactataatagtctcatgcgagaagcttttatatttttaataatgtaattcatgaatttctttgttcatccaagggtaaaatggtcatttttatagaaaatacacggtcaactaacagtcaactgacgggaggggtcaaattttgggggtacacaaggaagtaagcaaaatacaagggtatagaagggattaattaggtaaaattttaagggtatataagggattttctctaaatccaaactagtagtatgaaaaatagaactaggaactagttcaagaatcttgattgtggaaaaaacattttgggatatgcttgacaacaggataccaataaactggaagctattgactttgttcaagagtaacctgcaccatttgcagcatgcaggacgacgcactacaggaaccgttatggatcaggttgcttatcaaattcggtttatatttgcttatttcttgttgaggattattgggatgggagctttattaagagtagcaaaccagcctcttttacaaggatggcttctattcaataaaggacatccggctttgagtactggctctgggaggcgagggatttgacctcgccctctggttgatcatgactacctttgcgcaacatttgtccacccccagcgcacaaggtgaattccatattttcagataaatcttaattcttctagttttgaatgattccattagctttgcataaagaaatgactaaaaaccttccgtaaatgaacgggggagaacaagagtgcatcatatacgcagccaacctccacattgaaacgaaactctaaaggttaactcagtaaaatcctctaaacagttaggcatcaaggaataaaggaactcctaaaaaaggggaacataggaagggagaaaaggttgcatcatgtatgcaagcgcaaataaatgtaggcagcatccacactgaaacaaaactctttaaggtttgaaagctgaaaacttggtaaaatcctctaaaacatttaggcataaaggaagaaaggaacccgtaacaaaggggaaaataggtgtactccatatggaactgaaccatgtttacacctctacttgaacatgactgatggtgagtggcaacaatttctgggcatgtcaaagatattagattccatatattgccacttgttgtgttgtgtttaattcaccagcctcctttctaacatacagttagctgtctgggtgaaatttcaaagttcctgaaataatcctaggaatcaggaactaggaataaattgcttgtactcagttacaaatgtaccaatgggaaaaccagagctgttggctagcatcagcggttcttgagcagcaagatataaacagtgatgaccagataacagaattcatgaaataacattatgtagaatgaagtgcaataatattaaaattgcagggtcacacccctgcagagcatacatgtgtgcagagtcaaaacaaaaattaagacagggagagagacccaaaacactaaatggataaaaaaaagttattgctaccatgcaacacaattattgacgcagccttaggggccaacattccaacaaggtgtgtacaccaatatataagatgtgaaggaccttggtaagtggtaatgtggtactgaacccaagcaattgctgcataaatcacataatatggttccacattattcagtacaacatatgagctagatttaaacttccttatttgatatcaccattggaagtttggaaccaaccatactatgtaagactcaatgttgaaaataaggactagtgaacagcaaacctactactgtgcatgtgacacctatagaccaggagctgggttttacccattacggccatgtgtgccctcaaatgtttcttatttctataataccgaccaaaaagcaatggaagattcagaaaaaataataaaattttgaacaataggcatccatgtttccaaaatttcaaattattgcgaaggaaaaggtatagatgagacactttaagttagactcaatgttcaagagtcagaattgtgagcatacagcaagcctacttcacctatcacactattgatcaattcaaaactaaataaatctatcagaggcatacatttaccaccttcgtttcagcataacgatagcgcatttgtcaatccacaaaatcgaattaaatctacaatgaagagcgcaatgtctcaagccaaacttgaagtaatgagattaagaaaagaaaaagaatacccttttcacctgtagtcgaaggatggaattggagggctgggcgtctcgaaggactccaacacgtccgacttgcggtcaccaccagcagcagcaggcttctcctccttcctcccgaaaattcccctaacccatgcgatagggctcgattcatgggccgagacctcctcaggcggcggcaccaccgggaacgggtaggcgtggtcctcctggggaagggtggccatggtgcgggtgagcaagatgccggcgccctcgacgagcgcgaggagggaggcgccgacgagggcggacgtcgcggtggcgcgcgggccctggcgcagggagaggacggcgccggtggcggcgccggcgaggatggagttccaggggtcctccttctggcgggcgtggaccatggcgcagtcgaaggcggagaagaggccgccccaggcggcgaagttgccgccggtgcgcgggacgctcatgcggacggcctgggagccgccggagaggcggtggccgttgggggagttgtacgcgcccctgaggaagtggaaggcggtgccccccaccgcccccatcgcgaacgcgccgcccacgtcgtccaggatgcggtccgggcacggctccctctccgacgtcgtcatcctccccactcccgctcgatcggtctacggcggcgacggcggcggcggtcggcggcggcggaggcgaaacctaggagaggaggggagagttggcttggatgagaagttgatgggcaaagctaaagcttatggtttatcggttcattgatcacagcgtgcggggctttcgcttctcctcgcgcctgtgatgggccagggcccaccaaagagtaggggttcgaaatattttactctttccatgaacgcttttcctgggggccagcttgacgtgggacccactccatgctaacgtgggcagggcagccacgtataggatgctaatccaacgaaggttagcaagttggatgggccgcgcaatttgcgcggctagcacctaaacaaaatcatatatttttttaagtatgattttacttaaaatttattaagtatctcattgtcttaagagtttaaaagaccaaaccttattatccccgtgtttctaattttatactccctccgttttttaatagatgacgccgttgactttttctcatatgtttgaccattcgtcttattcaaaaaaattacgtaattataatttattttgttatgagttgttttatcactcatagtactttaagtgtgatttatatcttatacatttgcataaaatatttgaataagatgaatggtcaaacatgtgagaaaaagttaacatcgtcatctattaaaaaacggagggagtgttttttaaaagtcacaccagttactatcccttatgtcatctccttctttatttgcttgctcgatctaccactatttctattcattcgccttgtaacctttaaaaattggatattatagtttttagagtttattgtcacgttgggtttcgtttttataatttctagacgtcccgtcaaacgttgccattatactcctctatagcccgtccattgtctcttctctttattgtcattgagattttaaaaatcgaacataattatcgtgttcatttttactttctagaagtcccgccaaaccgttagtggcttaatttgccattgtacttctctacggctcgcctgctgcctcccttctttattgtcattgagattttaaaatcgaacatgattatcgttcttttttttactttttagaagttccaaacctttaaaaattgaaccttgtagtttttagagtttgttgtcttgttgggtttcattttttataatttttagaagtctcgtcaaacgattctactatgttcctttatggcccgtccgccgcctactctttattgtcattgtgattctaaaaatcgaacataaatatcatcggaattcattttttattttctaaaagtcccgtcaaccgttggtggctctgcaactatacgcctatacaccctgcccgctgcttctcttttttattgtcattgagattttaatcgaatatgattatcaatggttttttttactttctagatgtcccggcaatcacctcatttgcttcacggtctgcctgtcgtccatccttttaatcgtcattaggattctatttggtgttttattaatagtttttatatgtcgtatcaaccgccaccactctactcatttataggcttgttacttaatttatctcatcatatgtttatggtcttttttttccatagtcttttttttatcacaaattttaattatttataaattgtattcctaaatgaaatcttatttttctttttctaatttcagtttttttttcaaattttaattaatatcctattgttcttttaatatttttattttttattttcaatttcagttgtttcaaaattgtattcctactcgaactcacttttaatttttataattttggatattattttattttttattctgaattttaattaatctcatattgggttcttatatgaattcttctttaaatattgcttatttttaattccgaatttcagctaaatttatattgtattcctacttgaactctccttttatttttttttgctaattttggattttatttttatttttattccctattttaattaatgtcgtattaggttcttata

SEQ ID NO: 10713 - DNA, 37181 bp, Oryza sativa
  unsure (1)..(37181): unsure at all n locations
tgattgagaggcgcgggtggggtggtggtggattcggcggcggagtggggtggcaatggcagcagttgccggcctggctagaggtcggggatgacaggtggggtccaccggtcccacctgtcggcctgagagaggaggaaacgggctagggacgtattgtagacttgagggagagtgagagccaagcgggctgagggagggaaggccgccctatgaaggaggaggggagggatttgggccgagcccgaaagggaggaagggaaagattattttcctttctttttatttaattgattaaatgaactttgtgactttaaaattatttattgagctccgaaaattcgcgggaaatttcagagaatattttagggcacaaagaatattacaaaatattctcggccaatgatttttaaaggacattttaattccctcaataattcacttgattaaattaatttaacttttatttaatttctagaaaatgcattattaaatgatttttaatcccgaacgaaaatcggggcgttacaaatctaccccccttacaggaatctcgtcccgagattctgggatggctagaaagaaagctggtgtatgcggtctgactgatctaactgaccaacctgcacgactgaactggttggattcgacctttctgtttctttgttttgccaaaactggaccgactggttctacatgaactaacccagaccaggactgtggatgttcatggaacttatgtatcttggactgaactgtttgatgtgctcgagggtgtcccgatctttcgatgagagggataagtcgattggatggagtgacattggcgatctgactacaactatccagggatgttgcgccttagcaatcgttacaccaactccagaggcggtcgtgaatctcgacggatgcacgatcagcccaaccacgagggtatttgttcctgcaagcaatcgagaaccagcaagaacaagatgaacaagcaactaaatttgcaaatcaaagatgatggattgaatcagcagaagtaacaagtggggttcagtaacaagcaatccggcgatctaatcgatcacgggatcaactcggcaaagtagcgacgctatactttgatctaaacaaaacccgattattcttggcggtgaagaaagctataagaagaggaagaggacaaccacaggggtgctggggtcgttctctcaccctaggacgcgtccctaatggacccaacttgatacacggcccattgggcccaaagaggtgacgcagcaccgtggatagaaaaggacttggtaataaaatgaagattgcggccgctccagaactgatatggatatgaggctagatccatttaaaagtagacttgacaagctttccatgaagtacttgcacgcccaaatcggagttcgcatgaagtcgtgacggctgtcagaagttggtgttgtgctgcagtccgaatccatcccgcgcgaatcctctccccgtttgatcctctccattgttactgagtaaaacaagagtgcacgtgtctccggggtataaataagaatcatatgaatttaagaatgaacgcacctgatagttgagttgacgtgcacgagcacgggcaataggaccatgaagttgtacttgtggaggcgtagatgtatcgttggtgttgatgtcctcatcactcttaatgctggcaattttggtaacccgacaattcaccatgctggctagaagaggatgaagttgttctgaaacttgcatgtgacacttgtaaatcattgaccctacgtccgcttgagctggtcctaactcgaatgacaagtaattccagaaaacctagaaacctgcttgacctgtctttcgtctgaactgcaaccgtccctgatgttgcttctctaagctgaactattgacctggccccacgagtgtaccttagaattgaacctatcaacttgagattggggcaactctgcctatggcttgcaactgactcctttaattactaaccaaattgttgcactgggttgaaccttcaagtgaaatgccgacgaggcaaaccaaaactcatctctgagacctaccccccttacagagagtagtcatactttcgtctgactgggaacctttgaactgttgtccttgaaaaatcaccaacacttctcgaatttacggagccctgactttgaaaattgaaaacttgaccagtcaatcaaaatgacttaacccttagctgacgataggaaattccacacaaaagtgactctcatctagctcatgaacatactgactcttgactcactttcccatcagttctaactgctggcatgattgtcctgcttctggcctgacttcggtgtcgagttgcatagttgatttctgaaaactaacctgaccgactctgcattggaactgatgcaatttgaggagctggggtgctgcaaataaagttgtcgacctgatgacgctgacgccttgccgatgaataaccttctgagaagtgacttgtcgtacatcttccatgaatggttggacactttgcaaaaactgcccttaaaaaccataaccactataggtagcacttgttgcttcagggatcgatggcggcttagctgtgctggtctgctgagggcttggtggtgtactgttcgaggttgcgggtgcttgctcttggaaaacaaactggctttggctctgatcctgattccggcttgcatctgggcttgtacctgttgttggagacacaattgttgcatctgctgcatcggactctgcgattgctgcatcaacataggacacatccatcatctgaccttgactaaccagaatctgaccagagcgtggtgctcggactcagctggtagcttgttgtctcggactgatcaaaagctctgacctcaacacactactgctggagttgcttccgctacattcgaccttgcatcgagctttgcatctcctgcatcaatacgcccatcatctgatcttggacaccaaatgttgatcacgagcaagggttcttctggcattggggtactttgttgctttcaactgaaccgttgatctgtgactttaacacaccatcgttgttgttgctcttctctctgacactgaccatctgctgccaggatggaagatagatggaaaagaggggttgctaaaggtaagaccttaaaccacttgactactgatctgttgtgagtagacttttattgttcaagttgcttaaggaaacaacctagtatggtcgcatccccaccaatgatgcaaaccatacccctacacacaagcaaacaacacatgatctagcagctaacgaaactactcttccggggaggattgggattaggaaaactctgggaaaacttcacttgaccttcgtggaacgacgaccctgaactaatcttctcgctctttgcacgaagcttgaggcttgacttggcttgacttccgaacagacatgaagctggcggtttatcctccagggtttaacaactataagaattggagggacagggagaagaattttgaaaaaccgttttgcaaagaaatgccgaaggttttgaaaaaccgtttcgcaaagaaatgcccgagaattttgaaaaaccgtttcgcaaagaattttgagagccttatggcaatttaggaccggtttacgggaaaccctggaagacatacagtgcttgccacaagcgggagtgggtaactgcttgatctaaagtatagctcgaccctttcctaggcaccggtggcgagggtgggcgtgatggagttgggtcggccggtgtgtccggttgtccagctgccggattcaccgcggcgaacgaggggactgcccgctgccttgcgaggagtgggggtgaatccttagcgtggtatggatggttagggagggttatatgaagggtcttgtcacaatcactcgacatggtgacgtgttcatcatgggcgcatgatgacgcggtgacatgccggtggattgtgccttgtgggtacagttgtgcacctctggccagagtaaaattattcgaatagccgtgccggcggttatgggcgatcgaccagattcaccgtgattagtttcacccttaataaatcgactcaatgcacagtagttcaggtgggttggttgggcctgttcaacgtggtgtagcgttgatcagtggagatttaatgttactttaatcactcaactgttttactgttttgcttaataaaatgttttacatccgcctttatgcaaatagccacaaaccgtccttgtgttccccttgcacgtctgcatcattggtgtggcttgctgagtacggtggttgtactcagccttgctattgttccactgctgagctgaagacggagttagaggaccaaggctcagaccccagttgagttttgcctgtggagtggagctgaagccccgctaggatcgcctttttccactgctactgctttcgtttcggtgtgaggactaagagccacttctgtaagtatttacgctttatttacgtttaggacagtatattacttgtcgttttatgtatcctggctggtactggacagggatttaatacacaaaatagtctggaaatttgggctaaatttctaggcgtgacacctaggcacggcccaactgtcgagccggccagcacgagctcgacaccaatcttgccatgttgtgcttgggctgggccgtcgggcctcggcccttatggccatctatacatgcatgatgcatggtcatgtaagctatacattcatatgtggtgtgtttgggacatatagtcacattgttgagtggaccatatttgtggttcaagttagaaatttttgtttgtgtgtgtatacacacacacacaccactggaagaacataaacactattttttgttttttgcagcggcgaagccacctcttagataagtcagacgaccaccaatgctccgtcgatgtcatctcctctatcgatagccgtgaacacttataaaaattagtcgatcactgaaaaacattattagtcattcgggcttgacgacatcgctagctccaccatgttttatcactacatgttcaattgacttggcatgttttggactttttacacttgacccttttgttgaaaacttattttacaaagactcttataataaaaacgtattgtgagaatgaaacttttttctcaatgccaaggtcattagcgtcgggattcatgtctctgtaccaatgatactggccccgaaacccttgcatctccagtagttaagtcggtgatgtgaaggggttggcgccaagaagaccaatacaaggacctacatgtaaaaaaaatgaatgagttaaaaaatgtaaatatttttcttacaaacagatcctagttaactagggctgaaaacggtaatggaaattcccggccaaccgatgttcgtttccgactttctaccagccaagccatatggaaatggtaatcgatcgaatcgaaaatagaaatggaaacggaaatggttttgctattataccgatcatttccttatttaccgtatttttgtggaaattaccctttcttataatatactccctccgttttaggttataagacggggtnactttcnccaanntncgtctgctttggntttgaccgnccttgtgggaaaaaaagtattgatattttcaacccaaaactaatttattaggaaaatatattcaattattgatttgacaaaattaatttagtattataaatattactatatttgtctataaacttagtcaaacttaaaactatttgacttggacctaagtcaaaacgtcttataacctgaaacggagggagtagtaattattgtgtttctaaatatgttgatatttaatttaagggtatgtctctaattgacccaccgtttagaaattgattgactcttcaatcaaatccctaacttgagtgcatggttaaaatggagttaatttataatttatatagtataacatgaatttatttatacgtgtagcatacttaggtaaagctaagagaaaatttcttaaatgtcacttaaagttcacgagttttcttatatgccatcgaaaagttgttattcctttatatgccgctgattgaacttattcttcccccatatgccatctatgtcatcatcttatgtaataagaatgtaaaagtacaataatacccttttagtataggtgtccactcgtttctttgcatgtcatccaaataattacaaaaatatatttttttaataacatagaaataatatgtgatatatcactacacaaatatgcaagtttaaatttcacttttacaaaaaatttaaaaaaaaatcaaatttggttatgagcacacctatactagtttcaattaaatttgttgttttcgttacaacttgcgaagatcaaatttgaaattgatttttttgactgatatatcaaatattaatgagtgaatttcagaaaacccatgttttgaggccaatgtaacacataaccacaggttttatttattttctcaagtaaccccgtgcattcaatccaattaacataataccacaggtttaagtgagggaaagtgtcacaaaggcaagtgacatggcaaacctgctccacatcagcagctagccccacctgccaggtcaatgcgtggcctattagggtaggatcacgcgggagaacagaagcgcacattccctgttcccacacacgcgacgcggcaccttccgtctttctcgcgcacgcgggcggcggcggcgttccccaaccatctctcgcatgatggcctccaacgatgatcgtgctgttaacctaggtggaggaagattggaggaagagaacttgttgggtactaagaccagggagatggataaaatcaatattcctagcaggtaactttcatcccttttcttgagatgatcatctgaatagactccaaagcatgctggttggtgatttgcaaggacactctgattcatggttctttgacgaggaattaaatccagccttttgatcatgtttgtcttgtcaagaaattagggctaataaaatataattaggggattattattagggcattacaactatgcaatcgttcttgtgtttgtcattacaaatttgctttctcatcatcggaccgtaattttttaataaaaaaaaatgtagattgaacagtattagaactattgtattgcactcagatacaagactaaacacaattgatatttaatggcctgcaacatttttttctgcttcacaaaagagcatacatgccttcctctttttttttctcggcaaatatgttgtggttttctctgcttcacgatgtatatatttttttctccttgaatttattgtttgctttttaggacggaaggtgatgaatggacaattttaataactgtaataacgaaggaacatccctataactagcaaaaaaaaaagacagatcaactgtaaggtgaaaccattatgctcaagtgtgtatgttgataatggccgagtaaaagcaataacacacgaggatagttttgtcagtttgttgaaaaactgacaaggtcaaagtagtttgacctggcaataaaggacaaaaaatttcgttggatggtatataaggaaataataactttccaatggcatgtaaggaaattcataaactttggaatatgtgtttttatagtttaatgttaccgtatttgttaacggtttctaatctataccgacatatttccatccgtattgttccgtttttggtttttgatatttccgatatcgttttcatttccgactttaccattttccatttcgtttttaagaaaaatatggtcatgaaattggtttgtttctaaccattttcatccctatcgataacaaagcgttgaggatctattttgagaaaaaaatatttatgttttgactctaggtaaatagtatattataggggtgggcataaaaagaccaaatagaaaagatcgagcctgagaaattcggtcctagacagcgaaagaccaaattttgttcgatcagtctcagtctcctcggttaaccgaatagagcgaacttaaaaaatgtccaatgcaacctacaatccactcagttccatagaagtaaactctatttttcacattactactccttctagacatgtaacccaataagagtctttactcagatgtgcttgtgattttttttgactttggtgttgaaaatttctatgatttctttgcatatatgaaactgctgctaaatttcggtcaggattgagaccgagaccaaatttaccggtactgatattttgttattgaaattcggtcttcactattatcgaactgaccgaaagagcgaagaccgagaccgaaatttttggtctgaccgaatacccacccctagtgtattctaccggaatccatgaattgaagcttctaacgaacatactaaataatcaaccttgtactaacttgcatttccctaacaaaattcaacgtacatacaacacacaaatcgatcttttttctaaaaactcccataatcgagatagtaatttttacgaaaatcgtacaaacaatataaaaacaataacgcttttccccgaaaaaaaaacaataacgctttgaccaattaccttttgctgacagttctaacaagcagaagtcaaaccttgtaacttacatttccctatcaaaaacctaacgttcgttcaaatacccaaaacatgttcctcgaaagaaagacccttcccagaatcgagatctcgcagcatcgccttttcagagagaaaaaaacggaggcccgatgtgttccagcgcgctttcccgctggccggccgcgccggcgcgcgcgggaccgccgccgccccaccgcctgctgcaaaaccgcacggcgcgcggcggggccacctgcggttgcgggcggcgtgcgcggtgaggcgccgtgaagatattaattaatgaaggaacacgaggaaacaaataccctgtactactacatgtctcgccttcatcacctctaccgctgccattcgacggtccatattcatttttaccatcaatccgacggcgcaataacagtcggcctccgctactactagtaaaaaaccccatgttactccacttgttaccactattagtaatagcagaaaccatcattagttactaaagtttatagtttcatcgaagattaggaaatcaactcccaagcagtatcaaccgcacgtgcttgtcgcatgccccctggcacactttacgttaatgttccttttcttgtcatagcatttgccctaatcctttaagcctaaccactagcagcactggtagtacaggagtaataatctactggtactaggctaatctgcatgttgtttcgccatcatccaacagctagcgacagaatctagaacggatttccagccatccagtccgataaaaaagggtcaaattggatcctttgtgagagtcattctggcccccacatttcatacctcgcgatgagctagttattacagacaaattaggcatgtttagttccccgtaaaaacttttatcatatcaaattgaatgtttagacatatgtatagaatattaaatatagataaaaaactaattactccgtacacagattgcgtgtaaattgcgagacgaatcttttaagcctaattgcgccatgatttgacaatatggtgctatagtaaatatttgctaatgacagattaattaggcttaataaatttatctcgtagtttacaggcggaatctgtaatttattttgttattagactacgtttaatacttcaaacgtgtgtccgtatacccaatgtgacaagccaaaacttttcacccctgcatctgaacacaaccttagtttttcttgtcataaattatgaattaatccctccgtcagccatggtttttcgcgtccaactttgaccactcatcttatttgaaaaaattttgaaaaaaaataaaaacataagtcacgagtaaagtagtattcatgttttatcatcttataacaacaaaattgctaattataaaaaaatttcaaataagacggacgatcttgggcgctgaaactcatgactgcacttattttaggacggaggtagtattagtactaccggcgatgagccaaaacgtcaatttttcaattgaaaagatattagcctctatcttcagttaaaatagaattagagggagtactccctcggtcccatttcaagtacggccgttaacttctatttaatgtttgatcatctgtcttacttaaaaaatttataaaaaataaaaattaaatcacgtataaagtactattaatattttatcatctaataataaaaaaatattaataaaaaatattaataaaaaatttaaataaaatgaatagttaaacgttagacacagaaaattcacgagggagtatttggatcaggaggacgcgagagtctcaggcctaactttttcttcaaacttctaatttttttatcacattaaaactttcctacccatataaacttctaatttttttttcaaactttaaattttaatcaaacttctaattttagcttggaacacacgctgatgatgagtgagctgaggtctgtcctcttttgagttttgagtcttgactttgacaagtgttgtagtcagtggtactgtagaccacttccatgtgggtggggcccacacgaggccacgtaggaaccgatatggcgacggccggatcgggcgcgcaactgttcgtgcccaaccccggagcccgggccccactaccggatggagtacgtgtactatactcgtagttttagggggtctttgggcaaatacataagtagggtagggacttatattttatatttttatgagagggactaaagtttagtccctagttcccaaacaccctcttagagcatccacaatggtaatctataggctctctataagagatccatgtcagcatatttttctacctgaaagagattaaatgaagagagagaacaaatctatctactaaactggagatagtctataaaaaaaccgaggcaatgtattatagcgctatagatacccatgtagacatactattgaggtgatttactattaatctaatctattgctgagatatacatatagatagtaccttatttttttcattgcgggtgctcaaagttttctcataccaaaaatgccaaaccatttaaatgctcctattaaagtctcccaacccagtgatctttctctggattccttctctctttcccgccataaacggagtggtagtagtactactcaataagtttcccgcgaaattatatattttctttttaaaaaacctagtacgatatactagtagtacgtactcctatacatagactgtgttcggtgatacaagaaagaaataagaaacggatttgctacaaacctatcgccattcgccatattttctgacaaagaaaatatcagatgagtcatgagtgtgaagattcgtactcggcatggagagaaaaaattggcagcacaaacatgtggcgataattgacctaggatccttgtggataaaaaccaatgatgctagccaaactagtcagctttgttttcttgtttattttatgacaagttacatatagttaaatttcagttacaatgtactaattacactagaggtatactatagttatatttaaaagtttttgagtcaaaaaaaaattgtcgatagttttatagatagtcttataagcctgacagtttactgagccgttaattttttgtcaaaaatattatatagctaagttatttaaaaaactatattcatatatttttaaaatttaaaataattaatcatggttcacctactaggttagcttttttttattttggagggaggatgtctaggatactcctcctagggtgtgtttagttcttgaaaaaagttgaaagtttaaaaaaaaatttgaaagtttatgtgtatagaaaagtttttgatgtgatataatatgatagaaagttgagaatacgggaaactaaagacaggtctactgtatatagacgtgatttactaggcagagtatagagaaaaaaatgaagaatgcatcagcgcgcgtgaaggagtcggaggaaaagaagggcatatggcatgggactatgggaggacatgctcccggcctagtgcactgcaacacggccatccttgaatacaaagacccaagaaacacgaaaaactcgaaagctcccagctgcatgcttgcccctgctgcacagagaccaatggccaatgcccctcctcctcctcctcttttctctctcttcgcccacctccgtctctctctctcctcacggagtctgactgacagaggtaaagcagcagtagtcgcagtcgcagtagcagcaacagcagctcgcaccgttgcagcctttgctctctctctcttctctctcctctctcgctcgctcgctgtgtggctggctgcagcgtctgacgcgctctcctaggcaggcctcactcctctctctctctctctctctctctctctctctcttttctttctttctttctcgcacagatacaaaggtgcacccggccccgcccctcccgcgagagcacttcggttttaatcgccgggagaaaaaaaataaatgggaggggcggtttggggaagaagaagttgaagaaggagaggaggacgctgaaaagaccaagcaacaagaagggagtccctctttctctttgggagtggagagagagagagagagagaggcatcggccatggcgaggtttctcctgggtgcggccgccattgcgctgctcgccggcgtgtcgtctctgctgctgatggtgccatttgcaggtcagtgctactgcttcgctttactactcctacctgtctaacggatcggttttttgttacaggagtttagagaataaatatgccatattttctcctttttttttattcttctcggagggtaaaaaaactctgatatttctgggcttgggaggcttggaccttggagtcacctgcttgcttaatgcgtgttgttttgcagtcaaaggttgatgcttctttttgggaaaaaaaattatagcgtttttgtgaatgttttcagtccaagattccttcgaaatggcgccattttgttttgagctcacacatttcacccttcctcaagttggccttgctgcgatgctcgcatggtttctcctctcgaaagacaaaaaaaaaattaaaaggaaaaaaattgctgtcttgattcataagaaggaatgtttcctgaatcttgagtcaggaataagaatcctagtaatagataattatatctgcggttggaatcacgtgaaatcgtggctgcggtgtactactcaagttttatttcgtggacacgggtggtggaacacacaaaagggctgcggtttataccgttccattgtgactagtagtacacctctcgttttaaagaatctagttagaacattagccttttttgggcatgtggccatgcaggtattgtgtttgtttgttaactgtccaaacaatgttgtcctaccatggcctttgtgctctgattctgggctctgttactctgtgtcaactctgtttcatagagttccatattattagtccaagtccaggagttggtacttcgtggcaagaaaaaatcagagcaaatgttgctatagcagtttaccaatttcgtatttattgatctgtttatgtaattattatgttgtatgaagttagaactctgctccccacaaatgtagcatttttcctattcagtccaggaaacaaaggtagaactttcatgagtgctggaagtagttaggcaaaagaacaattatgatggctgtggaacatgtgaattgggcagttccagagttcttccccgtggtttcgtattatgtatgtagagttgaatgcatgcttttggtctagcatcatgtaagcgccgaattcgacccaatcgcggtagtttgtcaatccagttatgtaaactgttattcgaagtagcacttcaggtttgcaaattgcagggtagccacatttatttgcttttactttgtgatatattatacatttttttttgttgtgaaatttgcctgtctctctgcagaagcatatgatcctctcgatccaaatgggaatatcacaatcaagtgggacatcacacagtggaccccagatggctatgttgtaagttcactagattgtcagctttcaacataagctggggctctttgagcctttcatctaaaaaaagttcacgagattatgtgtctgaaactaccatttaccaatagtgttaagtcatgcatggtaatttactataaaaccctgatgtgatctcaattgctctagacatctctctgaaattcactttacagcaaggaacctttattttgtgtttttctcttgtttatagttctactttgcatcctatagaaccccaaataaacaaatgcaagttattcttctagttacattttgatagtgggcaagacagatttgtgcatcatttagctataactctctgttttttttttgtttcatggacacctctttcttaaatgattggtaacttaacagcttctaagagatgtttacttgttcttgatgtcttgtataatgtacttcccgtaggctgttgttaccatatacaacttccagaagtaccgtcatatccaagcgcctggttggagtcttgggtgggcttgggcaaagaaagagatcatttggtccatggctggtgggcaggccacagaacaaggtgattgctcggcattcaaagcaaatataccgcactgctgcaagagggatccgagagttgtcgacttagttcctggggcgccttacaacatgcagtttggaaattgttgcaaaggaggagtgcttacctcatgggtgcaggacccactaaacgcagtagcatcatttcagatcactgttggacattctgggactagcaataagacagtaaaagcgccgaagaacttcactctaaaggccccaggtccaggatatagttgcggattagcgcaagaagtgaaacctcctactaggttcatttcactggatggcagaagaacaactcaagctcatggtaagtcatttcagtgttttttgtctttctggcgtcacaattatgacaccctttcttcctttttttgcagtgacttggaatgtgacatgcacatattcgcagtttgttgctcaaagagctccaacttgttgtgtttcactttcatcgttttacaatgagacaatagttaactgcccgaaatgtgcgtgtggctgccagaataagaagccaggaagctgtgtggagtaagcactgttgctttaggaagtctatggattaacaaactaatttcccacttctgatttcttctatgtattttcgttggtaggggtaattcgccttatttggcgtctgtggtgaatggacctggcaagggcagcttgactcctctagttcaatgcacaccacacatgtgcccaataagagtgcattggcatgttaagctcaattacagggactattggagggttaaggtcacaatcacaaattggaattaccggatgaactactcgcagtggaacttagtagttcaacacccaaattttgaaaacgtctctactgttttcagcttcaactacaaatctttgaacccctatggagtaataagtgagtatttgcttcaacttctgagtaagtttgacaattttaatgtgaaatattttggctaacgattaatcttttgcttcagatgacactgcaatgatgtggggtgtcaagtactacaacgacctgcttatggtggctgggccagatggaaatgtccaatccgagcttctattccggaaggaccggtcaaccttcacctttgacaagggttgggcttttccaaggcgcatatacttcaatggcgaaagttgtgtcatgccttcaccagatctgtacccatggttacccccctcttctactcctagatttaggactgtattccttctcatgtcattcctggtttgtggaacattagcattcttgcacaaccacctagttttagacaaaaactgtggaaagtgctgaccacattgggcattggctgttgacatactgagtcttttggaagtttagggtgtgctcttgcatgaaaagctaattcgcgtttgatttaggttgtaagtttaggttcctcgaaatcattaaagtttgggttgtacattctgatggtgtgtattcttggtctgaagtgtgaagactaattgagaaccccaagtcccaacattaattgtctagagaaatgtttgccatctcatctgattgcaagaaattgcattttgtagttggtcagtaaatgtggaaattgtttcttttttcctctcaattcaaggtcaatacctgcatacatatttgtagtcacaacagaatttgcagaaaagtttgtggtgtgatttctcagggctggcctaactggggactgaccaaaactcttccagcctgattgtgttgtacattatggagatctatcaggcaatttcaaagttaacacaatatcacagatttcctctttgactgaatatccagtatgaatagaccaaaatgcccctacctacactgctctccaaacatgtgggaattatcaagaagacaaagcaaaaggggacatttttctgatcatgccaccaggaggagcaccaccaagatcgccgaggcggcggcggccacggaacgcggcggcccgatcggagcggagttgggtaggtaggggtaggagtccggcggcggcatcttgcactcgtcgccgttgaagtagatcttgcgcgggaacgcccagccctggctgaaggtgaaggtgttgtagtcctttcgcatcagcacctccgactgcacgttgccgaacggccctgcctccatgagcaggtcgttgtagaacttgagcccgtagaacatgccggtgtcgtctgcaatataccatggccgtggtgtcgtccaattagtacaggtatagatatgaaagcgagaacgatgtcggagaggaggaataagaggttgtggtagagagcttactgatgttgccgtaggggaggaggggcttgtactggaagctgaagacctcggtgacgttgttgaggttggggtgctgggcgacgagcgtccactgggtgtagttcatgcggtagttgaagtttgtgatggcgatcttggcgcgccagtagtccttgtagttgagcttgacgtgccagtgcacgcggatcgggcacatgtgcgacgtgcactgcagcagcggcgccccgtccttgcgcggcgtgttcacccccgccgacagcgcccgcttcgagtcgcccatgatgcactcggtgccgccgctgtgccctccgccgccgccgctgttgcgtctgctgcgtccgtcgccggcgcgggcgttcttcccgccgccgccgttgccgcggtagccgtcgtggccgcacccgcaggcgcacctggcgcacggcacgatggtgctgttgtagaaggaggagaaggagacgcagcaggtcgggtagcgcgacgccagctgctgggagtaggtgcaggtgacggtccacgtcatgagcgcctgggtgcggcggcgccggtccggggtgaggtagacggtggaagggacgatggtggccgggccacacgtgtacccgggtcccgggccggcgagggtgaagttggtgggtagcttgacggtcttgttggtggtgccggcgaggccgacggagacctggaaggcggagacggatccggcggggtcctggccgtaggcggagacgacgccggccttgcagcagttggcgatctgctggttgtaggggacgccggggaggaggtcgacgatggccggggtgcgcttgcagctgtgggggatgccgcccttgaacttggagcagtcgccctgctcggtggcctgggcccccacgatggaccagatgacctccttcttggcccacgaccaccccactgtccacccgggcgccaggatctgccggtacatctggtagttgctcatcgtcaccatcgccacgtacccgtcgggcgtccacgatatcacgtcccactttatcgtgatgttccccttcgggtccagcggatcatacgccactgcaagcacacacacatgcatgattgattaatcaacagcaaaagtataatttaattaggaataatgggcaagaagatcgaagaagtaattaacctgcaaccgagcatgtcacggcgaggagcagagcgaggagagagcatctgtgcagctccatcgtcgacctcaccggccggcgagcaagctagcacagcagcagcagctactcgatcgaggtgagcagggaattgaatgagaaggcgtgcactggctggccaggaagagggaggagaaggtagaagaagaagaagccaccgagcggcgagatggcgcgtcacacctcgatggattgatcgtcggttgggtttcttgaggaggactcattgcatgacggaaggggtgatggctcagcgccacctctccgacatggttaacatgccgtgaatcttgggttcgtcccgtgcatatgcgggcatggcgctcgctctgcacactcgtctggctggtctgtgaagctgatgatttggacggcctgcggctgcggcatcgcggctgggcgaagcaaccgtggttgatggtgacggagggaaagggacgccggagatctcgcgcgctcacctcatcgatcgaaccaggagagaagagggtgtgtttgcgatagcgacggcggaacattttgccaatttttcgttcgtgtaaggtgcgcggcatctgttccgccagttgcaacgtttgatcgatcaccgcctctgcagccaccgacgacatgtatatatgactatcaaatttgttttcttcatcaatcactttatattagtactgaagatttaaaataataaaacaatcaaattggtgatcattggatgtcaaaataccatagattacggtcaggccaggccaacgcgagatcgatggatcgtgtcatggatactcgatctgctaccgctcgctctatacctgacgtgattataattgatgtcattagattctgttacttgcttttccatcatacttctgtttggcggtacgactatccctggcttacaaagtggacaaggattttgatattcctcaaccaaccagttggcacgttttttcaacacgaacgccaacctcatcgatcgcatatgcatccttctccatctgccgtacgtacgtacgtacatattcctgtgtaagtacgtactttacttacttgcgtgcgtgatgcacttatacacaatacgagttcagtagaagtagaaagcacggaaccattcattcctctccgatgatccagccaagcagtaagatgaagcatcacacctgacagcaacccctcttatttttcgtaaaattatgcaaccactcttaattttgatgagaaattttcatttacctttatactagtatatactgtagtaacatacaaaaacaagaactcccttaatttttaaaagagtgttgttaccatcctgcgttttgtaccgtgaggtacaggtaccgcgcagtaccaaaactaatccagccgttgattaagcgggggtaggatcggaatagagaaggaacagacaaacccgatgtggcggcgcggcagagaggtgaacaaggcgaagcggcagagcatgattcggcggcatggtggagcccgacgcggcgacgcggctgagcatgaagcagcggcgtgcatgggccacctggtctccatgatcgagttcggcaaggtgttcgccgcccgcggcctcgccgtcaccgtcgtcgtcgtcgacccaccatacagcaacaccggtgcaacgggggctttcctcaccggcgtcaccgcggccaacccggccatgacgttccaccgtctgccgaaggtggaggtgccgccagtggcgtccaagcaccatgagttgcttaccttcgaggtcacccgcctctccaaccccagcctccgcgacttcctcgccggcgccttaagtcaaattccgcggctgagcacgacgcggcggcgcggcggagcccgacggtggcgcggcggcgcggcagagagctgaacgcggcggcgcagagggcattttgcgatgcggtgcagatcgtgctaatgttcaaagactaaactacccttccacctctactgccaaagcggtactgcgccaaggagaaaaatggtaccgcgaggtaccatgcaatcctagccgttagatcaattcgaacgaacggtccagatttcgtacctcggtggtacctcgggggggggggggtgctggacgattaaaaaaactatttttaaaaaccatcctacaactaccaaactaccacatgggttgttatatatgcacgtggcaccatcttgccagctccgtgtgcaccggccgccgggggcctgtctaggcctccgcctccacgcaccttgtcgcgtggccaggcctctccaccgcccgtgcttcgggaaacagattcacagagagatggggaggaagatgagtggaaatagaagagggtgaaggaagaggagaaggggtaatttagtaaaaaaaaatgtagaaaataggtttaaagggttagtagtgacatatgttaaagaaaaaagtctgacttactcccctgaactattgggtgagtatgaattaccctgataaaccctaagactagacatctttcatcctcaactattaataccgtatccacccagcagttttgcaggcgattttggtcctacatggcaccaacatggcaatccaattaggcaaaaaatataaaaaaatgggccccacttatcatatactacaactctatcttttctctctctgtcggcaattgcgctgggggcagggggtgaggcgggcggcattgagcacgacgacgcccgggagggcgcatcgccaacagggcactatggcgggaggcaccgggagaaaagctgggcggcggacgcgagaacgatgccagtcgaccgcatctcccatggaggcagcgttacacagcagcggggtaagggtggcaagcggcggaggcggctgagggcggcgagtagcggaggcgtctctcgtcgtcgatctggtgggccgcaccatcaactgctctagatccactgtcgcccaggaccccacgccattcctcgtcgccctccatctccggctcgctgcttgcggagcctagtccacctctgcttcgctagttgttgcttcctccgactcattgcttgccgagcctggccgctgcttcgtcgactaggagggtggaggcagggggaggtggacttcatcagctgccggagacggctgcaaagagagattgaggaatagatagaaaggtgagaggggaaaaagatggagaacgggagagtatggcatgtagggtcccattaatatttttttttaaaaaaacaaattgctgtctggactgccacgtaggactaaaaccactttggattaagttaagttgtttttcatgcggtattaagatttgagagtgatagatgtctgattttaaggtttaggggagcaattcgtactcacccaatagtttagggggtagtttggactttttcctatgtcaaataacaataaagttatacttcaaattcgtaaaaattgtaaagattgtagtggcatgtatccaactaacctttgaaagaaaggccttactactagaaaaatgacactactacattataaaaagatatttaacacttttccaactcgagtgcgtatatgcgcatctattacatgtctgtgaaatgaatgatcataaaaaatattctacctagttcatatgcgatttcaacaaaattagtactattgacatagatcgtagccaataaatcaatcaaccaatatatcgttgttactaagtgtattattgcaaaatttacagggaaaattgtacaacacacagtatttcttttacaaatgttgacgaaaatccttcgtctcggacgaccagccagggggggagcaaaatcgggcgctctcccctgacgcgcacgtgtcctcatggccccaccatatgtcctgcccctacctgacatgtgtctcaaaaaaatgtttcacctagtgtactcacaattttttattatgtatagatctaatattgcagtaaattaaaatattcttttgcaacaaatcatccacatatttttggaaaccctctattaagggaattcgttttattttttgttccacaaaaaatgtttcacctattgtactcagaatgtttcactatgtatagatctaatgttgcagttaacaaaacattcttttacaacaaatcacatgcatattttggaaaacctctattaagggaattcgtttcattttttgttccacgaaaaatatttcacctagtgtacttataatgtttcactatgtatggatcaaatgttgcaatgaactgaaacattctctcgctatttgctgaaacattgtttttatataaggtgaaacaatgtccgatttaaacgtttgaaacattttgaatctacttagtaaaacaattccaatatacctagtggaacatcgtacaacatttaaaaataattcaataataagctaaaatgttttttcgttggaatatatccatgtgtggtcttgttttgaagatttcattgcaacgaatttaatggtgcaatcagatcatgatttggataaataatttaagagaaaaaatagtttaaagtgcttttgcacgcatgcgtggcgttgacgtcagtatgatgtcagcgcctgattttacccccctccccatcgggcacccgatcaaggcgtgcaaaaatcgggcgttgacgtcatgcacgcatgcgtgcaaaaccactttaaactgtttttttctcttagggcttattcggaacacaggataggaaaaatgcaggaataggaaaaacacaggaatagcataggatttcatatggaaaacggaggattgaaaaactaaggaatttgatgatagaaagcattcggaatacaggaatatatataccacataggaattttactgtcaagagtaattaaccatgtagattataatctaattaagcaacagaatactattttctatctagtcactattctcgagtactctctagacaggaaagccttatcctcttcaccgcatcatccttttccccaatctttcagaggcatggggagcagcaaacaaacaaaatcaacagggatggcgggctcgatggttggcagagcaagctcgcgcgcgcagctgagctacgtaccggggggagcaagcgagacggcggttggccgacgagctcgcacggccgcgcagcaggagcgagctgccgccatggccatcacaagctcgagcagctggcaacctcgagttgcttcttccccttgttttttttttctaattggattgcttcttattcctatccttcagagttcttgctcagttgctttgctcgtattcgtaaaagttcttgtttactgcttgattacctcggtcttacgcgaaggaaaacaaaaatgaggtcggagtggatgttatttttccaatgtttttcctttgtaatcagcagcaaaggaatctttccttagcttttcccatgacctgtttgtgccttccaaatgataggaaaggaaaaaatccatgtcaacattattccttcaaaaatcctttgaaaatactgtaatccgaagatgcccttaaattatttatccaaatcatgatccaattgcaccattaaatttgttgcaattaaatctttaaaacaagaccacacatgaatatattccgacgaaaaacattttagcttattattgaattatttttaaatgttgcacgatgttccaccaagtatatcggaattatttcactaagtagatcaaaaatgtttcagtcctttaaatcgggtgtttttcaccttatataaaaacaatatttcagcaaatagcgaagaatgtttcagttcactgcaacatttgatccatacataatgaaacattatgagtacactaggtgaaacatttttttgtggaacaaaaaattaaacgaattctctaaatagagggtttccaaaatatgtgggtgatttgttgcaaaagaatattttaattcactgcaactttagatctatatatagtgaaacattgtgagtacactaggtgaaatatttttttaagacacatggtggggccaagggaatgtgcgcacgtaggggagggggtggagcacccgttcctgctccactcccgtcggtcacccggggctgagcattttcgaagtttttctccctccgtttttgttcagatagaccaggtactcacgcgtactagcatggcggaggagggtaggggccctcgcggatccatccgcatgagaaggcggcatgggtggctggactagggataaatgggaagaaaatgcttaaattatttttctaatttacaactatatagtgttttttgaaaaaaaagaatcaaaaggtaaaacacaaatgaatattaatacattggaaaacaatcgggaatgaaatgaacagccaatatgattgaatcttgtataacttccaactaattaaattattagacgagtgagctttattagtaacattctttttctaagtatgtatatataattatatatagcactaacaaatttaaccccgaaaccggaggaggctacctctagaggcagcaataaatgggtcaggcaccgggaaatggtcaatcgccggcgttatccgcaggatgacgtcatcctccttggtcttcgccggcaaaggccgctggtttctacggggcttgtcatcgtcgtgctcttccacgctatccctgatcatgagctccacggcggccaacgtggcggcgccgacgagcgcggcgcggcccacggcgagcgggccgtggcgcaagcgggcgacggcccccgtggcggcgccggcggcgacggagacgagcgggtcgtcgtgcctgtcggtcgccgacgacagggcgtggcaggcggcgctgtagacggcgaggcgggcggcccagcgggtggcgaggcagggggcgccgtcgcggacggcctgggcggcgccggcgaggtggcggccgcaggggaagtcgcggaggcccgtgaacaggtgggcgagcgtgccggcggcggcgccgcccacgaagccagcgccggcgttgtccaagacacagtccgggtagggcaccccccactcctcctccatggatcgatcgatctcgacgacgaccttgcactagtgcagggaagaagaacggatcgaatcacgatgcagatttcaagctgggagtgggttgtgataattaagggagacgcgcgcgcgtgcgcctcaacagtgaacacgactcgaatacttggatgaacaccactggtacggatcggattcgtttccaattcccggctcggtttgatatgtttcggccttgttcggttggtccgggaatgactggggttgggctgcaatcccgtggatcagcccaacgcggattcaatgccggcccacaagaaaatacgtgttcggttaaacccaatcagtgtgctacctcaccccaacccgggaaaaaaatcagcttctcctgaggtgtggaaaaaaaaaaatcctcacaacgggagccgggaggcgacgcgcaagcgcaacacgctgcggcggcgccacaactactgaaaggcgatgacgcgactaggaggcgacggcgatgcggtgcctcccctccggcggttgtccccttcagtggctaacttctcaccggtaaacttccttcttccttcccctcttctctctggtgtcctagggtttcctgggtgtctcttcgctcgcggcaacagcagtggtggcatctatcttgatccttttttaatatatagagtgtatctttatagatatgtctaagaataaattaattacctcagtagataattatatgttgaatctttcaatttttgtccagatcaaaaattgataattatcctggtagtatgttggattgattttaggttcaatttcagacatgaagagatcctaccatttcttaaagaaaagaaatcatgcatcactaagcatgtttccgtagtaatatattgaatgcaactcaaattctttgtttgataaagatattagattttacttattaactattgcttatccttttcactcaggcttctgttggttatttgtttctctttatatgaaaggcatataatgacattcttgagagcaagcatgtgtggctttctggtttgtacatgcaggaagaacacttcttttctttgtttttttagcacttctgttcagggtgaagacatcctttggagcaagcattggtgttggatcttatatgattgaatttttgactgatacttctaccttttaactgagacatgtctactcattttactgcttatgtgattaaatcattagacgtgcatggatagttcttgtcagatctgtcaatcttgtgaactaattatgttcagatgggcaagcgattaattatgtgtctgtgtgctgatgagtatgattaattgtgtgtatatgtgctgatgagtatgattaattcgtgtatatcagtatatgtgatgttgagtagatgcatatggccatatgggataacttgtggtgatgctttcccggtcctaaaccatatagaggttttaggagagggattaggagaagcaaggggattcatcccccacagggtttgagtgagacgggagggattccctttggggtaaaacccaataaactgaacaaggccttcctgtgatacagcttgaaccacaataccttgggttttgtgtaatttactcttgagcaaatatcatataaccctaggttttggaaaactagtttcacagaaccacgtgttttgaagttttttttccacgaaacatgcgacttggagctcccgacttactcctactctctccgtcccaaaaaaagacaaactctggttttcgtgcccaacgtttgaccgtccgtcttatttgaaaaatttatgaaaaaaattaaaaagacaaatcacgcataaaatattaatcatgttttatcatctaataataatgaaaatacgaattataaaaaaatttcatataagacggacagtcaaagttggacacggaaacccagggttaacggtagagtaacagtggtgggttaagcggggaacataacatatgcacacaaacttcctgtggacactccatccacaccaactagctaatatcatagaaagttctaggaaaaattggacacatacttccaatagtattacacctatgtgtgaaatcttatcttcaaattcattatattttagctgtaacaaaaaagacaaaattctgacatatttttaccctttaaactgtcagatttttcaccttttcgctacggctaaaatataataaattagaatatgagacttttcagatatgtgtagcacaattaggagtaaatgtccatttttttctagaagttttcgtgacatttgctagttggtgtgcatggagtgtgcgcgggatgtttgtgtgcatagaatattttctatgtcagcgttacggataaggtataccctctacctctggatatatgccgtatactgatacggtatacctgcgcgtatacggatgtttcctgtacacgttaaggaaattcatcacgtaatagaaacggagtctacggatggaaggagtcctactcggactgaactgggtcgtcactgtatcgtgtggggtctgatatctccgagttctacttggagatcaactgacccgcagtataaaagggacccccgggaggacctaaggcattgaatctcactgccaacacaaccaccacagcctacgaagtcgaagcccacaggagccaagtcgccgggtgatctagtcggaccaactcgactacggtctcgtcggtatcatcgagttttgttattccctttataatctatggtttccaccatataattccatatcaactgaattagggctattacctatcaaggggcctgaactagtataatccttgtttcttgtttgcttgatgtcgtattacgtagatcctcgtaccagcgtaccctaataccctttatatccggtctacgggtatcccccgtcgacagaatatgttcccggttaagtgatacatacaagtagcctcaattgtgtgttatgtaaaaaagaaaaatctcaaaacctgttattacgtgaaagtagtcccaaaacatagggatctcgtaatatttactcataactagcacgcgatcgaacggacgatagcggcgggaaccggtgcacaattaacacaaagtgtgggggcctttttgcaaaaataaccgatgatgtggcacacctaattctccaacgatctcacgacatttagagaagttaattatacaagatgcacggcccagtggcggatctaggaagagatagcagggggtctgaataaactagataaagctacatcccctttccatttgcatatagcaaaaaattttagtgggggttttgtgggggctcccatagtactcgtgccagtaatgagggctcaagactccgccgtccccatgctagatccgcccatggcacgaccttttgtttagtagaacttgactatatcattttcatatcaaaagaccttacgacattcttaatagtacaaaattaacttatgttaaataaaatagcctgtatgcgagtttaaaaagctttaattttgagaagcagctgattagttgctagatgataaaaatatgaaaaagctaagttttctagctactaacttctaattgattttatggactatgtagctatagattcttataatctagatagaaactaatttaaataggtgcctaacttaacatataaaacactctctctatcccaatttaatcaacacctgagaaaaaaaatgcagagacccaaaatgctatgtcgcttttttatcccgtggattgtatcatgatttaaatttaatcttatttggttacatgcaacacattcaatgatatttatttactctttaatttttacacaaataaagcccgtggattgcatcatgttttaaatattgtatagaagtgtattaataaagtcaatcttatttggttacattgagcatattcaatgatatttatttactctttacacaaataaacgaagagacttgtttggggtattcatccggcaggcacctcctccaccacgacgggcttcggcggcacccccaggaacccaatcggcggctcgtcgtcgggtttggggtcgctgccgccgccgccatcgatgtcctcctcggggacaagccgcctgtggtagtggacccaggagcgcaagttgtccagcgcggcgtcggccctctcgatgacggccatggacgcggcgccgacgagcgcgccgcggccgacggcgaggggcccccggcgcaggcagtgcgcggcccccgcggcgcccgcggcgagcacggagaccacggggtcgccgtccgtcgcgcgcggcagggacagggcgcacttgaaggcgccgtagaggccgcagcgcgcggcccacgtggcgctgatgcggggcgcgttggcgcggacggcgcgcgccgcgccggcgaggcggtggccgctcgacgagccgaggaggcccctggcggcgtggtaggcggagccgaccccgccgccgatcaggaagccgccgcccgcgtcgtcgagtatgaagcccgggtacggcttccgcggagggctcggcaacggcaagtccgtgtcgcgctcgtccggtcgcggcggggacggcgacgccatgatcggagcacggaggaggctgagctgtgcttggcttgcgctacaagattggtacagtagtagtacagagatcgaacaccgtgatcggcgagtacttgaagaaggaacttgactttgaattcgaaacagatttggattggattgaatttgcacttaatttagtcgaattctagtttccgtgtaatgtaacacaaatcaaatcctaatagattcacctcacgaagctaaaaagatgtaaaattaacaactccggcgacgccgctgtcgatgtcggtgtcctcactgacgctcttcagcgaagaagccgtcggaaaagccggagtcgtcttcgttgtcggcgacagcgacctccttaaccacgatgagctgacccgggaatcccggggaggcggggaggcggcgtggacggcccaccggtgcgcgcgcggcgaggccgcgacgaccgtccgccggcgggaggtcgtctagggcgcggtggatcgcgagggaggcgccctccgcgagcgcgaagaaggcggcgctccagagcgcgtcgcggccggcggtgaccgctccctggcgcaggcgaaggaagccgctcgtggcggcgccggcgaagacgaagttccacgattcctccttcccgccgcgcgcgtaggccatgccgcactcggggacgcagaaggcggcgaagaaggcggcgaagctgccggcggcgcggggcgcccccgcgcggacggcccgggcggcggtggccgcgcggcgagccgcggagccccttgaagaagtggaacggtgagccgagcgcgaacccggtgccggcctcgtggacgatgtggtccgggaacgggatctgcgccgacggtgcgtgcgagccgcccatggagatcggcggcggcggatatggcttggtgacgccgcggcggatcgcgcgcgatggagggcgtacgtgtatcgtaccgtacggggtttcgcgcggtgtatttggacgtgtgcttgtctaggaatacattacgaggcggtttgtttgcgacgtacacgtactcatcgtgtcgctcgcgtgagccgccctgcctctgtttgctccctcgtctgagttgtcgtcggtctcacattcctctgttcgacgcaggcgaggacaaataccagccaactactgcctccgtcccaaaataagtacagctatagatatccgtgtttagcgcttggaccatccgtcttgaaaaacttatgaaaaatattaaaaaaaattagtcacacataaaatactattcatgttttatcatctaataacaataaaaatactaatcataatctttttttcaaataaaacaaacggtcaaacattgaacatgaaccgtgctaaaactgtatttattttgggacggagggagtagattatagataaaattagcagggaacctacggattgtctattaatttaccgtgtaagtggatttatatatcgatccacttgcattactagatgcggtaagccggaccacaatgcgggaatccgcggaacatttaactcaatgccacttttaagatgtggtaattaattatttgccactcattgtctatgacatatgggctctcatttgtctatgacatatgggtccagtgataaataatttatcaccactcgtaagagtggcaaatagttaattattctggaatctactgattattacttattgacctataaacaaatttgcgggttggccccatccctaggctaacgtgattgtagtcactcctcacggagagacgtgattgagttgaggtatccctctggctgttaccatatgactctaaatattatggtttaaaaatttacaaatcactagtatttctatgaaatttactttaaaacacgaatggttttcaatttcgtttgccacatatatagggtgtagcgaattttttaagtttaaacaaatttgaataattctaaaccaaattcagaaaaaaaggaaagaaaagataaatcacgggcgaaacagtttcatgccataataatgtgattttttttataataatgtttgttcgtgccataggattatgatcctcactttgcatattgcgaagctatatttatggcgctatatttttcactaaaaaatagttagcatgtatttacattgtaagtacataaattacatattatgcaattagtttatgtacaatacaagtcccaaaaattacatatgtaaatcccaaaattattatatttgagagatgaagtgaataattcaagtcatcaaacaagcataatgaaacatccgacgcctcgagagaggaatattggagacattgctgggcccttagcctgctagtcaacttcaatctgagatgtgcccgtcaaccactcgaaggcggtgaccagatgtgttacacattcaggagacttgacaaaaatggctaaagatctacaacctctcaaatattcctaactcatactcatatgaatctagttccccggatgggcactagatccacactttcatcttaagcatgattatacatagtaaacacaactaacatgaaagaaacttaagacttacaacaacataataattacataggccgaccggccaaatagacttatttagagaacaacggaagcttgactacccaatcacaagcacaccgactaggggtttaccccattaagttctcatcctagaagaagcaatcggaacccgcatcacttaaagactaagactaaacctacaaacaaaaggttatatcaacagcaagagttaggacattaaacaagttaatgtactagcaagcacaagtcaatcctaccatactacatgtaaggcatatattcaaaggaaggcaatatgtagttcaattttagcataaagcaagttttgtttcgcaattcttttgtaaaggagttgatacttcaattaacaaaacaaattttaagtttcaataagttcatcataattccatcataatcaatctcttgttgtcatcctttgacaacaagtcataatatatcacctcacacacacaactcaacacatttatcaatttcaaaccaatgtcacatatgatcacattttaaaacataaagtctatattcatgacacatcaccaaagcgctcatgaccgtgagcacggctaatcgattagttttaaagaactctacagagtttgtacagctttacccacatgatatgaactctctagtttgttttgagtttgcaagactccaccacactcttcatgttgaatgtgatctagaggtcataacgaagactttacactacttagagcctagccttgtaccagcacaatatgtgtttctccatcctagacatacttggaatatacctagaaccgttaagtggcgggcctatgccttaaacttaacgccgtggtggcggacacgacgggaacccaccacatggcacaataccgttgtattggacacgcttagtcacctaaactaccacatcggggtaaataggaagctcctctgaattacacgaactcatacacaccggcctaccagaatggaaggctagtcctaaatcccatactagcacatgtggatgtacgaataactttaaatgggtgacacaagttcggtccttatggacttgggcaaacactccccctatcggtatgcaactaacaccatatgcacaccacttgccgtctaagtataaaatcacattttacacattttagttcgcaaatatccatcatattaattttattccagcaagggttcatgtatcaaaattcatattttaattatagatggaatgagcatttgcatatttctaagcatggctaagcaagtagttgcacatagagcatatataaacccatttgagcgcaaagagtgtactctaaccatttctaagggttcaaacagtaagaggatcaattattcaaggtggggtatgcagcaaataggtcataactaccttaacccaattttaaatatcgacatagtctaagttcacatgcaactttgcaaacaaatattttcattcctcaaatcatgggattcaatgtgttcaaaggatgggaggagaaaacttgccttgatcagagaaatgttagtacctaatccacttcttcaccaattatgtaattatctagataaaggacacgttatgcaattaaacaccgaaagagctaaaaatctaaaatactctaaaatgcatgatttatgcacagtgggttggtactgatctaaaatgaatttaggtgaaagaattactattttatcttattccattagggagttatgaattttagaagttttatcggtttatagtagtatagtcttatgtagtgttataaaatacttttgtaaagtgatttttattatattagacttcacaggggtgtagaggtgtgttttctaagactaatgcatttggtttcacaatttttggagttataatgattttcttatagattttacaagttacaacgtgttttaggcatatagtgttttatatgtgcatgactctcaagttgtagtttcagaacatgctacttcctatttaagttgaataaaaggaataatttggttaactaaaacatttttagttcatatgtttatggtctttactactatggttcatattttataaactagagatgctctaatctaaactagcaatatattatattaacctagaaattggtatatgagctaagttcttctaagttttagtggatggaaatgaaactatatatggcttcactggtcaatcaagtttttatttaggtttaattagacctaaagtgtatatatacttatacatgtttatgtattacttcaacaacactatgtgtttaaattcttatttcactaaattaaggttttgatctatgttctctacaataggtgccaaattttattttactatgttgaagctaactatttgctggttctatagaaactttgttcatttcatttggactaaaaatgaattttctacaagttttacaaattaaaggctgctctatattagcaaatcattatatgaatatttagagacttttactacacagtaagtatataatcttatttcataacatggaaatacatgttttgatgatcctacagaacttaaatttactcaaattgaagctaaattgggttctacatgaatttctaaagtttagcttatctaaactaatcattctagagataatagttttagaggcatttgatgcaaagtaagtaattacttttatttcacctaatcagagagtgcataatgatgaatctgtagaattttattttgtttcaaaatgagttgagatgaattttctacgtattttataagtttgtacatgttttatgtatgacctatcttagataaattttagagacattatttgtacagtgagtgtcaagttttatatttctaaaatagagttcataactttaagaatctacagcaactggaataatctcaaaatgagttacatttgattttatatggattttacaagtttgggtgttttcctgttaaacatttaatgttttagttatttttcctttgcattttcagatttttatacacatgggtccactgatcggtggctgaaccaatatacaaaaaggtccctgggctttatatgaaacgcatttaggtccgtgggtccacatgtaaacgactgaagttttatagtttgaaccctatatttttgatcatttacaggacaaagtcctcatcttcaacctccagcagcccgatggactgggagcttggccatggctttggcgagctcgtcggcgacgattggtggctcgattgggaatgaggtcaaaagataaaatgaagagaatgctctcacgattccattcctctagttttgttggctaggagacatcggagtagcgccgatagtgagggtgagcggaaggtatacatgagctgttactgcatgttgcctaggggctttgattttgctagatgcatccatgcatgtgtttcctaagaggtccaggaggctcaccaagctgtaggaagaaatctccgaagcttggatagcagcggcttcagttggaacggttcgacggcgacgctcctcctcgggtgaacggcgacggctcaaacgggacgacgagctgctaaaggaaggcatgcacgagggttgtgaggtcaaggagatggtgtatgcgcgaggaatcgaacaatggctcaccgaggcagtggtaatcgacgatgacggtggaggcgagttcggatcggcgtcgaggaagaaaaggatgtgttctccgtgttcttgatgtttccggctggggttcttgaggcgtcttgaagaggtggtcgaggcgagattcttggcacagcggcttgcttcgggatggacgagaatggccggacgacaacgatgtctaagcggcggcgctccggtgcgtgctccagggcgtcgttggcgtggtcacgttccggtggctgtgatgcacaaaactggaggtggtcaacagagaagtggtttggtattgtgtggagagatgggaacgcgaaagagatagaggtgaccttgactcaaacggagatggcgatagtcgtcacctccatggccggtggtgaggtcgctagtgacggagaggcggaggacctaattagtatgtaattataatataagtaggatatatattatgatatgtagttagtatgtaattataatacaggtatgatataattatggtgtaactaccatgtcgtcatatagatacatgaaaaaaccgatgctaattaaaaaaggcaagggattaacgataaaaaggtaagctgcaacctcaccagtaacgaaatcaagcatttatcccacggtacattaaacagatccaactattttcagcccaaaaaagatactacacatatacgataatactgcgcccaacagtaggggagaaaaatcagacgctgcatgtgcctgctactgcatgcaaagaccgataatactgataatactaggcgtcaggcgcccgacgggaggggagaaaaatcggacgttgcgtatgtctgtcaactgcatgcaaagactaataatactgggcgtcgggcgcccgacgagagaggagaaaaattggacgctgcgtgtgcctgccactacatacaaagactctctcctcacatgctcccttctcttatttcttcaaaagattttttttctcataaattatttatctaatctacgatctgattgcaccactaaattcgttacaattaaatctttacaacaaaaccacatatgattatattcgacaaaaaaatatttttgcttttttattgatattttttttatgttgcatatggtctcttttgatgtttcaaccagtagttttacgatctttcagctagtgtactcatgatgtttcactatgtacggatcaaatgttgcagtg

SEQ ID NO: 10714 - DNA, 4059 bp, Oryza sativa
ccgtcctgttgaacaacggcgccagccactctggcgccccaaaaaggaccatttttgggataagtttttctaggggtctacttgcgaaataagttttttaaaaggaccaaaatgtgaaaaatccagccctttttaatgtactgttgtctctcggagcctatattcactgtagctttttataaaattttaaaagataagcattattggctccctctaataataaataaaatttattgattccgcctccgctagtatccttaaacacccaaaccgcatatattgatttccaggcttccagcatgacataattgctactccctctaggttataagatgttttcacttaggtcaaagtcatataaggtggacacgaagctctccaaagatataagcactatcagatcatcatatcaatatacatccggtggatacaatccttaaacatgagtatggtattacctctcattgagaggacctcaacctgtctaaatccttgttttcgcatccatccaattttacatcttgtgtgctacccttttttattattgtcgatttccagaatcaataatatgcttcagtggggaggcagcccatgcatattttcactaactagccaccaatctgtgttgagttgcctcgacacagttagcgaaccaaatttggatatgcatgtatagatggccaaatagaccgcttggctcggcacaacccaagtacgaccgggcccgggtctaggtcagtcgggctagcaaggccccacctacacgacgggccaggaagtgcctaccactggctgcaccaatgacccaggcacggctcaataagacttgggacgtgctgggccggcccgaaggcacaatagcccgttgtgcttctctgtataataattttatttttccttcctcatatctttgggttgtgtctaacatagcaagaataagtctattttgcatccttgtctttgggacatgcctcatatgcctaaattaagtatattttggatccctcaattatttttctttgaccgtgtcgtgccaggccagtccactctgccaaggcatcggcccagtgtcacgcccagaaatttagtcctaaatttccagactattttgtgtattaaatccctgtccaggactagccagggtacacaaaacgacaagtaataaacagatccaaacgtaaataaagcgtaaaatactcacagaagaggcacttagtcctcacatcgaaagagaacgacagcagcggaaaaagacgatcctagcgaggcttcagctccactccacaggcaaaactcaactggggtatgagccttggtcctctaacttcgtcttcagctcagaagcactacacttctgaaaagggggaataatagcaaggctgagtacaaccaccatactcagcaagccacaccaatgatgcagacgtgcaaggggaacacaaggacagtttgtggctatttgcataaaggtggttgtaaaacattttattaagcaaaacagtaaaacagttgagtgattaaagtaacattaaatctccactgatcaacgctacactacgttgaacatgcccaaccaacccacctgaactacagtgcattgagtcgatttattaagggtgagactaatcacggtgaatctggtcgatcgcccataaccgcggacacggctattcgaatagttttactttggccagaggtgcacaactgtacccacaagacataatccaccggcatgtcaccgcgtcatcatgcgcccatgatgaacacatcaccatgtcgagtgattttgacaagacccttcatataaccctcccctaactatccacaccacgctaaggtttcaccctcactcctcgcaaggcagcgggcagtcccctcgtgcgccgcggtgaatccggcagctggacaaccggacaccccggccgacccaactccatcacacccaccctcgccaccggtgcctaggaaagggtcgagctatactttagatcaagcagttacccactcccgcttgtggcaagcgctgtatgttttccagggtttcccatgaaccggtccttaattgccatgggtgtaaccagcaaaaccatacacccacagcccaccattcagtcacattttagttggataattacgcccaatgaaacatagtcgggtgtctcgagcacacagctcgttctgatactaaaaaggtctaatactgcaattatcccatcaactgagctagtggtaattaagcatggctaagcatatagttctagctaggtcacataagtaacacaagctagtcgatttgttacccaaggttgacaaaagacatatatcaagtaaacatggcacaagagagcagatcggtaaaccctgatcccatgtaattagcaaaacatgcatatttatttacaaacggtaaaacatttataaattgggatcaacatgctcaaggggaatgtgtgacttgccttgcttcttcacttggatcttctgaactcttttcctcgtgaccgcagacttccgaaacggcggaaactacacgctggcacgcaaaacgaggaaaacactaataaaaccaaggaaacagtacataacaaacatgtagatcttaaatttagatgaattttgcaagttgaatggcccaattcagagttcgaatgaattagataggaattttagaaattttgagccatttatatgaatttctagaattattactgatttatcgtgcaattattaattattttcttgaaggaaaagattaagcgctgacgtcatcaaagaggccggcgccgacaggcgggccccacacgtcagcgagacaaggaggtggtccaccgtggaccgggaccacaaggacggtccaccgccggtccacgggttggacggcctagatcggccaagccgatcgggtggctaagagggaggcagccggctggcacatgaccaccggctggcagcagccggcgacggcgcggggagcagcggcgcacgcgggcggtggcggcgcacgtgagggaacggcggcgcggcgcggcaaggggaggcggcagccggctgcctggcacagccggcagcggcacgggcgcggagcacggcagtggcgactcggcagcgacggcgcgtcgcgaggcggccagcgaaggagagatagagggagagggagggatgctcaccgagctcatgcaacggcgagaaggtgacgggaaggcggccgacggcgaggaacagcgacagcaggctccttgggagggcggcgcggtggagcttcggcaaccaccggcgaacgtggaggggtggccgggcttgctcgagacctgctgaaagtggaggagggggagatatggcctgaggcggcgggaatcaccggccggagaaggtagagatggagaagctcaccggtgctctggattccgacggcgaggagtggcggccgagggtctcctcatccttgcgaagtcgagggaggcgacggcacagtgcggggtcggccagagaggcggtgcggtgtggctgtagttggcgacgagggcggagagagatggtgaacgtggcggcggcgtttcggcaatagattggggaagaggagcgatagacggggtgcggtgaggcgtggcggcgctgtgggtggcggcggcatggccgggcaaagcgacgctcgccggcgggaggcagctggaggcggcagtggctcgggtcggcggtggaagcggcgctacggcgaggcttcggggaggacgaatggatgccagggtgcagtgcggcgtgacgaagctagtggtggcagcggagcagtgcggcgacagcgggaacggcgggaagcggtggctagaggcacggcggcgagcggcggagcgcaggcttgagcggggagcacgggagagggtgcgaggagctcggggaggagggggaaacggaagacgagagcacgagggtgctttatatagggctcggggatggagatcgtggctgggagagacgggatcggccggcgacgtgaggaggcgaagtggagctcgtggggaggtcaaaccggcgccgtttcttgcggagtgagtgggggaaata

SEQ ID NO: 10715 - DNA, 7795 bp, Oryza sativa
cctgtctcaactctcaagattggtggtcgaatgagtgtctctttacttgattagatgctgatttgcccaacaagtttggatttttttttttcttttctcactgttttgtcagctcgattcgtgcaggtagctaagcttttctcgtttcttgagcaatggctgttggaagcagttcagtactagtttcctatggttgatttgtactgttattttccccccttctgaatttgatctgggtaaagtagtagtaaagtgagtagaatagttcctttctctctctctctctagttaccagttgcttcccttttggatgcttttttatgtgattctgaaaacaaaaaagcttggaatctttgatgtgctctcaagctctttgcccaaatgatggctgctagagcttgcagtggcaacatagcttttgctttgtttgcttcccctcacttcccgttacagttcttgtcagctttttccccttccttgagagttgaacatttaagcaaattattcttcctttctcatgctagtataatttgctggtcaaaacattgttggttctttgataatgtttttcagatgaacacctcttaatggtttttaaaaaatatttcttatttacacctttttttcttggggtttttttaaatgttcatgtctaaccattaagcagcacaatatttgagttacgcagtggcttcgtcttaacctgctatacttcttgattatcatttctgccgggctgtaatggaatagatgcttgttctgttgacagtgtattgggacttcagattttgagtgacatgagtgtatttacggttttctatctggctatagtttgctaaattattttcacaaaacaaaaaagaggtgtgttcgcaaggttagcatactatactatatctctgtcacatcataatcttgaataaatccaattgtcttctagtggcatgttccaatcgtcatagttatttagcgatcttatgctgctcaatttcttctattaaaatttctagtcttttgtttgtgaatgcatatatagtcgattagagacaacacttttttccatttagcaagcttattatctttataaaaaaaaaccatgcatattgaagcacctctctgttgctggacaaatgttttaagctcttttactacaactagtgcagatatcttttattaaaaaaaaatgccaacaagatattgaacattgtgtttccagactcaagaggtacactgtttttctaagcagagagaagcaccttgctgtgtagcgttttacttatttagtctatgtttcatcttgttgaaaattttcaggtttaacattttgttagatagcaataagctgttgtctttatcaacatatagcggtgtacacaagttattacatgttagggctaatatagatcagttgagattgaccgtatacatcatgcttaggtttcaaatatctgttctgatgaagaaaactctgacaaatgattctgaaggataaatgatggaggatatttggtagtcaaagtattcaatgcagatgtttttttttctttgccataagcccataacaagaaaatacactaaatatatgaccttccttcttacttgtaaagaattagaagctgaatcatgtttgtttattgatgtttccgaatcaattggacattgccttctggggtgccaagttgaaagttcatctcttcacgtacttcttacatagggatgctcagttggaataatagctggcattcaagttcaacagaaaatagaacaatggagagggaaattgtggcctcatatgaacccaagaagaataacgaaatcaggatgtttgagagttcagacgagatggcaacagatctggctgagtatatttcacaagtttcagaaatttctattaaggaaagaggttactttgctattgccctgtctggagggcctcttatcagttttatgcggtaacactgcttccattagcttcactaactaatatttcagttcgcgttttccagtatgtgtgccttcaagattctgtacctaaattgctttttttttccttcaaacaggaaactttgtgaagcaccatacaacaaaaccctggattggtctaaatggtacatcttctgggctgatgaacgtgcggtggctaagaaccatgtggatagctactataaatcaacaaaagaagattttctctccaaggtatatcagcttaagaagtactccatatgctaaagtaatctagggtgcttgtatagtccatccttttgtttatcggtttctttgtttcaccaatctgagttaattattgtgcgtgtgtactgatacacatgccactataacaagaaaaacaaaggatttttagatgagaatctgtggaagtttatatctgttaatctgaactatgcttgtcccctggttcaaaactctgtgcagttgaggccggagatgtaatccatttccattatctaaaaaaattgcagttgcatcaaatacattttgataagcaataatgaaaccaatacatgtgctctgatctggtaatctggtactgcaatctgatcggaaaacatagatgcaatattatttaatccaaaagtaaatgctttgtttacacaatggtttccgagcaatattttttgtttgacttgggatgtggtctggtctgtgcagatcatgcaaaatccttttctcaataattaacccgcattaaggctacattcggcctaccaacagttgtagttcttccaactactctgggggtgccagctgcatgcctaccacatatttgcttatcttctcattactatatccagcagatgttatccgattgaagagcttatccaaatgagtgtgcattattggtacaggaaaatatcttgtcagttgaaccacactggtatataccagttatatggttcttggtttggaaatcttacactcatagtgaagtttaaagagcttacaacacagttttagatttcatatctatactgtatctgcttgccatcctgtcatattgttaaaagtttatctacctgaacttttaacaaaggatcatttgctcaattgcacatcaaagccttagataagttggcgcatttgttggttttgtcataattaatgtaaaaaagaaggatgttgcaaggtctctctatgttttggttctacaaatcactggtggcattaacattaggttttatgttaagtattttacttcacaaacttacagctttgttggaagtacgatgtagctgtgacttgttaattaatataaggcactccaaggtttcttttgagtgaaccatgaatttgttacatctgaattgggttttgtaggtgcctattcttaatggtcacgtctactccatcaatgacaatgtgacggtggaggatgcagcgacggactacgaattcgtcatccgtcagctggtcaagattcgcacagtcggagtttcagagagcaacgactgccccaagtttgatctgatcctccttagcatcggctctgatggtcatgtagcctcattgttccccaaccatcctgcacttgagctcaaggacgactgggtcacctacatcaccgactctccggtgccgccaccggagaggatcaccttcacccttcccgtgataaactcggcatcgaacatcgccgtagtggccaccggagaagacaaggcaaaggctgtgtattttgccatctctgacggtacagagggtcctgatgctccatcaattcctgcaagaatggttcagccaacggacggtaagttggtttggtttttggacaaggcgagtgcctcgtttcttgaggccaagaccaagaacgatgggtatgagcatccaaagtattagcgacttggcattccctttttgctgcctatgaagagttgagttgatcatgtagtagttgatggtttttgatggaagatgctttcctccattaccttggtagtaagcagttcaggtgctcgttttgaaggtacttggatctgagaatatgaaaatatccgtgtctttttggagttgaccatggcgcatgggtaatagagatgtaatctgtactttattttgagaactcacagaagttactgagagtagctaagttcaaatattggccgaatatgttagcgatgcttggtgtgcactctattatatgtgagtttaagttgcattcttttgctctgattgttcttttgcatggcagaactagcaatgttcatcagagcatatttggattggctgaactctggcgataactcagattaagctgctcgttgtctctatgtttcctcaatgaggaaaaggaaattaagtgtatttaaaaaaaacagtgtacgttgtagtatcttttaggaaatagcacaatacatacttttttgcttaactaaaaaccggtggtggaaagaaaagttaaggcctgtacttgaatgctgtttgctgtattacactgatgttacagtaagaaattaaaatgtgtcgggcacctctagatttaaggctgggtttatgaggtgggacctccccgcacggaaaatggtgttacttattaatatgtgattaattaagtgttagtttagaaaaacttgataaatgaattaatataatttttaaagcgacttttctataaaaaaaatctaaaaaaatacaccataatagtttaaaaagtgtgcgtgtagaaaaagaaaaggaaaaagtgcaccaaaggtctctcaacttgtcatcggaataaaaaacgttctcaaaccacaaaaccagatacgcggggtcccttaactatacaaaaccggtcacccgaggtccttcggtggttttgaccccggttttggtctacgtggcggctgagtgagcgtgggaccctgcataggacccatgtgtcggcgtgccacgtcatctctgtctttccctttcttttttctcaactttttttacttctctttgcgagcgcgcggcggccggcgggcatggtggtcgtcggcgtcctcctcggctcctcctcctccacggccggatccagccgcggcgcggtgtccggcgtcctcctcctcctccgccgccggatcgacggtgtgccccgcttctccctgcctcgccatccgccgggacgacgccacgacgggatgacccgcaacctccacggccacctcttgcgcggccgcgacctccgtgtcggcctcgccgaccaccccagcaacaggcccctggaggacggggtggcggaaggggcggcgctggaggaggagccggagccgatggagacgacgaggaggtcgtcgacgccggcggcgagggggaactcctacttgttgtggaggacttgggtgatggcggcggcggtggggttgcccatggccgccaccccggccgacgccgcggcgatggccgtgcgcccgtcgacggagcggacggctgtggcggtggccccgccggcgcacgtcgcggcgcagacgtcgcggaggcggaaggcgaagcagcggcgcgacggtgtcacgcagcgtggcgtcgccgaacacccgctgcagcgacgacctctccaccgacccacgccggaacagcgccgccacccacctcccccctccaccgccgcgccaccctcccttcccgaggctcgccgccacgaacgccagtgcgactgccgccgtgtacctcggctgcccattgcccccttcaagtccgggttgcctctgctctgcgccatctcggccatgtcgccgccagtccccacgccaccgtgccctatgtcggccccgatccgccgcctcttgtagggatcggacccaatgttgccggccgcggccagctcctccttcttggcgagcatggcgcgcagcacgacgcccgggttggcgaggttggcggcgacggcgacggcgacggcggagccactggaggatccgccggggacactgccgggggcgcatgggttggtcggcgtgccgtcgcgcgcgttctccccatagatgctgcgttgttgcggccaagaaatagtggtgccgaggctgtggggccggcggcgagcgcagcgaggacgacgggggaagtggcggcggcgggcgcgtgggtcctcgcccagtccgggttgccgaacccggtgacgcggccggcgatgtcgaagctgcgaaacaaaaccaaatcaaagagtcagtcgtcgtcttcactgccgtgtgcttcattttgggggcagcgagagcgagcaagcatgagtaacatgtccttgatggcgaaggtgaggccgtgcagggggagttgctgcgacgacggcgattgcggcggcggcggcggcggcggcggcagcagcacgaacctctcactcggcggctaccgcttcgatcaccgctcgccgccgcccgtttcttgctactcccatgccgcaaagagaagtaaaaaaagaagagaaaaacgaaaggggaaagagagggatgacgtggcatgctgacatgtggggcccacgtgctttccacgctgactcagctgccacgtagtctaaaatcgaggtcaaaaccaccgaaggacctcgggtgaccggttttgtatagttaagagaccccgcgtatctggttttacggttcgaggacgttttttatcccgatgacaagttaagggaccttcggtgcactttttccagaaaaaaatggaagtgagttgggaaagaaggggaaagaacacaacgggcttgtttggtttggaaccaatttttgccctactaaaatcttagtagtgccaaaaccttggcaagttttggcactaccaaattgggtagtattgaatttaaactattgcgggcaaaatttggtagcaaaccaaacattcacttgctactattgaagttaccaaaattttagtaaggtaataagttggtatcaaaccaaacaagcccaacatcaaagcctgccaacggtttgaagtccagcccattcccagcccaaaccgcattagctatgtataataccacaaggcccaaatcatcccaatccattgagccggtgcctaacccagttttcaccactgtagatgcaaaataatttcacctcaactctaatatctgtctaaaccccaataaatagttatatttacagacaaagagagtactaactactctatttgtatttactgctgttgcattgcttggtatgatatttcccaatatgatcgggaatggcaaaggcaatatttcccaatcggatcgggaatggcaaagttttcactgtatattcactgtattattagcttctcttgtcagatcgggaatggtaaaggcaatttttgcatggtggtaaaatctcaaataatccatctttggagcttgttccccatggggaatggagggcgaggccttgacgataattttgccttttcaatacacccaagtcccgactatccatcctgaacatgcctatttccggcacaaatgacaaatgatgatctacattattaaactagtcaaataacttgcttatgtaatcacctcatctttccatttttccttctttttattgaagaaagtaaagaggaaagagaaaactgcattgtaagcctataaaatgatgaaatgaaatgaaaatcagtgtgccctttttacctggatttttcacattttggtccttttaaaaaacttatttcgcaaatagacccctgaaaaaacttatcccagaaatggtcctttttggggcgccagagtggctggcgccgtcatccaatgtctggcgccgtcctcctgccaccgtggcgcacgtgaaccgacgtggcaggaggagggcgccagactttggattgacggcgccagccactctggcgcccc

SEQ ID NO: 10716 - DNA, 1124 bp, Oryza sativa
ccccccccccccgaaattttttatttttgttttatttgtttgatatttttttcacgcttagggacacacaagaaccaaccatagaaaaattgaactcaaatgaacgtaatatgtgacatgtagaatttttcctctcctctcctctctccgaactagtgcagaggagagagatgtgcaacttttttatttttattttatttttttgatatttttttcacacttaggaactcacaggaaccaaccatgtaaaaaataaactcaaacggacgaaatatgtgacatatggaattttccaaagctccaccgaaaaacttctctcctcgacaacacaatcttgcaagcggaatttggaggttttaatatctccgaacccggcaaagctggggagaatcggatgtaactttttctgtagatgtccgtgcatatattatttgcctgattccgagtccgtatgagaaagttatgcctattttaatagatgatatattttgtccattttggtagagttttggaaaattctacatgtcacatattttatccgtttgagtttattttttatacggttggttcctatgttctcctaagtgtgaaaaaaatatcaaaaaaatgaaataaaaataaaaaaattgcatctctatgtactgtttaacttatatatgtcatttcatgtggttatattttgaattagattaagtaatttcatatagtggtagagtgcattatgtttaacatgctgatcaaagggttttactaaaagagttatggtctaattttagtgaaagtgcaaagtagactaagtggtatgctagatattttcagacttagctaagtggtagttcgagtttaaattttttttttgtggttggttgtatcgtgatcttgagtatgaaaaaacatccgaaaaaataaaataaaaatgacaccgttgcaactccatacagagaaacaggaatggaggcggcggcgccagccatgctggcgccctccttcctggggcggcgccagcatggctggcgccgccgcctccattcctgtttctctgtatggagttgcaacggtgtcatccttattttattttttcggatgttctttcatactcaagatcacgatacagccaaccacaa

SEQ ID NO: 10717 - DNA, 707 bp, Oryza sativa
gctatggatgaaacccgtgcggagactgtgttagcagctcaagatcgtgaagatcggaatcgtggtaagatttgcaagctagaagacaaggtggatcgtttggagaaggaactagccgcattgaagggagaagcaccaccgcagaaggccaggattcatctcaccgcaaggaagagagctctatttgtccctcgctaccaattggcgccaaaggttcgtgtggtggagaaagaagttgccccaaccttagcagatcctccgatcatcatcataagtgatgatgaagaagaagaatccaagcgcacccattccaagattgagtgggtagcaactcaaatgatgaagacagcagaacgagccttcaatcgacctccgatgctcggaagaactagagtgacttgtcaaaccgttgtcttagatcgttgtgttagtttgcttgttttaagtttgcgtgtgtgtggctcgcatgtgatttacatcagtgggggggatgtaattgcatgtgtttttttgagtttgtttgctttcgagtgttaggtagttggtgagtttagtggtgtgggagtcttcagtttgtaataatgaaactcacttaagatcaataaaagttaaagtaattctcggtcctaagtagttttccccgatttctcttcttgtgctcctgtccatgccagatggtgctcactcgcagcaacgggaatggcccc

SEQ ID NO: 10718 - DNA, 1391 bp, Oryza sativa
  unsure (1)..(1391): unsure at all n locations
aagacattgttagacccgcccataaccgcgggcacggctattcgaatagttttactctgccagaggtgtaccactgtaccccaagacacagccccacaacatgtcaccatgtgcctcaataccaccacagtacctcggaaaggagctgtgacaatacccttcgcacaacacaatccaccacagggcacctttcctggatcataatcacccccttataaacaaggcatggactccccagcaacccccgtgggcttatctccgccacttctcagtctggtgctccgcaatgaaccatgctatacaaaaggtaaagccgttgcccacgctggcttgtggttggcacggttaatgtttcacaaccgaaactcgtgaaccggtccttaattgtcatgagcacgaccatcaaaaccatgtgctcacaacccaccattatcaggttttagttggcacattaattaattaactaatcacgattgaccatcgtgaactatcaataagccatcatgaaataatagtgaatcataagttattcccaatagtgaatcataagttatcccaatagagacttgaaccaactaaatcggagctaagatgaattagttatgaatttttaaagattaaatcggattaaaacacttatatcggtttaaattgaattatgacgcaataatgaattatttttgaaaaggaaaagaaggtttattgcgtcagcgggctagggtttcggtggaccgggcgcacgggcggcggttcacgcgaacggatcggcgagatcgatccaatccaaaacggacggccgagatcgaacggtccacgaccggctcacggcggacgaccccgatgacgtcagcgacaacttcagcgatgacgtcagccaccgcggcgactcgggtgggttcggccccccatgctcccggcgaacgacggctctacgacccgaacggagggcaccaacgggtatagggcgacaaggcaaacttcccggtgaccaaaccggcggcggaagacaaccgacggcgcctgcactaggaaaaaacggcggcgaagatcgggtcgacggcggcgacggtgctcccgcggtcttcggcggcggtgaaccaacagacgatgaccgcgacgacttggcgatcccgacggtggcctttccgagtgacgacgacgacctaagcgacggcggcgcaccgctggaccaacggtggcatggcggcgccnaagctcacggggctagggcgctacacatggcgagagaccaaggccagggatgcggccggtagaggagacaccgggggtccttttaaaggggctaacaggcggcggctaaggcccatggcggccggccgcgagaaggaaacttcgggttccgggagagagagaggaatcccattcgatct

SEQ ID NO: 10719 - DNA, 1268 bp, Oryza sativa
acccgtcgccacctttgctttcgcctctcgccatcggaagagccctagcgccgtgtaacctcgagccgccgtcgtcgccgtcggtccagccgtgcttcgccgtcgctccagccgtcgccgtcgctcggggaggtcgccatcgtggtcgccaagtcaccgccgttctcgtccgcccctccgccgtcgctgttgaccgccggagcaccgtcgccgtcgtcaagccgaaggtcgccgccgcttcttcctcgacgccgtcgccgtccgttgattttccaccgttgctttggtcgccggtgagttcgtcgtgcagtccgctacccgtgggtgccctccgttcgcgccgccgcgccgtcgttcgcggcgagcgtgtgcgcccgagctgccgagtcgccgagccgccgccggaggtgacgtcaccgctgacgtcatcgtcgtcgtctctcgtgagccgccttagacccgatcgatctcggccgtccgttttggatggatcgatcttggccgtttcgtttccccgtgaacccgttgccgtgttgcccggtccaccgcaaaacccttagccgctgacgcaataaatcccttttccttttcaaaaataattcattattgcgtcataattcaattaaaatccatataagtgttttaatctgatttaatcttcaaaaattcataactaattcatcttagctcggatttagttggttcaagtctctaaatttttctaaaattgagatctacatgttaaaaatatccacatgtactgttcatgcttgtttatgtgctattttggtgattttgctcctttttgtttagattccgacgtttccggagagtctgttttcgcaggagaagaatttgaagagttccaaggccagcaaggcaagtcacacagatcccaaacaaccctttgagcatgctgaacctgtttaaagctattgatttatttcaacttatgcattgttttctgtcacgcccggaatttctatccaaaattccaaacgctttcatgtgtgtgaaccctcgtccaggaatcagccgaggcacacaataacaaattgataatagagtacaattattactctaattaataagcgtataaaatgtcattacagaggtagatagttcctctcaatcaataaagatctaagcagcggaaaataagataaacggcgcagacgactccactccacaggcagcttgaccaaggctacacctaatccttcacaccatcagcatcattgtagaactcttcctctgatgaatgattg

SEQ ID NO: 10720 - DNA, 1361 bp, Oryza sativa
gctgagacatacagcaacaacggctcctgcgggtgtggtgaggctaaaaccggcggctcgggtgaggagttgtttgagatcttcgaaggccttctgtgcttcgggtccccattggaaattatctgttttcttcagtagcttgaagaagggcatcccccgctcgccaagtcttgaaacgaatcggctgagcgccgccatgcatccagtcagcttctgaacatctttctgggtgcttggcggtttcatgttgaggatagcggtaactttctccgggttggcttggacgcccctatgagacaccataaaaccaagcagcttccctgacggtactccgaaggtgtatttttcagggtttaatttcatcctgaaggcgcggatgctcgcgaaggtttcttctagatccgagatcagatcatccttttgtttggtcttgacgactacatcatccacataggcttcaacgttgcggccgatctgtgttgaaaagcatctctggatcatgcgctgataggttgctcctgcgttttttaatccaaacggcatggtgacgtagcagtatgccccaaaaggcgtgatgaatgaagtcttcaagcagtcggattcggattccttcagtcggatctgatgataccccgagtagcaatccagaaaactaagaagctcgcagccggcggttgagtcaactacctggtcaatgcgaggcaacccaaaaggatctttagggcaagacttgttgaggtcagtataatcaacacacatgcgccattgccccgttttcttccgaactagaaccgggtttgccagccagtcgggatgatggacttctttgatgaagcctgccgctaacagcttggttaattcctccttgatcgcgtcttcctgtcttgtgcgaatcggcggagtcgttgtttgataggcttggcatcttctttgacatgtaaggagtgctcaatcacctctctaggaataccgggcatatcagatggtttccacgcaaagatatctttattattctgaagaaaggtgatgagcgcgctttcctatttacaatctaactcggcgcctattacagcagttttagtaggattagaaggatctaggggaatcttcttagtcttggcttcgctttctccactttttgaagtcttggtagcgggcacttctccttcgctcgccgtggctgcagccagtcggatatcctctcgggcagacgccatctcgcgggtttgggccatgtcgcaactctccttgtcgcatgtgacggcttgcttgatgtcgctccgtagggataggactcctcggggaccaggcatcttcatcatcatgtaagtgtagtgcgggacggccatgaacttggctaa

SEQ ID NO: 10721 - DNA, 1211 bp, Oryza sativa
tggagaaagattaagctatgtgctttggatacatttttcggcgtcccacaacgtcgccgagtatgaggcgctccttcatggactgcgaattgcgatttccctagggataaagcgtctaatagttcgaggcgattcacagctggtcgtcaacaagttatgaaagagtggtcctgccttgacgacaacatgatggcatatcgacaagaggtacgcaaattggaagacaagttcgatggactcgagctcagtcacgttcttcgacacaataatgaagccgccgacagacttgccaattttggatccaagcgcgagacggcgccctcagatgttttcgtcgaacacctttatacaccgaccgtacctcataaagataccactcaagaagcagacactcgtgacatagctatggttgaagccgactggcgagagcccttcatacgatttttaacttctcaagagctccctcaagacaaagatgaagccgagcggatttcaaggcggagcaaactttacgttatgcacgaatctgagttatacaagaaaagcccttcaggatttctgcaacgctgcgtttctttagaggaagggagacaattgctgaaagacatacattctgggatatgcggaaaccatgctgccgcacgcaccattgtcggcaaagcttaccggcagggttttttttgcctactgcagtgtccgacgccgacaaaattgtgcgcacgtgcgaaggttgccagttttttgccagacaaattcatctaccagctcaagagttgcagaccatcccactgtcttggccgtttgcggtttgggggctcgacatggttggcccgtttaaaaaggcagtcggcggttacacgcacctctttgtggccattgacaaattctccaagtggattgaagctaaaccggttgtcacaatcacccagcagataacgctcgagacttcttcatcaacagtgtgcatagatttggagtgcccaatcggatcatcactgataatggcagacaattcactggcggagtttttcaagacttttgtgaggactttggaattaagatttgctatgcctcagtggcacatcccatgagcaatggacaggtggagcgagccaatggcatgatacttcaagggattaaagcacgtgtttttgaccggttaaaaccctatgccggtaaatgggtggaacagttaccatcagtactttggt

SEQ ID NO: 10722 - DNA, 745 bp, Oryza sativa
atatttttgttttggctcacatatatagttctataagtgtcaccgcttactcttgaccaaaaaagtattaactagaaagtgattgcacctttaatcgcgtctgtcctgcaattccttttacaacaccaagcggataacgaagggcttccaggacaggcccttgttcaatgtgaacctaaccaaaatagtaatgaaaaagaatggtaaatgctaaatttcttatatctgttatacacctagattaaaataatacagtcttgtatacctcgacataactcccgacagactccgggctgtaccttacttcaccaagagcattagcagtgccctcaagagaattcagctttaggacatcttgaactgtcgtgccactgaagaagttgaatgcaaaatatatactgaatcagcaaacaatttcaaaaaacagttcggttgatttatgcgaaaaaagacaacctcttgtcagatacttgtaaaattgattcaggtagtgtaccagctacagcggcgcttcccagaaaagttgtttggaatctaacaccctcctcatcgctgaatgcaatcacctgaggtttaccaggcaaccgtgaggcccaacagctttatgaattatagatatcagaataaggtataggttcttctctacataagcagggaaacagccaactgagtaaagagacattatataatggattcatcctggattaaatatgtctatatctgtagtctttctgataatctattg

SEQ ID NO: 10723 - DNA, 950 bp, Oryza sativa
aattttcatcgttttatttttttgctgctcagaagaagatcatcgtcaaaacatgtcgctcatttcgaagctgcggttgatcactgtggatgtcaccggtactctgcttgcctacaaagggcagcttggtgattactactgtatggcagctaaggctgctgggaagccatgtcctgactaccagcgaatgcatgagggcttcaagcttgcatacaccgagatggcaaggcaatacccatgctttggatttgcagcgaagatgccgaatatcgactggtggaggatgtgcgtcaaggattcttttgttaaggtgatgccactgttttgtaggtctgaagcttttcaggaactagtgatgtctttgtgttcagaggctaagtgcttcggttgcttgatatgtgctgtcttgtaggctggttatgagtatgacgaggagacatttgagaagattttcaaacggatttactcttcttttggctcgtctgctccgtactcggtattccctgatgcgcagcccttcatgaggtggcttcgcgggaaggggctcacggttggaattgtcagcaacgcagaataccgttacaaagacgtcatcttgcctgctctaggactgaaccaggttcgatattctccgcataacaaattacacctcatgctcctctaatgttatcatcttcacaagtaaatgttgtggttcatgacttctcttgatttttttttaaccagggctccgagtgggactttggggtgttctctggaatagttggtgtggagaagccagatccaagtatctacaggattgcactggaaatggcgggcaaggtcgcgccagaagaggcgcttcacataggcgacagcatgcgcaaggactacacccctgcacggagcatcggaatgcacgcgttgcttctggaccgattcaagaccgccgatgctgagagctggaggaa

SEQ ID NO: 10724 - DNA, 20339 bp, Oryza sativa
agtggtgaagcaattttgggcttgtttttttgaaagaggaattttgggcttgttagctagctttttcctaggagtaagcttcttggattgctagcaaaaaggtcatttcaagtttccctgctgacatggcacactaattagggagaaaatctctctcttgtagtgtttgtgtaaaaaaaatctaagagtggcatatggatagtggcactccggaagagtggcaaatagttaaaacccccaaaacaaattatagattccgtctgtaaactgcgagatgaatttattaagcctaattaatccatcattagtaaatgtttactgtagcatcacattgtcaaatcatggcgtaattaggcaaaagattcgtcttgcgattttacatgcaaacggtgcaattggtttttttctgtccacatttaatgctccatacatgtgtccaaacatttgacgtgacggaaaagttggaagtttgaagaaaaaaattttgaatctaaacacagcctttagcttctaccaaaccgagctgaagtccaagcgtccaactttggtcactcgttcctcggtctaatccaggggcgagcggtgtgttgtggaggtcgtgacctcatttcatcgtcctaccgcgctcgccctcgccctcccgctcccgcgtgcatgagtgagtgagcacattgtcgtttttcctagcctccgtgtcatcgtcgagctcatcccatgggagagaggggagatccagcaagccgccactgccgcctgaggctggatccagcaagccccgccgtcaatccgcttggcgacacagtcgctgctttggccgcctctctgcccggtcgcgccgacgagacggacacgccaacattgctagatccgtctcgagctccttgccatccacgcacgcacgtggtgccgagctcgttgtcgcttcgatccgccattctgtcgctcaatttccgacggcgccccgacgaggaaggtggagggagagccacaccaacgggcaacggttggggggagggaaagtggtgaagggggagaggggtgccgatagtgggtggtaaggagagagggatgcggcagggtagccgaaggaggaggccgaagtagggaaaggataagggagaaaggagaggggggtattataatttttttctagattttagggtgttcggtgtaaattttggacctccacataaattgaaaaataaaatgagaactacaaaaataataggggataagctataaaattgaagccacttctaaagccactttgcagggaaagagcagtgttgctaccatctatgaggagactcacgaaaaagctatgtgccacataagctgaagaacgtataagaaactattcttacaatgcgagtggctttgactgggggctcgtctggcccattctcgcttgctttgcacgaggagcatacttggggcatgacagatacagacgtggaaaggatctcctagttggcatgttggggctgaatgccacctaggtgcattgtgaaagatatgaagaatcaagattttagatctgtaacctaaacctacgtggcactccgaagctcctcaaatgagtaggacacactatgaatgagctaatatggcactcagggtttaatactatgactggctttcctttacccaaaggcggtaatcatctctcacccactaatgcgtggggctatggtttagctaagacagtggggccaccgatccggtggttgatctcctcaatcgtgccatgaggtggggcgggcggttgattttcacgtacgtccgactgggatttaaggcatgtttggttggtgccacatgttgctacacttgaggtaggttaatttgatcaaatatagctaggtttggtttgtttctacaattttagcatgccgcactttcttagatctcttttgatcccactagttatagacctttttcttaatcaaagtttgccacaagtgtggtcatcaattttggagccacaatttacattttgccacacctttgacacaaaattgtggcaaagtgaggtgggcatccaaacaggcccctaagtttgggaaatatactcgtgagatcagctatactactccaaatcattaaatttttaggtttttgtttaagaaaaaaaaatagtcttcaacattagccctaaacaaacttccgaaaatatttatccctacttgtgaagagcgagatttcagctcccaaccattaaggtcgtgcacgtcaggagaagaaggggccatacactggagtgcgaaaagagaatggatttatttggaagtttcttttatgtccacctcttttaaaagttaaattaggttgccggggagaatacttttatcccttaaattctattagaggttttttttttaaaaaaaaaagaattggagaaatagatttgtgtggtctgtttgtgatgctgataatacatcatttacacaagtaaataacttgacctaggtaacagaaacttttaagaagattgaatttatgagcagcttgggatttctatcaattgtctctcaaaaataagacttcatgaaagccaatgattatttcccatcaagcccatttggccttttctaagggaaataactcatcttctcactcctcacgctttatttccattggtttttatttgaggaataagttcatctaaggtcccttaacttgttaacgaatccgatttttatccttccatcgaaaaaacagatacaacgggttcctcaactatcgaaaccggtgcaatataggtcctatagcggtttgggcgacaattttagctgacatggcgcctacgtagctgaaagtgcatctaggcccttaatgtttttggtgattaattacaatgcgattagagatgactaacatttttatttaagcaaatgtgaaggttgttatgtcctcaatgagttagcgtaatgcatatcccgccgaatatgttgatgtgtgtgatgcggcaaatgagcaaatggtatattgtaccttttttctttcgtttgagtcaataggaatgccgtactattaagagggatgatgtattgacatatgaggagtgatcaaagtgctcaaaatcaatttttaaaaagtgtttctcctcagtttggtgtgttctggaaattttcggagttttccgaaagtcattttcggactttccgaaaatgcacagaaccaattttcgcttctggaaattttcggatatgtccgaaagacattttcggactttccgaaaatgactgtgaaggcaaatgtggttctgtttattttcggacttttccgaaattgattttcggagtttccgaaaaacttcagcaaaggcaaaaatcgcttctgtgtattttcggacttgtccgaaagtgattttcggacttttccgaaaacatccagaacgatgttttggtgctggaaattttcggacttatccgaaaaatttttggaatgtctgaaaaatctttcgttgactttgctattggtgctgagctggaatttttggacttgtccgaaaatctttcgtaatatccgaaaatctcaattattgtgcataacgggcagaatttgggctgtggctataaatagccccctcccctcacttgtgagcgcggctggttccattccaatcatttgtgcccttggcttgctctctctctagcacttttgaaccttgctttcttgtttcccctctcacccgtgtttgatttggatttggtgtgtgtgtgagagttgtggattccagtttgtgtgagtgcttgttgttgactttgtaaagatttgtgagcacttgcatcatctccgggagttctttgcttcatttgttactcttggaggttgaggactcctaggcggctaggtgtcactcccgagccactgatctacttgtggttggccgggagaagtttgtgaaggtcggatctcacctccgaaagggaagagatacccttagtagaaggagtgcttagtgcaacctcttgaggaaagggttagctaagacccggctcttagtgagctcctcaacggagagtagaatcccctcaaggattcgaacttcgggaacaacttcgtgagcttcatctttggtgactttacttcctctctctccactagctttgcttgtttgagccgctataggtctagtggctgtttgtgctagcatattcttgttgtaggcaactagatctaggatttactttgctatttgtgctgactccgaaaattttcggaaatatccgaaaattactgcttccgcttttaattgaatttttgaattagcctattcaccccccctctaggcctaattgacacttttagtagctaatttgactctgtcttcatctgatgtggcagtgatgcggtgcttacgggcaattttgatttggaaaataataaaaattgcaggcccacatgtcagttacacaaaaaaaatagtggggcctacgtggccccacatatcattctcacccatcctcttcttcctcctctctccccaactcccctttcttcatctctctctccctctcctctctccaggtgcaagtgaggaggggcagcacacgacggctgatgggagatgggaaaggaaggagtgacgcgcaatggctggcggaagacgagggttgcgcgatggcctatgaggctgaggagccgaccatgccgccgccccgctcgagctggatctattgcccgtctctaacttggtctgctcgctcaacatcgtcgacctcttgttggcgctcatgcacggcaaccaacttgtctcgttttgagccatggcggcagcaacctcatctccttttgagcggcgacggtgtggtcactgtgctcgaccggctccacctcgtctcctctccatcctatctttcgagtgacgtgggtggtggcgtcgccgtcactgagctcgatcgatatcatctgatctccttccggtgagcctcccccatgagctcgagctcaagatctcgattggcactgcctcctccctctccactctacccccgctcgttgtcctcctccctctccgcccggacgccacgcaccgcccctccttgtgagccatccaccgcgcaccacccctcctcacttgcgcctggagagaggagaggaagagagatatgaagaaagggaagttgggaagagaggagaaagaagaggaggggggtgagaatgacatgtgaggcccattttaaaattaattttttggtgtaactgacatgtgtgggcccataattttgagtattattttccaaatcaaattgccatgaaagcgccatgtcagtgccacatcatatgaagactgagtcaaattagccacgtagacgccacgtcagctaaaaccgccatccaaaccgccataggacctatattgcaacggctttgacaattgtgggaccagttgtatatggttttccggttgaaagacgaaaatcagattcattgacaagttagagcaaggcttataatacagccgacatgttggctataaggttctttatagacttctctcagcctacccatataatagttagctttttataattaatacgtagcccacttgtctgtctcacggagtttttttggttcttgtgtccaagccggctgtaagtttacagcccgcttctcctctctctcctctcttctctcctccacctcagcatttagctggcttataaccttctattatacttgctctaagggacctaagatgaacttattcctttatttgattcgtcgattttactttagctggagcaggatggcttgatgtgggccagacgaaactggcataggaatggtcgacaggccgagaacccagctcagtattcgcatcgccatccttcggaggattcttcggcggagttattttagtactcccaacacgggtgcggcctaccatggacgacctcgccgtcgtcagcttcgccgggggcctggagcccagccagaagccgccgacctccatgagtttcagttgccctgttcgtccatatacaggtcttgctcgcttgaatcctaccacgcttttctttctctctttggcttcagtttcagttggtgcgctactgaaatgctctggcgaaatgcgtattgagatgaatgcaaacgttccatggattaaggtggaaaaactgccaagaaatccaactgggttcaggttttcttgctttgcaactcggtgacagttttttttttggaggggagagaactttaggaattcgtagcggattttgatgtttttttaggcctgcagggattcagacttaggaggatcacttgtgcaagatgaatgggcctgaatgtccgatgactaaaaatatctcagcttggaagttggagagctcttctaatatgccaagttaatcaggtaagttgcagagctgcagtgccactgatggcacatgagcatttctgcatttgtttgttaaccaaatattgctcaatgtttcagttccttgcgttcctttgttggaacgaatagtggttgcactaaagggattttagacttagtttggtataagatgagaattttgtaggattacgattcacattatttgcgccttggtactgaaattgtaaaatcgagggttagggcaaaatttggtcactgctaaacattctaatgttaccaaatcccaactagacaaagacatcacatgttatctgtagtagtgcaagatgtgtctgacaggtggttcctgttattatgttgtctgaaatactgttgatctggttggagacttataacagatagcatctggtggtcatcctgaaaaaatataataaaatgtatgaagaaaatagaaatggatctttgtctgaccagggaacatcttcgagggaatctttggatatttttttttttggttggcaagatctcagtgttactgtttgcttgctcatgtagatatatatatgtcagttaactcatggattgtatagccagtttaaaacggttacatataccattagctaagcttcctaagaagcagaaatttggcctatatgctgatgaaagacagctgcctccttagcttccattgcgtcaggtgcaccttccctttgtctactccactaattatctcatcaataagatccttaaagatggatttttcaatggccaaaacaattccttgccgttcactgtcggagctcttccactctttcatgccttgcattgcatcctctgctagcctgctatcttcctcttcagagcaccttatcattgaggaccgagactggatcatgtcaatctctgcacataagtccttgaaaagttgccacccacttaacttctttgactgaaagaactgcactgatgaattcacagtgtggttggcatccatttgctgggcgaggagttcatttgcaagatcaaatatgagcctacggtgcagcttttcttcgtctggttttgcttgttcaaggatgaggaaaagctctggattaatcgggtagcttgatggtcgcagctgatgaggcatcatttgaaaatttagtttgttgtgtaggatccctgatgctgaaagtatctcgtagaggtactggtgatctttattggcagcaactgatgaaaaagtgtcatcggttttcagagcttcctcactcaacatttgcaagagctcaagcttttggatgagggctttcatgttttctgcctttatctggttgccatcgttgcttgcctttgaaggtggtgtatcagggaggcttgttgggttccaactctcatctgaagtatgcgtctcgccgtctgaacaagtgaaaaaaagaaagaaaagataagttgataattcttgtctatctgacattctgtctcatctataaaaatcaaaataattggtgggctcatctacataagtatgtctgcacattaaccaacatactatcatgttccttcgtggcaagtgcaacatgtggggttccttgtagatgttaggtgcagactgtagacatgaacaacagcaggcagctaaggaattgtactctctaacagtttggcacaagcaaacactcacatgtgtatctgcaactgtcaatttactgtgatccttccgatctgaaaggaccacaagctatgcttggtgcattggctactggttgcctgtcactatgattggtggatgtgcttacagctaagtatgcttgtcctatgcctaaccagtttgagcttccttagtggatggaaacaaagttacaaacagtataaaaactcaaaaagtttgcagaagaatagcttgccagaccaagtcctcacctttgaaggaatctgagattctcttcagagaaggcgatgacccctcatgataaaatgttgcatcaagaactgacacaggacttgggatgttctcctgtggatggatcttcttcttgtctgcaggtagaattgtaggcatttcctgggaaaaacaatgttttgtcaatcagttgttactgccagataatgttttcataacagtaaggtctttagaggtggtactacagttaattttctgtacctcacgattgggtgttgaagctattttgctttgatggatatatggtgagttggcattcagaggattcggatgatcaacgacacccacatcgatctgctttgccaaattgattttagtttcagggatgtgtaacacattatcgttgtcagagttgctctttgtttgcgagtgccttgatcttagcctgcctcttggggacactgtttctttagatttcttgcctggtgacgttggcaaaaccggtggaccacctcctttcagagtccgccttcttctgtgccagcctggggctcaatgagctggaaagccttggtgatcttgcagaatttacaggttcctcaccactggaatgagcactttcattcggagaatgatttctcttgctatcactgttttcattcttcctggtgaaagatgtctcttcatgccgtagtcttcttatgccttttggccttgaaaggggagcaaccaaagtatctgaagcatcaggttttgtgatgcatcttgctggtttcatgatcacaattggagactggaaattttcagaatcaactatttgttcagaggccttcttttgaatggctgttaattcaggattgttgtcgctctggcttgggccatcctttttgtgcagtgtgctcaatatcctgagagccctcagttccttgttgcattccgacaactctagacccctgagtcttctctgtatgtcagcatagatggatgcagttcttggcttcacttcagctgcacgtcctgttacagctctctcattctgtctccatggggctgcttcagggataattcttggagaaggattggttttcagtactggagagtgattcttctgcaccgggacactatgatcttggttcttgatcctttgacagtgtgacggctgatcaatttgcgtgccatggacaggtgtaggtgaccttgccgtctcatggatgtcaggagtagttccttccaaccccatgagcttggcaacgacgctgctggcccgctgatggctcggcgattcttggtgcttcagaacatccaggaggttgtcatcagttcttatgtagccagagttcttcagacgtgaacatggattcatggattcttttctgctgtccaaggacagcctgggaagctccttgagctttgctgaaggcttcttgctgtcttgcgcttcgaccgacctcaggagttgccgatcgtcgcatgagaagcgtggtggcctgctggattcatgaacatatccaggaacgccggtgctcctgtcgatcccaatcacgtaagttccatcggttgatttggagatcagcaacggccttggtgagtctttgtgcaatccttttctggactcctttgtcgacgtcttgatggtcataccatgggtttcccggttgatggactccttgacaatgtctctaaagccagtgtgtgggtctttggttttggcctctgtcttggaacatttcacactctttgtctgtgagcttcttggtggcttcccagcaaaacgctctttgttgatgtaggagagctcttgttgtattggtctgttgatgtctgtggacgagaacgaagagcacgatgaggaagaagaagatgcccgcgatgattccatggagaggctactgttctcggtcatacttttgctgaaggttttgtcctacacaagtaagtattatgttttgagtcaaaaaccagtctgtttgaggcagatgaactgcatacttgggatatatatttgtcatgcacagtacagtaggaaaattaccagagtgttgtttgaagcaactgggttttgaatcgagacattgctgttgctgtttggcaaaacatggcctaaagaaagtattcaggaaacagttattaatatgaactgtatttgggtataaaccaaaagaaagttaccgcagttaaattataaatatctaatttgatcgagggaaggaaaagatcaatatcataaagatatctgaattttaaaagttggatttgatcaagaacatatcactgaaatctattgatttgtttcagccaaagaataccaaatatctgaatagaaaaagcacttcactttactaccatttcatttttacttgactgattattcactgtgcaattgcccattactacaactcatatgtgctacatctacattcctgcagcttctgaacttgtgtcagtttcttgtccatgaccatgtacctccctataaatttcccctgttcttacttggcagcagcagtactttctaaacgaaacaattttttaatccctgttctagtttagcatctactgccagtaacactgttcatatctccacaggacagttagtattcagttttgtctttgtgataaactttggcagcaaaagagagagagagagagagagagagagagagagagagagagagaaagaagaagaagaagaagagctacacgaagagcacacgccgcagaagagtacagagaagaagaattggtatggtaccactacctggtggcgccgtgcctcgggctccgccgcgttgacgcgcggtgaggaggcggcggcggtcgaagatctggaacatgccggccatgcagcccatctgccggtcgaagtcggaagcctcctgcgcgaacgcctgcatcatccgggacggcatttcctttgccccaagctaagctctcggctcttgctgaacagctgaagacaacccccaagaatcggagatgaacgagaggcctcttcactccatggcagaaccaggctaagctagttctagcagcaagaacaccccaaccaaagagagcacgtagatgcaggctttacacagagctttcctttccttttctttttttttatcttctttcttctgttctattctctcacgctatcatctacttctctctctgtttgacaggttcagttgagaggaatggtgcttgtcaagaggaggagggagaggcagcagcttgatttaagaacgagaagatatgtgtgcaatggcattgcaaatgcattgcagcagcaacgacgactggtatggctggtcctacggaggccacagcaaatgagcaaatacaatactgtgcaaggcacatgtgggctgatcattgtgggcatgggcatgtgatgcctgtcaggcttttgcaccgtcgtcgtcgtcatcgcccgtcagatcagattcagcctagatcgatcagagcctgccactgccagtgttaaggaaggaatgcagacctgtccccgggtcccacattccgaccccggttatatatacaggtgagaatgattaaaacctcattccttaacattgatggagtgggaaaaaaatgatcataattttgttgggtttcataaattggatcatatgaccgagattagtagttgtcgaagttacatcctgaaaatttgcattcacgtccaaaatggcgtgttttccgtaaacagtgggaagtattactaacatgtataaatctgtaacccgaataaatatagattggttctaatctaagtatgctcatgtgcagaacaatgctagagcggttggtcaatctggtggttaagccattcaatcttcctgtgaagaagaagaaaaggggaagattggagacgaaggaagattcagctacatatccctggttccagagcggcgcgtgtggcagagagcatgtgccggttctacatatgagatatataatctaagcttgcttctggacgtggatcacgttagcagcaatccactacaccaccaccatgaactgtttgttttagctgcggtcagaacggccgggccatgctcaatgttcagacttctacggcctcagctgatcaccaccaaacgatgtggatgctctgcatgcccccacaggcaaccacccgaagatttgttactccgggttttgccgctccatgtggcactgacatgtgggtccttaaaggtgttacatgtgggtccttaaaggtattacaggtagtcggtggtagcgagacggtctgtttgattaggatgatggtggaaaagaaaaaaaagggatagatttgcttgaacgatgatgatagggtgtgtatgcctgggccctcgcatgtttgcggatgcaggagcatgcaaatggaaggttggcactatttttcggatgagttgtaagcgctgtacttgagcaatttgatgggtgagctgtgttagactgttaggcatctggtttttgcaaaaggacaacttgatcaacgtgctgtttgctgttcggtcatctgttgcaagagcaatttgatcagtgtaggccacgaggttaattcattctgcaattaatctctctctgtatggaaccactgttcagtcatctgtttactgtagatccccgtactactcactcattgtggcaccgcgtttgccacctcaatttgaggcgccatgtgtaatgtagctaagcctaattatacagctgggtccttgactcaatttgtaaatggctgccaaacaatcctatctctcagctggtttatcagatgaggtccatgagattcctcttgtagcctaggtggaccaaaagagctattcctcttgtacagtttactcctcttttcacattcatccacacatgcatcatgctctgacactgctgcatgaccctaactcctggaactctctgcaaagtgtatcaacactgacatcagaacagatcaaacatatctcaacatgtgagtacgtgaccttgctgttgacaaccaccttttctttttttttttcactttgcacacaattttcagtcaacataatatatgaaacaattctcgggaagtagttaacacaccatttgttcagtttaaaggattttcagcccatacaaatattaaaagtaaaggaataggaatggatgcacgtatcaatccatataattttttctaagaggtttgagcggatgtaaaattcccatgttttctctctacaacttgtaaaaaaggagaatttcctttggtttttctatagtttgtttctacaacccaaatgatacttatagaaattaatctttagaaattctaatactttgtttttcttctacaagtagaacacgctctgaatataccgaatgacactaatacaaattattctttagaaatttgaatactttgttttttctacatataaaatacactctaaacgggtcagcatcttgcgcattgggtactatataacatattggaattactcgtaatatagaagtaaacatagtcaaaagatactatgttttgttttggaacagagagggtagtagtacagtagcagtggcaagggttgcagtaccaaacttgaaggggatgcaggataaactgggaagtgatgaaggcagctactagatcagagcattcctgctggttccttctcaagaagctgcaaagaggggaccaagcaaaagacacagcgataaatggatagcaatttgtgtgttttgggggtagctagttgtactccagggaccagtgtaagcagatctggaggcatggatgttgttaggtgggttatactacctcacactgatggatgtatggatggatggattgctgctagtgctagctgtattttcttggacccctttgctgtggtggtggtcgtaagttggatttgcattgattaattagtggacgccttttatgtttcgatcgcctgtttgtgctttgtccgcctcaattgattaggattcctggatctgacactacaaaccatatatagtggttctttggtatatcaatatacttcatctctccattctataataagtttatttttaactccactcgttttgtttttaattaatcattgtatcagagtttgtgaaagcaggaaataaatatgttgggagtagataaagtataaaatagttatattgggatttgataaactgaagttattctgatatttttacatttcattgatatatatggaattcgtgaaaaatgaactcattttgaaacagagtggatttttttctttgcatttaattttattggaatgttcatttttaaccgtttggtaaatgtgcactttcgggtttcaacctggcgggagcagctcaatggcgtgccgcgtgccttgcaaccaaggaaacgcttttatggtcggttaagggtctcttttgaataaaaggtttaggaagaaattttataggattaaaattctagagaaaatgtttttatttacccttttatttaaaggattggagtttttcaaatcctataaaattactatgaaatgactcgttagatgtagatttttgaagaaactttgtaagaagtccaacctctttgaaaaattacttcaagtctatatctctcattcgattactgtgtttttcccgcggttcaatcaaacgattttttcctatattttgcaatcatccgttttacattggcattgtcagaattttgtatgtatttcctctatttcttagttttttcattcatatgattcaaaaaggtccctaagatcaataataagactcactaatatggtagtatggtgtaatgtaaatttcttttttacttcggattatgtgaaaaggcatatgtatatacatcggacatcactacacatatatacaccaaagaaatgggtgataaagttgaatatatatggcttcaccaaataaggttcaactaatcttagtacccacaattaattacgtatatgcgggtgtatgtattttcactgggaatttggtgaggttcacacggaattatcgctggcctttcttatttgaacgttaaaaggtgctctgaaacttttacccatcaggtaaatttagcgatagttttctgctaagtgtctgttgatccatttcgctcttttccatgagcgcagaatagaatttagttcttttgatagtattaattaatttctccttttttacaataaaaatcaattcaacatatattttgtttattcctttttttattgtggtttaaagaaattgtattgattacttcggaggaggtgggctgtgtgccgatatgatgacacaggcctaagatgtatactatactattccattataaaaaagaaggaatttcttccgggattaggttaaacacacacatggccttgtgccatccaatgttcaaactcatgagatatgacattttacatcacttccacattcttgataagataactcctagtgttaaatggttaatttaaaatacatcattaaatcctaaccatttattctctctctttgatttaaaactaacccttcactcattttcctatcccaatcctacttttcttatcacattatccaaacatagcaatattatgtaagttactggaatcttatgagatactattaatttgcatagccttatcggttgctcatattcactaataagccaaaatggtttattagagaataaaaattaatttatatttacaaattttatagatttttttatagggacttaaaagccaacgctaaaaaaaattgcgttgaaaatatcttaaaattaattttaaaattaagttcaaaaatttaaaatttggcttttgctttgatttatcaggccgagcgataatgctctttgttgttccacgtgaactagggccaaagaaaccacacaagtaaattagcagtgttctcagactatttgtttcaattaccgtgcccaattattccaatccataaattgcatgggtaagttaattcatattgttttgagactttggtctggtctgtcccttccaacacttacacagcttcgttgtttcgcttattcacttatccgaattacttattaacaaataaaaaattatttgtgagtaaaacttttatatacatgtccttaagaactcaaaagtaaatgttgtaaaagaaaatatgatagaaaaattttaaaaataaattcaaaattgagttctaaaatttaaattttggtttataagaataagcataagggaaacttaattatgagaccctagttgttatcaataaaatgttttgaaatgagatgaaaggcataagggaaactatgagaccctagttgttgtcgataaaatgttttgaaatgatatagaagtagccgaaatacagaagaaataaggccgtgtttagattcaaaattttttcgtcaaactttcaattatttcgtcacatcaaatatttggacatatacatggagcattgaatgtggacgaaaaaaaactaattacacagtttgcatttaaattacgagacgaatcttttgagcttaattacgcaatgatttgacaatgtgatgctacaataaatatttactaataacggattaattaggcttaataaattcatctcgcagtttacagacagaatctgtaatttattttattattagtctacgtttaatactttaaatgtgtatccatatacttaaaaaaatttggcacatgaactaaactcagcctaagcttgggaggtttcgtttaaaatgtcatctccacgtatctgtcctcctcgcttgcaagtcaacatatttttttggttttcgtttacacagagtacaagttgttacaccgagatgagattctacgacttgtcgcatttatttacgctttgcacgaaagtttatgtaatgtcaaacaaactttaattagacataatgctctaattaaatttccatctcaatgaatgggattctgatcttcccccttaaaaaaggtaaaccaatttagaccactgccaaaatgatgggcaaggttgggcttcgggccacgcccaataagcctaagcttaatgctaaggccctctttatttagatatagacttattaatttagacttttaagttagcttattaggtttatatgatttataagccggtggatttaatatcctaagtttaatagtcaagtcatgtatctatctcacataagtcaaaaaagcttctccaacttattttttggcttaatagtgttagaagggcttatagctttagaaaagccaaactaaaaagccgcttatttatttaagctcagatttttcgggggaatagttggcttataagcctaaaaacaagggcctaagacaaaaagtcaaaagagagcccgagcctaaccatcctagggttttgagatagggtgggttctcttagcttttttcaccgcctcaggccttattcgattaatccctataagggagtggttggaggagatttattctagtatataagttaaatgagtgtagccccatttaacctgggacatttaacattttgccacttttaagatgtgcgtaattactagtatttatcactcgttatctatgacatgctagctctcatgtgtctatgacaggtaggtccagtagtaaattttttatcaccactcgtaaaagtggcaaataattaatcattctattttatccgtttatcagcgatcgtaagagtaagagtggagctaaagaagactagtaccggtttatccgcttgtgcagaaggtgaaaatcatggggaagagatcttataataatatcgtcaacaatagaagagctaataattggctggaaatgtgctcataaattttagatcgctatattctctgcaaataaaacaaagaaaataaaccaatcgcggtccatcccttatctcctcagtttgtcgacacgtgtgtgtgtgtgcgtgtgccgactaaaaaccgctgcaagtcattgcactgcatgcaaatgtaacttggagaaacaattaatggatgccggggcattggccggtcgacgacaaggcttccatttatcctcaaattccgacgagaagatatagagatagagcgcatatgcatgttccgatacacatgcgaatggagcatgcatgtctttttcttctctttcagctagaggacatgcatgttggatagagagtactctagttagatgttgcagtcaatccatcagtcgctgccatgtgtgcagtgctaaagctagcatgcattatttaaacggtttttgaccgtttatatatatatatatatatatatatatatatatatatatatatatatatatatatattgaccgtttaaataagctactagctagcaactcgaccctagctatagctagggctccaggacagttgccgggggatcgaccggcagacacgcgtgatcggttgatcgatcgacgcgtgcgacgacgagatgacggcgaacaaagccaatctaacgttctccatcgcgtcggatggcgacagcctctttttccttcgctactttacccatcttatactactacagtaacctaaaatcgtatgtaacttattctaatactattaatagagagttttctatcaaattcattgtattatcataaagcacattcggttttagattgctatatattctgagacagagagaatccatattgttctctctctcatgtacttatggtataagattatagtcgtagtatgtactcctgtaccaatatatatgggggacatataaagaatacaaaacgtactctgtagaacgtaggagctggcaagcatgcgtgcatacaacatccgatcaatcggatggaaacatagggtataccgtacttatgtacatgcatgcatatataacacttagtgccggtcctgctactgtgtatcatcaacatctgtgattgaaaggtttccaagaacatagaagaacaatatcacagaatcaaacatatactagtcagcatccaagaacacagatctcgaaggaagagaacgacataccgtcactgctactactcttcgtgatgaagttctccaaccagtgcatctaccgctgtcactgcttatcgccgtccaatgcgccgactgccatcgagcccttgctggtgggaggccacccgctatatgccgctgggggaggatgcacctttaccgggtggagaagagaagaggatttggtggaagataaactggtcgcttataagtcaacttgtgtcttatgtcatctcagcttgattcatcggtggcgtttttcttaaactaattaaataacactgatgtctcatatataaatactggtttttatacgcccaacacaaatgactcacatgtaagtatcagttttttgtcataaccaatacgtgtatgactattgatattggttttaatttgataatgtcaaaacatggaaaacctctcatatgagactggttcatatgacgtgttttgtactagtgcagcccccacaccggtaaggcaccttatggcctatggcacattgcagcctgatagctagctgttctaaaatacaaaatggactccaaaatctcccaaatttagtcatcgatgcacttctgaacaaaattccgtgacaacgatgaagtgcactatactatttgacgacctttgtgatggtatatttttcaattcacgttccttgcaacgatagctctggcagagtcgatcaacaaaataaccagcgatatcatacgcatcatatatagacaaatgcaactgacacgcacacacttaaattaactattaacaacgatcatgtgcgcgtccttcttcgatcgttcagctcaagattccttaatcaaagcatcgagattatattttttttcgtatgtattagcctaactagctaccagtgtgcagctggtacggtagtgcagctccaaagtctttctaatatcttatactcttttcatggtcaagtggcagtatctcgcattgcatgcatgtgagcatatatatcagcgatcgtttgctggagccacgggtaaagtctagctagctaagtgctaattaggagcacacaaaaatcttgtggcagttgtcatatttattcttcagttaattaacgacaaatctgtcggtcgatgtggatcgatctatatatatatatatatatat

SEQ ID NO: 10725 - DNA, 1882 bp, Oryza sativa
cttccgcctaggcctacgggatgaagacgctgtcgtggtgaagacggccgctaaatcgtcggggagcttcatcaggactggtgggtaagccccgtcatcttgatctggtgtcattggagaagatgcgatctcggccgactggtttgaagccgactcggtgagatggtcttgaagtagctttcaaccgcgttcgggaatccaaacgggaccgaaatccggttctctcccgactggtttgattccgagtcgaggagagaaatcttgccgaagttgtcggtgatgaaatcgaggctgccgaaccgaaacgtctgcccgggcgggaagacgaggtcgtcgatgccggagaaaggacccattgcactgatcggcgaaaagcttgacgctacccctacctggcgcgccaactgtcgaaactagatttcggcaataatgaaagggggtggctatcaagctagaaaagtgtatgggtttggagacaaaggatttatacaggttcaggccttcttataaaagaagtaataccctactcctgtccggggatgaatccgccgagtgtattattgattgtgtgattcgggaaaaatcagcatatgcccctagaggcgcccggaccccccttatatatgggaaggagtccgggttacaaaagataatccatattcctaccggaatatgaagataaaggtaaaatacagtcgtaaccgactaagtctcagggtgtttccttgatacacaagttaagaaacaaacccaagatacagacaagatattctatctacattaggtatcctgtacccagttcgaataccatcgccgtgtagatatgggatacccataatctccacagtagcccccgagtcctttgcagtcgaccatcgtagccctctcaaagatgataatccgagtacttcaaactcttcaagccaaaacctgccgagtggactgtaaagggcgaaaagataaagaatatggtgcatcgaatagatgcacctaattaggtgtagcccccaactatgtgattagttaacaaactaaacatatagttgaaagacaaaataataacacaatcgtgcattacatgacaaaagcgtacgcggcgcctaaataggcatgctagccgactgctttttagccacaataaaagaaatccgagtggtttacactctaaaaggttcacgaatgaacatacttgacaggtatccgaataaaaactctaaagattacccatcaagtattatgaagattatggtaataaataagtcgaatagcctaggccttgactatttaccataatgaaaataggtatataacataccaaggaagtgactataataaaaacaagtcattcctagttaacccaaacagcttttgttagcctaaaaaagcttgcaaaaacagcataacgcctttctgtcgggcacctttttaattcgcattgcaataattccaaagaattatatgaccgcataaaaaggatttgatcagcattgggcaacactgttgtgcgcataatattgccaaagcaaaatatgcctaagtccctaaggaacacaatgggccacactgttaaaagtattgggctgaaatactgttcaggcctaggcccattagcacctccgatacccttaactgaaaaatccgatatccaagcgacgcttcgtcttccccgccggaactctcgccattttccccactccttgctacagtgaaaagctgcgccggcgaactagggttcacaactccgctcaaatccacctccgaaaagtgcatcaaaatccttcccgtgatccaccgcctcaatccctcacctttcccaagccatccctcgaatcaaatcagcacatttgagaaaaatcgatggcggaagagagagaaagcttcg

SEQ ID NO: 10726 - DNA, 6781 bp, Oryza sativa
tttttggtaattttttatggagtttttttggctacttttgatggagcatagctaaatttctgcctaaacctgtgattgtttaagttagattgttcgaaatttgagcgctcggtacatcaatttaaatgcccttgtttttgtgctgaaaaaagagagtaatattctgtgggtttctccagtattgttgtgaaactgaaccctgaattcgtctatggctttgaaactgaactatgaactcgtactgatgtgatcaatctcaatctcatgtggaagtactaactgaagatttatctttctcatgatttgatctttaggtactcatcatcaattgtgccatccaaattgaagttcaaatttccactgccaagatgatcaaactccggtcagctctaggcgttcttgagatcttgtcagttctttgcatcagccttgttgctgcatacactccagtagacaactacctcatcagctgcggctcatcggtcgacacgccggttggccagcggctgttcgtcgccgacgactcgggcacggtcgtcctgacatctccggcgagtgacgcggtgaaagcctcgcccagcgcggtgtccgggttgcgcgacgacgccgccatgtaccagagcgccagggtgttcaaggcgccgtcgtcctactcgttccggatcagggaccccggccgccacttcgtccgcctccacttcttccccttcgtgtacctcggctacgacctcgccacggcgagcttcaaggtgtcgacgcaggacgccgtcctgctcgacggcttcgcgccggcggcggcggcgaggggcaacgcgtcgacgacgacgacgacggcgacggcggcggcggtgtgcgaggagttcctgctggacgtggcgcgcgacacgctcgtcgtcacgttcgtgccgctcgccggcaggctcgcgttcgtcaacgccatcgaggtcgtctcggtccccgacgacctcatcggcgctgctgactcgtcgctgtcgacgtccgactccactggccagcagctcaaccctgccgtgatgccgctgcaaacggtctatcgggtcaatgtgggcggccaagcggtggcgcccgacagcgacacgctctggcgagaatggactagtgaccagcaattattggttggacccgcaatgactaaaggagtttcttacaatcgaacaccgaactacctgcccgggcaagcgacggcgaacgacgcaccggccatcgtctacgccaccggcagggagcttatcatcatgacgaactcgacggacgacggcatgaaacaaatggcgtggcagttcgacgtcggcaggtcggcgagctacctgatcaggttccacttctgtgacatcgtgagcagcgtgcctggccgcctccacatgaacgcctatgtcgacagctccaacgcgattcaagatctcgacctctccgccattggcaatggcacgctggcgttcccgtattacagagacttcgtgctggctgctagcactccatccggcaagctcgccgtctacgttgggtcgacgtcgcagaagatcacgacacctgccgccattctcaatggcctagagatcatgaggatactcacgaccgccggcaacgtcgccgtcgtcgagccaacgatgccgccgggaacgaagaagaagaacaatttggccgtcgttcttggctcagtctgtggagctttcggtttcgtttccgtcgccgctgctcttgtcattgttcttaggaggaaagaggagaaggaggagctgcggacgccgacgacgagccagccgtcgacggcatggatgccgctcctcggccggatcagcttccgcagcgcgccgccgagcgccgtcgggtcacggtcgcccagcttcaccattgacaccaacgccaacactccaggaggaggcgccactcccggcatggccgcggcggcctcgtcttccccgagctaccgcttcccgttcgccgcgctgcaggacgcgacgggcaacttcgacgagggcctcgtcatcggcgagggcgggttcgggaaggtgtacgccgccgtgctccaggacggcaccaaggtcgccgtgaagcgcgcgaacccggagtcgcggcagggcgcgcgggagttccgcacggagatcgagatgctctccggcctgcgccaccgtcacctcgtctccctcatcggctactgcgacgagcaggatgagatgatcctgctctacgagtacatggagcacggctcgctgcggagccgcctgtacggcggcggcgcggcgacggcgacggcgacggcgctcagctgggcgcagcggctggaggcatgcgccggcgcggcgagggggctcctctacctgcacacggccaccgccaagccggtgattcaccgcgacgtcaagtcgtcgaacatcttgctcgacgacggcctcacggcgaaggtcgccgacttcggcctctccaaggccgggccggacatggacgagacgcacgtcagcacggcggtgaaggggagcttcggctacgtggacccggagtacgtgaggacgaggaagctcaccgccaagtccgacgtctactcgttcggcgtcgtgctcctcgaggcgctgtgcgcgcgccccgtcgtcgacccgaggttgcccaagccgatggtgaacctcgtcgagtgggggttgcactggcagcggagggacgagctggagaagatcgtcgaccggcggatcgccgggacggtgaggcccgccgcgctgaggaagtacggcgagacggtggccaggtgcctcgccgaccgcggcgccgaccggccggcgatggaggacgtcgtgtggagcctgcagttcgtggcgcggctgcaggaggtggacggcctcgacgcctccgacgtgagcagcctcaacatggttcatcagctgatgccgccgacgagcttgcacgctcgtcagagaagcgccggcgaaagcgagaccggcaggacggacgccgacgaggacagcagtgtggtagatgatgattacaccgatgcttccatgagaggaatcttctggcaaatggtcaatgtgcgcgggagatgatactgatcagtcatcttcaaacattccagatcatgaattagtcatcttcagactggtcagttcattgttgaacattccaggtcaaaattcacctctccagtatccagtcggaaaaagtgaacaaagacatacttagaatttaaaatatacttaccagtgaaaattttgtactgtccctacaatggagttcaaacatatgcttgaatgaaagacatgcgagtctcataatttatgtttgagcagaaatactacacagttcaaacttttgcctaccttctggaagcaggtactggatggggccggacagcaagactgcaaggcctaattagcatccatacaaaaatattagcaagagcaagcaatagccgatatgttccagaaaccgcggtgggccgcaaattccattttatgcagttcggagtacaaccaacagatggcatggtctatcaacttatgaaaggcgtcaataacaaataggatacagatccactcaaatcccaacaggttcatagatatgactaaaatctccaacaggtttaaattgattcataaactttaagactgatacatcccctaacatctcatttaaggggatgtgcttcctctcattcaaggggatgcgcttcctctaggcgaggcccgatgattgccattgtcttcataatccctggggcttgggctccggccattggcagctgtactcatgtcacggcgctcatggtcagcagggctacggctgtcagctctcattgggctcctgctgtcccttggtgcaggactcctgctggcattaggggtagggctgcggttcctcccgttgggtggtgaagcacttctcctagggctgcggctatcacgagggcttcccctagggctctgggtgtcgcgagggctccccttagggctgcgactgtcacgggggctccccctagggctgcgactgtcacgggggcttcccctagggctccgactgtcacgagggctccttgatctcctttcattacggctatccctccttggagactgggagcggctgtcaaaacaaaatggagaagccatcagtgtttgatacaaattaagcagaacatgaggattagggggagaaattaagcaactgatgaactcagttttataagagtgatctggagactttctggttaacatccaatagattagttttttgcaagtataaatcaattaaccagtcctagcaaaatcaacatgaatcaacatacattcagaactcaataggaagatcatgactgctaaaattaataatgatcacatataagataagtaagagattcccatgttgaaatcaaggaaatgatatcctcctttccatacctgtagctcctgctacggctcctgctgtagctcctaccacggctcctcccacgacgaggggatggggatcttgagtagcttcttccacgcctattatcatcaagatacaatacatttaaaaccttatattcaacaattatgcttataaaaaggaaatctcacaggaactacttgagattcttagggctgttccggcagtccctttctatatggcccctgtctccacaccgatagcatctgtttttccagtctccagctttgcagtcacgggcccagtgcccatcaatcccacagttaaagcagcggccagaaccaggtggtggtcctctgcccatatattcacgtgatcctccagggccacgtggaacctaaaattggcatgaatagcatatttagattgagtaaaattataaagtaggatcatcaaagcatataaacaagatagagacataaaatacatacaatattctgggaataataaaaataaatatgattacccctttagcaaactcaacaatcatgcggcttccatcaaagtcccgaccatccaggttgtaccttgcctcatcagcatcccgagcatcactaaattcctattatccagcaaacaagaggtggcctcgtgtaaacattgtaaatgaagtgtactgataactgattaaataaatattatcggaaacataaggcaagtgttttacttacaacaaatgcaaactcgtgcttcatatccacatatcgcactctgcggaaattgtatcgacaaagagtaacaccatcaagatgcaagtagataaatgtttcaccagtcagaaggaactaaacgccagtcaatgtttgcaatttccattaaaacatcaagataatttatcaaaagaattgccaaagtctgctagaaactttagagggacagccaccaattccacgaagggcaccctcccaccatggacaccgaggttgggaaagcccccaaaaccttcaacaagatcatccgagttaaaacatgaaggtctcgtggatatgtgatggtaagaaaaatatcagagaaagaatgctctgaacagaacagcatgctgctggcctagacctcttgctttgaaaggcatagcatcaagaaaccgtcgggatgactacacaaaaagaatgaagagttgcctctaattatctgtggccaatattattcttaacacagggtgcaagtaaaaacgcgtcgatatgaatactctatagactagactgaacttgtcacttagaacctaaaaaggtctgtcatcggttctataggtaataactttgtattaacttatcacatgcccaaatcaacaaatgaggttagagtgagatactttcaccgaaccaatctagaatctacaaagcaagttacgcttgtcggtagtatcttttgactcaaatgaacaactcagaaattctgccttgaaagactggagtacaacttagacccaatttgcaacatgcttacctcccatatctgccgaaaaggtcttcaaggtcccgggtccgggtgcgcgaggaaagacgacctacgtacagcctcgtgttgccgccgtaacggtcatcgtagcgatcacggtcatcatagcgaggcatcttgaactgtaacacaacagaatagcaaacaagagtgagctagcggatctaacgtaaggcatagggttttcagctgaatccccaaatcttgctggaaacgaattgctactagtactaaggtttaggggttaaagggcaagtaagaaaagcttccggatctacaagagaagctagggttaaggcgaagagaaaagctgtgggtagagaggaacgagaaagaggataagcgtacgtgtgctcaccggcgagggtccgacgggagaagcagcacaccggcgacggcgccgctgctcgcgggtggagatcgcctctgctcggcggcggcggcggcggcggcggccgaggagacgaggagtcgagaccgaagcgacggggagatcgactagggtaaagataggggagcaaggagaccgaggtcaattaattacgctgggctgttggctatatatgggctttctatgggccgagatttctaatcacagtagtactcgttccggactagtcatattgatttggaggcccatctaagacgaaaggcccattagcaattactctgctactgttgaatttttttcgtttttagatttttttttaatatttacagaaataatctatcgaccaaaaaaattgcagaaatagcccctgccgcccaattggtgggcggcaagctgacgtggcagacggtgggtcgaccgcgctgtctgccgccgtcggccaaaattgcgattaggcccgagggcgacaaggggctaattgcaattttggccgcccattca

SEQ ID NO: 10727 - DNA, 3280 bp, Oryza sativa
tactcttgcaaatggtggttttgaggtgttcggttcacttgaatgggcattctgttcggcagccccatctagacctccaagttgagcctcaacctcttgtagcgccctgagccagtgccttagcacctgaagcctatcctccccgcgtgatgaaaccgcggcctcttccaagcgcttcaccattttcttgacacttttgtagttttgagtgctctgtaatcccaaaaagaacacgttacacaagacgagttaggaggcattttgacccaaaaagtcaagccaccatcagaaacatagcatttggtatctagaaaccacaagactacactctatttacattttacactgcaatagcatcaagctaatctaaagccccttttccttcataacagtacaagacactgtcttactaccgtgcagcagatcatggacatgagatcatcccaacactataagattgcttaaattcatacgaattgaactcgaattatatctaattcgaacacatgtccaagaacaaactcgcatttgactaacttcccacttccaattgcaagtttggcacctcctcaacacaaaacgagagagcacgtcccaggacaaaaatcgaaaggggctttctgagagaagggggcgagggagggaaacggcgggggggcgggggtagaagccgctcaccatccggtcgttgaggatcttcgcgccctcggcgacggcctggccggcgtggtgggcgacggcgtcggcgtagcccagcacggcgcgggcgaggccgctccggccgcccgcctcgacggccttgctcaccgcgctccgcagccacgacgacatcggcggcggtcggcggcgggatcaatcaccacaacaacggcggcggcggaggtaggtgggggtgggatgccgcggcgctgtctcgagtctcgactggactcctctcccgcgaccggggcttcttcaggggagttccaagttctccaacactgaaagtttctgaactgaagagatttcgtgtacttttcgctctctctctctcttcttcttcttcttcttcttttctttttccctttattccttttctctttttttttatctggtaataaaatatttttttcttgtttggattgggagagctatgcggttctgttgtctgttctgaaatctgaatggacatgaaaagggatgaaggtcatgtactcatgtgactgattggtgctcaactattaatcaattagtggatcgttagatttgtcttgtactcgttatttagccattactctttcgagaactttttgtggactataaaacaacaaaataattgcagctaacatttttatctatatttcctggtcatacttatgcatcctatatggaactaaacatttggaattgtttgttgtggaaaagttatctccccaacaaacaatggattcatttatcccggcactaactttggagtaagactagtcaagcctcacattaggctatttgggttagattactcccactcttcagcgctcctttttgaaacacatggttttaaaaaacgcaagaataaaaaaaaacgcataattgaaataaggcacatgaattaaaaaggtgatgtgtctagatatctcaaaggaaaatatcacatgaatttgatagctttctagagagatgatgggaaaatatgcgttgtggaactggactaagggaaagcaatccaaaggaatttatcaacttctaatcctatgttccaaacaatcaagttagaaaatatttctatggatttaaatcctttaaaatcgtatgaaaatgctttaatttaaaggatttattagcccgcgtatctaacataacatttccaaatgaggcatttttcatggtagcccagcttggcccaaatcctctcaagtctaagctgctttctttcttagtaatttatattttctatatagttgatatccattagcaattacttcctccgtttcacaatgtaagtcattataacatttcccacattcatattgatgctaatgaatctagacatatatatatatatatatatatatatatctaaattcattaacatcagtatgaatgtgggaaatgctagaatgacttatattgtgaaacggatggagtatttttttcgagtaagagatacccattagtaattattaaaaactaaacttatcatacaagtatgtcacatcatcgttcactagcaattattatcttagaccattttaaatctcatgcaaatgtgacacatcatctagaatatattatattatagagctcaatatataagtacatatactatttctataatatttaatatatactcatacataaatcccgagcacagtgcaaagtatcacctactagtaaatggttcaaaccactttctaaaaattgttctttttcaatcaatcaaaaaggaaatgcagaggtcgacaagacaactttgcaccccattttcggctgtgtttagttcacgtcaaaattggaggtttggttgaaattgaaacgatgtgacggaaaaattggaagtttgtgcgtgtagaaaagttttgatgtgatggaaaagctagaagtttgaaaaaaaactttgaaactaaacaccgccttccattgacttcaacggattcctcattcctgtgaccagacacttgcttcctattgtatcactgtagttgcatgctaagatccaaatgccacatacttcttttacacaacggggtgagacggtcttcctttccactcccaagaacacgcaaaattgcaaaaatattttctgatataataccagcaactcgctaaacatacaggcgagtgggccgacgaggcattcagttcggtcgcatctgacagcgattttcgcgtccatggcagccgtggaaaacgaaggtctttctctgaacattgtcgtgttgctcctgtaatctgttgctcaggatacgcatgccgaattgccagccatgtgtagatgaccgcactgctgctccaagaaaaatctctgaagtttgtagtatcttgcaataataacacggcatcagtttctgagtgtatcttgtcagtattaattccagtcagccatgaattcccttttgttttcagagtacaggacactgactgcatttcttttcataccctcgagaggaaaaggccaccatgcttccgatttctaacacaaaagtctcaagaaaaaacgagtcttgagagaaaacgagttgtagcacaaggttttctccctttcttctccttgtgtttgtgtgtgagcttctcaaaacacgtg

SEQ ID NO: 10728 - DNA, 2258 bp, Oryza sativa
cgtagtttttgcatggtcttcttgagtttgttgaactcttgatgtctccttctcatttagtttcttccacaactctacagcttcagcatctattctgaagcgacataaacatattagagtaacaaaagtatttaagtttcaaattgtccacaagaagtatataaattcctaaataaatgcataggaccccccccccctttctcccccaataagagtctagatgcttgttagtagatttataactacctcataatgtcagaattcctctttagtccagaaatggcactttgggtaaactgaagcaactcttcacgtttcaccttcatgtgtacagaaacagagaatcattgacaagtcagattctgcatagtttagcaatttgtgcatcagagttaatttttctcctagtggaaagacattaaaggggggatatactgaatactacattctttctacataaaggaacaatggccttcctgtctagaggagtgaagcagcattccattcagtactccaatcaagtgatgcattgcatgagcatagactcatagtgagtttgtgactgactacatttctaaataatcctatgcaaggaaggggtcaccttctgtcttaataatatcttcccccttttggtaggattactttatatatcgttactgaaataaagaaacttcatgtgcagtaaactcagcaagacccccaaagttatataatttagtcctaaaaaaatgggtagtttacaatatcattaaatgcattttttctaaaaaaaaaaaaaggttatgtgagtttttggaagaaaaatatgcaagctaagtgtttatactaccaagaaatatgtaaaacctaaagaaacaccaatcacctggaaagaagacatcaagaaacatatactacagctgcataccctagttacataacaatcattgaataatcaggaatgaatttttgcaaagagttacatgttatatttatccatccactgattcaatactcagcatagaataaaagtgcaagagacaacccaaaatgtaccaggacttcatcatggtaatttgagaatgattttgccaagtcctgtatactgctcatgatcgcattattgatttctttccctcctgtaagacataggctgcaggaaatgactattagtaataacggtaggttgctaagcttcattcaaacatttcttattcaaggaacagaaaataggattgcaggatgcctgcatacatgatgtggtttctcagaacacatcagtatggagcatctataagtctataactaacttaaacagggtgcagggacatatcaagtgaaaatgcagtttttatgcaaatttcattttcattcgacataaaagcgccaaaagtttctatccggaacagctactagaaaggccatgctatacgtctctacaaaattttatgatcaaactctgcagaattgtatgaacacaggaaactggaaaagacaaactctgcgatgaatagttaattagaattgtccatcaaatattttatatttttgaatcttgtaaatgcaatttgagtttgatcataaacttttgcataaggatgtcaaatccatgtagtgaaatacaggaggcatttacaaatagatcatgtaggcaataagctcacccgaaaatttccaaaagcaggggaacctcttcttcattaggagcttgaagaatctgagaatgataaggattactgtgcttaacttctatgagtgctttagcaaaaaatagcattgccttccaaaaaaaaaaaaaacacaaaggtgcttttatgctctcctgaaggaaaaaaattgcctgagttttaaaacttcagagttaagaagccaacattagtttgtgttattttcattatctttttgaaaccaaatttacaggatgcatgccacccatgctacacatctatgtgaaaaggtaccaaccctgcagttgaaggtgtttatactatgtgtccttcaaatgttgcacaggtgagaagactaatagtatgaacagatcagtttattagctgtggacattgagcgaacacatggaagaattagctgaggtacacttagttttgggcataggcacagatttggatgagttacacaacccacagcaataactaatttaagttgcttagatattggtgaacgctttttctaaaggaacaccaaggcactcctcagtcctcacaatagcagtatataacaaaaggcacaagcaggttcactcaaaaattgaattagtt

SEQ ID NO: 10729 - DNA, 887 bp, Oryza sativa
tgaaacaatggtttcaaacagtttatatatcaaaccaaataccttgaatgtagaaaggtgatatttagtcaatttcaggaaattgtctgtacatctctcaagctcatcactacataaacaaaagataaagctgaatttagtaaacatatgttttagccacaggccctaatcaggcaataaccactacatacttggttctcttttccttctgttcattatatgatgactgaagctgccacgtatcctcaaggaaattgatccaagtcttgactacgccagcctccacattacatgaggtaatagattttgaaagttcattatcctgattgatgccagggaagagaacaaaatattaagttgatcaatattttgataacaaacagcactaatcaattgcaagaaatataactgaaaaaaaaaattgaaaccagatcaacaaataaagtatcagcaccttcgcttttaaactaaatatcatttgattgtttgcttcatcaaattgatccctctcttcccttgtttgcttgagacgtccaatggcagcattcagtgaaatgttgacctgttggtggagagatatagaaagaacacaaacctaatgtcaaccttaagcagaacaataataattcttatagaaacaattcagcagaaatgtaactccaccagcccactatatattgataaaagtaacgcgattgaatggtgctggagtatatttgtaaagcaaatttccaattttgtcatttttattcatatttttaaaggaatataactctttaaacttatttacaagatggcatatcagttgattaaatatcttacattttttagatttaaaattgatggcacataacaactgcatatccacatcaaacctagcactggaa

SEQ ID NO: 10730 - DNA, 1039 bp, Oryza sativa
agatgaaaaaagtacggccaaaagatttttctatgttatgttaataataaataaagaagtatttattggtaaaacttgttaatattgttataaaaatgtattgaagttggttgttgcgcaatttcatatgttaagtgaggtattattttgtaccttattcgacgtattagtactcggataatttatataggcctatcgcagtctaggtcgtagaaacattatatggacttaaacaaggagaattatgtaacatgaagaaatagtagtacaatttgaacatgatacaactatttgcattgcggttacatagatgatattagattcgaactaggagggaggtagtgcaatagttgaacacaacgacgatgtagtaatgggacaaggaagcatgacagtagaaatttcaatatgccaagttgtccgataatagctaacccctacgtgaggatccctctcctctctcaaaccgcgctttagtaaccctgtattgctctggtagttcaagctgcacaacacggctaggtggagttagaacccttctggtgtctatccattctctgtattgacatctccttggtggttcctgggaggaaagaatagatgtaaagcaagcaaagttagtaaatattgtgagaaaataaggaatcatgtaatcaaaatatttttaccatgaaatcgtcgtcaagaatatttggacaaacaaagaaccttcgacccaatgttgtaggatttatggaacgaagaacctgacaacgatcaccacacctgcatcttggacgggcttcccatggagggagtgccgtagttagcacccgccagtcgctctgttgttcacgacattggcgttcataagccgcttttctctataagtattgctcagtactttcggatgcgaaataccagcgaccttcttgtaaacaagtggttaggtcgagaacgggattttctgtatcgacccactcgatgtatgcgcaagccgtagtgcgggtctgccgaatagagtagtgttacgaagaataaagcgattgcccatacggaa

SEQ ID NO: 10731 - DNA, 3826 bp, Oryza sativa
gtagaaagatcattaccagataaattaggcaaggtaaattcagaaactgcgaaggaaaaaaaaaagatgaaaagttcagagaatgctacttacaataggctcaaactgaggggataacaggttgtcttcgagatttcttagcaccaacagtatctgcattaagtaactgtattacttagaaggattcatttttaatcatagaaaattatgacagtacttatctccagtcaaaaaatcgggagaaaactttgttcagaaagctagtattgctgtacttaccgtcttcacgatgatatcatccatgctcttcagtttctgaaggtgtgtttccactggacacggcgagtctggatcgaaaatgtcgccgatgaacctgtatacttgtgcaaattgcagatcatctgaaaacagtgaaaaaaaatcattcagcttacagtttttcagcagcaatgcattgttaatccctgattccctgagaataattttgatctttcaagagacgacgtagaattattaccaggtgatagtggaagctcgatcgtttcatcctgcacaatgctggctgttgccatttcacttgtggtgccagtccagtccatgctcgtattactgaaacttgctgcccccatgaatgaactttcacctgaatcatcgtaaagaaaaagttatttctcatggcattttggttgcagctccgtgactaagatcgaaaggcgatttgttgaccggcataattaccaggaaatgaaacaaatgctgctggtggttcaatcaggccgtgatggttcccccaggctgcagtgcctgaagtacttgcccattccaagttctgcatgtctgaaaaaagaattaccacaaaacactgtcaaatcactagtaattaactatcgagtgcatctttgatgatgacatcaccgatcgcaatttgaatctagatcaactgacaattgctaatggtgatttggatatgtgcacttgccattggttgcaggaggaagaactccgggacactcccaaccgatggagctctgaacagcgacgttgtgatgcggcggcaagcactgcggctgcccgtggaggatcgccgtcgccgccaccgagctgctcaccgccggcgagctctgctgctgctgctgctgcatgacgagcctccgcctcgggtactgcggcggcagcccggcggcgagccccatcttctgcaccttgaggaagtacttctgcgcgtggctgcggatctgcacacacatcgatcaatcgcacattgtttcaatcagcattgcaatcttcatcagaaaccaaatcgagtagtagcttaatttgagcacgattgtgtccagctacgtacgtacctgtatggtggtcttggtgccgacgtgctcctcgatcttcttccagtcgcggccgtacatgatgagcgcgtcgaggaacctctcgtgctcctcctcgctccatctctcccgtggcttcgtgatggtgtacggcttcctggccttcttccccggcatctcgctgctgctgctgctgttgctgttgttgttcgtgttcctatccatcaacacaactccagtccccaaatcgaatcgagcagacgcacacatggcacatatatatacctatgcaaagccaagaaagaaaccgaagatccctttgtgggtttggaggttgacgacgatcgaagatgaggaggaggaggaggagggctggagtggcctaagaattaggcgcggtttagcgcgtacagttggcgaggttgcatggagacggcaatgcgcgcgtagtagctttgggtggaggaggacatcgccgggttggtgcaagcgactactcctagctagcttagctctcgcttgctgcgacggatcgcgacgtctcgtctcggcgagggggcaaagcagcatgtgcgcgcgcgcgccccgtcgccgtgtatggcaacgcttatctgctgggcgctttccgtttccggaaagtcggcaaggcccggaccctagcttgggaacgattgctagtggtaacagattaacagattagtacggagtacaaatttttgtgcacgctaacctgggtttgttctgagtaatttttaacctcgcaatttgcaaaactacgaaaaaaaatgaatctcgagttatttgagaatcttgttcttttagtgttttttagccatatagttctcatgatatgtaccctctccatttcatattataaatcgttttatattttttcaagtttatagaaaatttaacaaaatctaaaatatcatattagttttatcaaatctaacattgaatatattttgataatatatttgttttgtgttaaaaatatcactatattcttttataaacttgattaaacttaaagaaatagtttgattagaaaaaagtcatacgatttatattataaaatggagagagtatgaattatcaaaatggatacgttggtaggggtatatctttcttatagacgtataggtaagccttacatttccacgcgtcgaattgtgtggttaggcttgaggagttaattaattgcttcgttcttgggaaaaagttgtatgccaaaataggaaattttcggtaccgcatcggaattgccaatgtaatggcacacttcactgtacggcaaggcaagtcttgatcaccccagccagcctcagcctggatggaacagcacgtgttatacgtggccaaactcggccaacgaaatagcgcatatgtttgttgtgacttgtgaaaaatccatggatgaacatgagttttaaggacacgcttctctaatgaaataacagaggaaatggagaacaaaatcaggacggccacatgttcctggtgctgtatggtgtaacctttgcgtgtgtgtgtgtgtgtgtagagagggctaaaagtatatgcatggagtcaaaataactctgattaaatatagcacacgttaattcaaaaaaaaactcgaaactattttgttttttttactttgcacgttcagaaatttttaatcaaaatgaattgcctaaaaaataaaaaatagtttttttttttactgacgttgtctattacttatggtcaggatgaatccatgcttactgcgagcccatttaagagcccaaatactcgaattggtatgaactagctaacggcccatttctggccatggttgggttccatgatttgctacccactcacttaatctctgggtgcccagaccacaaatggctcttaacggtatgcatccatgctaagttgctaaccttgcaaaaagagcccaaataactagaatattagggaaggacctaatatcaaataattaggaggggtgaggctttgaacccaggtcgtctagcccaccaccttgtggagctagccggaagacccctgggcaaaaagagcccaaataaattgattcattactttttttgtttgaaggaaaatgattatgcacattggctggctatgtacacacaattgacctgttatgaacatgaggtcttgtcacaccccaatctgataccgccgtacaacggcacctgacaggagcgtgtcgtagggaaaacggcgtgaaccgcttcctatgaaaccgcgatctcggtaccagtcccaggacatagtgctggtacccacggtgacaaatatgaatcatagcaatccttaaaatatatagaggacttatttaccttaacttaggttgcagctcggacagcccgagaatacaaccgacgacgcggacgagaaaacaccaacagcagcagcagcagcggaaccaacggtctaacacccaacaccacaggcgacggctggggaccaggacgaaaccctaatcttcacttcacttc

SEQ ID NO: 10732 - DNA, 3563 bp, Oryza sativa
  unsure (1)..(3563): unsure at all n locations
agagagctccacccagctcctctcccagttttagtggaggtgaaactgtttggctaagctccagctccaggaggggtggagctggagctggagctgtgccaaacatgccctaagtgttcgattataattaactccacttgatcgtgagcttgatctgatcaagtgataattaccttcttttttttctcatggattatgcgcatgaataatgatgaacagattgagatttaaaaccgagaaccatgggaggcgggcatgacatgcacggcggcggccagaacggcggcgtgaaggggctggtctccaagctcgtcggcggcggtggccatggcggcggacacggcggcggacacgggtacgagcaaggctacggcgggcacggttaccctccccacgccggcgccgcccacggcgcgtaccctcctcagcacggcgcgtatcctccacagcacggcgcctaccccgggcacggttacgtgccgggagcctacccttcgaacgccgcgccacatggaggtaatttagctttaactgaacagtttacagtgagttttaacttagagagctttagctccaattccacgtctcataaaactgaaacccaacaaaacggttttaattttacccgaaacaagagaggagctagctagagctctcataaacttaagtattctcacaaaataaattagggatgtggagctagatcttgaatgctccgatccacaacttcattccaagaagtttaaagttaaatttaggagttataggtagtgcctaaaagacccttaaattttgcacttgatttctgtggatttaaacggggaatggtatatatatatatatatatatgcagggcacatgggatcgtaccacaccggccatggcggcggcggcgggcgtcactacggcggcaagcacaagggcggcatgttcggcggcggaaagtggaagtgaagcggctagctagctctacgtacactatacgtgcccaccagctttctgccctgctacacctacgtataatatctgcacgagtatgagtatcaaccatgtggcgtacgcgtatatatacatacctaattaagaaataaataaagtgcatgcaggcagacagatctgtgtgtatacatgagcttaatgatcagctgatgagttgtgcaaattaagcatgtggtgacgtatatatactttgtgtgtactgatatacgtacactttgcataatactacttatatactagcctctgttacgtgtgaaattcaacggttttccggttcattaagatataaggccgcgatttgggccaaattaacctaccgatgattttgctatatatttgtcgacaaattttttccccaaaatttgacagatgttgtcggtgacatgggaccgggagtatcatgacttagagacttgaggcagacacgatcacccacgtggccgggtcgggcccgagggtgatacggccgcccttctctttgtctccccgaggggtcggaccgctcccgtctcggccccgagggccgaggcgccccgaccccttgtgggttttgcgccgcgtatatggggtaggtgagcatagcggggctcacctaaccacatttattgcggtttggacgagcgcgtcacgccgcatgtaacgcagtgcagcgcgctcatttatccggtcagtgaccagtcacagaccgatcagatcgtgggttaggtgacgacaggcggtctgacgcacgcctcgccccatcccgtcaggacgagagcctccaagcactcatccctagccggagccggcgtgttagcttctggagatggcacgttggttccggtcagatatatgccaggcttcatcctaaccattacaggcaagatattgtatgaagaagggtgaacatgcagattgttgaactgacacgtggtggacaagaatgaccgatttgtgaccagtgttttggnaaccccaanccntggngnnttcatgtttcgtcagncagacagccatgttcccacgacgcgcctgcttccggcggaagtggaggtaggtatgggccgtcccatcagaaggtcattcggacggcaatcatacaaatcttcgtccatttatgaaaagataggataagtccccacacaaaaaagagagatggtgcatgtggtatccccttgagatataaaaggaggaccttgcccacttagagaaaaggaggacgatcccagaacgatcggggactggctcgcactttgtagcttcttcatacacagatctaccaaaacacaggagtagggtattacgcttctcagcggcccgaacatgtatacatcgcccgtgtcttgtgtgtttccactctcgcgaactttcctcaaaccaagagcttagaacctcacccagggcccccggccgaaccggcaaaggggggcctgcacggtctcccggtgaggagccccaagctccgtcagatgtaattacagtacaatcgtagtgtaattacactgtaacttgcatataattacactgtatatgtaactttcaaaaatctctccgtaacatgttatttcggtaaaatggaggtcatagaaacaaattctttcatatatgtgtgtgctatgatttgttttttttctcaccaaaacaaatcttgtaatagatctaatgattcaaaattatgtgaaacttacgtaagttacactatagttacatgcaagttacagtgtaattacatataagttacagtgtaattacactacgattgtactataattacatctgtcaaatttttgaggaaaaatttgtcgacagatgtataggcagtcccctaccaaatttacctgaaaaattaatccatcaaattatacacttcggcaaaaggaaaaaaaaaaaaaagaacgcagagcccagccctggtccagatctttttcacgttggcgatctgggcattcggtcgtgagggaaacgaattctgacttagatatataaacacgtacgcacgttttctcgtacacctaatctaaaccgtatacagaatatagattgtatctatggcctttttcatggaaagttggaaaccatcatggttgagcacgaggcaaaccatcgccggcgagatccatctgatcacggcggcggcggcggcggtaacgacctgatcggctacctctgtgacgacgtccttgtacatgtcctcagctccctgcccaccatcaccgtatcaccaggtacatcgtcagccgttcgatgacgcctaatggacggttgagatttaaatcctatacttttcgggtaatttatccttgagaaggtatcttgtaccatattttctaagaaattttaaagttcttgataaagcaccttaatatacctaaaatttacactaatttttttataccttaagatacttattagaacctatagataccaaatttttacaccaaaattttacactaaaataagtactactaaaatttatagtatgaaatcttcgtacctccaggtactctaaagcactataaaaaaaaaccaggtgttccatgatgaaatcgtgcgcaaattggttacttttgttgtggtctcgtgga

SEQ ID NO: 10733 - DNA, 5194 bp, Oryza sativa
taaaatgtatgtaaattgattgtggaagtaatgttgtttttttaagtacctgtggggggcacaacagaaggcctagccgaggaaggcggggtgctgaacggtgcacgaaaccctgaagcaatcggcaagtgaaacggctcacttatatgtgcgaggcatgtacagaagtagtaataaaaatacttacctccgtgtggagggggagtcggcctaggaatgtgcgcagctggacggggaccagtcggtacgggtggccgctgtacagctgcgtctgcccgagcaacgtcgtctgcacgacaggtgagcactcggagaatcgagcgcatcgactccaccatccgcgtgtacgtcgtcaggtgctcctctacggttaccggaattcccgcgtctaaacgttggatcgtcgttgaaccgtcaacgacgacccggttgatgtcgtcgacctgcatggttaatttgttcataaatattcgtaaaatttgacgataagaaagacatgaaaacataaaggaatggtgcgatgcagggtactcacaacacgagcgaagtcctggtcgcggtgcctggcgtagaggtctctagtgctcgcaacgtggggctgctgctccaagggagcgaaggtgaccctagtacgggtgcgtggctggtaccagcgtaggtaggcctggtacgactcctcagtgtgtgactctccctcgtggtccacgacctcctcggttgcgagcaaccagtcctcaacaaaagtcgccaacttggtgggctagtagccagctgaatgctgacccttgcgcgagtacctgcgaattaatgtgtaatattagtgtgaaacgacagatgttacaaattattgtaaacaggcagattttaatgcaacaacggaaagcgtagtgcaagatcttaccggtgaacagcagcttggacggtggtcggaaacggtactggaaagggctgacggaagccgaactgccgcatcacgcggaaaggggcgtgaggctcaacgcagatgtcgaagaccatcggaaccgtagtcatccagtacgcctggtccctggtgcagagtgtggacagacccaacggcgcacgagcctgggtagccgcggcactgtagggctcccacacgacgtcagtcgtcagaaggcggtcgaacaccataacaaactcaggatacgaccgcctaacctggacgtgagcccatcggcgctgcaatacgagacgattgatgtgatgtacaatgaacttagcaattaacttaacaatacgttaagatcgatgcaacgtacctgacgacggcaccacagagtacccatcgtagggtagtcgacctctggtcgctcctcgtacagtgactcctcgtacgcgtgctggtccacctcagggcggccgatcgcaatcctctcagctacccagatagaaagaaagagagggcacccaccaaaggtcgcgctgggatccgtcttcgtgcaagactcacaaagtgcacggtacagagccgccaacaacgcggaaccccagctccactgaggcacctcgcctaccgcggcgtcggcgatgctcctggcgtagtgcacgagtcccttgtcgaccgcgtgcccgtgaccgccacagaacatcacccagccaaaaagccagagcaagtacgcctccaaacatcggctgtacgagtactcgtcggcgtccgcctgtagctgctcaacctgcaagcagtcgataaaatgttaggcaccttaactgcggactaaatatgtaatacgattgtcatttcggtacaaaaacactcacggtgaactgaagcagccacctcttcgtaggtccggtgttgcggtggtgtcccaacggctcgagcgggaggtgcggtgcgcgctgtactagtgcgaaacgtgccgtcagatcgtcctgccagtccacagccgtggtcactggcccaacagcgtctcccgcgagcggtagccccaacaagtacgatacgtcctgtagggtaggggctacctcaccgcacggcaagtgaaaagtgtgcgtctctggcctccatcgatcgaccaaagctgctacgagcgacctgtccacggtccatcgtctggccgggtccgcgtcgccggccgcagcctccaccagccgacacatcggtaggaggccggcctcacgtagcctgcaataacaaattaatatgtcattataaaaaatattgcagtgcaactaacttatagtaaaacactgttcgtacctctcgacaaaggagtcgtgaaccgtgagtagctcaccgcacgtccgtgcccggaacgtcccaagctgagccccatgcaccacagtaaggtgagaccggtgtcggtgatctatcgccgggtccaacaactgaggtgtatcctgacgtgccatctctgaaaaatatagtgtttcgtgttagaacaattcaaaaaatagtaatgtaaaacaaaagataacttgcaaaattatgaaatagtaataaaatcatacgcgttaattatgtacaacaagagtacaggctatttaaatatagcaaacgttactaatggtacataacgatgacgtgcaatttaacatatatgtagagttcaataatataacataacattacgtgtcgaagtccgacatacatcagcatacataaagacgtttggcgccttagtccgacgttacatcacgagacctaaagacatgacatgccgaagtctgacattacacgacgaaacataaacacatcgataagttcgaaacgaattacaagcaaatccacatgccgacatagaacataagaactacaccacgtagccagacgtggcacgacgacgcctaggatgtggtcgagtggaggtagtgctttcacccgtagggcgagctccatctgctgctgatcctgatagtcctgcctccgccgcacttgatttctccttgtctttaggacaatgcttgtaggtgtgcccatgttcatcgcatttgctgcaacgcttcaccctgccagcctccgactcgtccatatcgttgcggatgcgacgagtcctcctccttccagccttgcctcggagcttcgatgggtcaggaatattgagtacttcatcgttagtctctgtgaactccccagctatgccgaacccataaatctcgccgctccatgtatgatatattgcttgcttactgaagtactatgacacaatattgtatctggtatgccacactccacagcggcagcaatgacatgggtgcatggcctgtggagcagcttcggctttgcacaagagcaatgacatgtgccgtcgtctttgagaacacactcctgcttcactctcttgcagtagatacccctgactgccttatcttgacatagtatctcaaacctgtgctgttgggtaccttgcactagagctcgatgtttcatggcctttttacgcaactcctctagctttttctgcatgaaagctccaaacaaaatgctgttgttcggcatagagggaagaactgcctggaaccgatccctaaaatacctgcatgtcccatgtaaaatgaactccactatgccaactagtggcagtccacggacaccgcgcatcacccagttgtaaacttctgccaaatttgttgtcattattccatatctagcaccacctgtgtcatacgccttggcccatttctcttttggttcatgcagaatccactgagaaaatttccgaatctccaatctagttcttctaaccaatgttggactatccgttgggagaggtccaagagcttgaggagggtcagcaacggcggtcgatggagccgctgcacgctgatcactgcatttggctgtcaactcatctaatctcttccaaagctcattgaattttttctcctggttctgattgcacagcctcttgaacatgttcatgagctccttgttcttgaattgcttgaagaaattagctcctatatgacgcatgcaccacctactctgtacatcttcccaaacaccggggtatcctcgttccatactcccaaactgcaactctcctatcgctcgcagaatgccagcgtgcctatcatgtatcaggcatacatttggcctcataccaacaacttttgttttaaccaatttcaggaaccagtaccagctatcggtattctcactctcaacaaaagcaaatgccaagggcaatacctgattgtttccatctacccctattgctgttagtatctggccccgatactttcctgtcaagaatgtcccatcaatgcagagaacaggacgacagttcacgaatgccatcttgcatgcatgtagagctaagaacgccctttgcagcacactcttgccaggatgttcaattgaggggaatttcttcacttcgtaagagctcccagggtttctttcctcgataacaccaagcaggcgtggcaaattgtcatacgaggcttcgtaagttccaaatctcatctctattattttctgtttggccctccaggccttggcatagctaatagtatacttgtatgtctcttcaatgtgtcggattattgaccttggttcatatgtgagattatcgatgacatgcgcatacatcttagatgcaacaaatgcacatgtaatgttcctatggtatttctgaacaccaggtagaaaacatgtatgcttggtaacaactgacactgtccaataatccttccatttccccttatatgcgtgcactctccagggacaaccatctttttccttaacacaccgaacttcatattgcgaccggttcgacttggcaacccaaaactctctatgaagtgacactgcaaaatgttttaccgcctccttcatatcttctgctctactataaatcgctccctgaataacctcattttctttgtactcccatctcacactatcctcttcagagacgatcagcccagaaaaatcctcactagcccattctgctggattaatatccgtctcatcatctgacgaatcaccttcctctacacgctcgttgtcagaatcctccctctccatttcatccacaatggcaccgacagtctccccctcgtcagccactccacctggttgaatgcccactggagctactacgcccccgtcctctcgtgcgttgacctcctccacagaagtctcgtttacttcagcacttggtccctcgccatcatccatgttcgtctgcacacctggatccttcgggtgaacaaacgggctgcagga

SEQ ID NO: 10734 - DNA, 3593 bp, Oryza sativa
tataccagtaaccatggaaccttgtatgcagctgattattccaggtacagtcatcgatactacacatatgcatattgcccaatatttatgaatgttgctctactgttcattgcccgactcaacatttagttaagagtgctctgttcattttcaaccatccaagacctgagatattcatctctgattgcatgaatctctgatgcagcatctggtaacagcattcggtctctgggttgttgctttgagcaggataagccgagcctaagaacggacaccaaacactgttgaataattcttctttttgtgcttgcatttgtcccatctgtatcatttgcttcttcatgcagccagattgttcgatcagctatgttcatggcgctctcaagaaaagaagctgcaacaaacttgtgcagatccattgaatccctgaaaatgtcatcagtgggacttcttccattaaacatctcaagcaacaatatacctaagctgtaagtatcacctgctctggttactgcagaaccttctccatactctacaatatttgcagttaaagttagtttttcaccgtactaccgacatgtaaaagatacaaagttccagtccaacccccacccatgagggaggaggtggagaaattgtaggatataatacaaaaatataatatttttgacctacctggtgcaatatatccaatggaacctcggattccaattgagctttttgaatattgaaagttctagttgtgcttttggggaggatttttgatatgccaaaatctccaacctttgcactcatgtcttctgcaagaagaatattacttggtttcaggtcacaatgaatgatcggtggctgacaactgttgtgaagataatccagtgcgtccaagatatcaaccacaatgctgagtctctgcagaaaggctcagtgtattgctgggagtgggattgcttgacgtgggatggagccaactatctaagcttccgttgggcatgtactcaaaaactaatgccttgaactcctgaccctgtgggtcaatacttgaacaacacagtgatgatctttgtcagacaccgatggcgaactcttctcaaagcctcacattcagcctgaaagctccttgaagatcctaattgtttaaggtcgaacacttttatggctacaggttcaccctcatcttgtaaagtgcatttataaacagaaccatatcttcctttgccaagcaagtttgcttctgaaaattcattgcttcctcttgataatgcataatatgaaatcctctgatattgttcctctataaccggagatatctcttggctattttgtcttccttttagtttcctgtgctgtaacataatcagaacaatagctgaagctaacaccagaattgctcctgttgttatgaaagctactttaagatatttcatccgttcttttctgtcctttcttacagcaggaattggacatggagccaagtgaagccgaggtattccaccacacaacttgtcgttccctgcaactgatgcatacgtaaggttcctgaaagcaccttcatctggtactttgccttgcaaattattgaaggacacatctaagtgccacagctgtgtcaaattttgtagggtttctgggattgatcctgacaaattgttgtgagctagacacagctgttgcagattgcccatgctaccaatggcattggggatgctaccagaaaacttgttcatggttaggttcagtatggcgatcccttttagttttgtcaaagattgaggtatgcttccttcaaacgagttgctatctagcagcaggtattccagcacctcacaatttcctatactgtcaggtatttgatcagatagctggtttcctgacagttctatactgtttaggttaaccaaggtaccaacttctgatggaatgggtcctgagagagtattatctgacaagattaagaaccaagaaagtgacggcagctcaaaaatttcttttgggaccgaaccgttcagatggtttatggacaaatctagagcaaatagcttctttagcttcccaagggttgcaggtattgggccttccaaatgggcatcgtatgcggctagtatattcaaattggtaagatttccaattactgacggtatgaggcctgacaatctagtgctgtacagagtaattatggccaagtctgctagcttccctatgctctcaggaatcactcctgacaaagaagtggaccctagatcgagcgtgtccaagccaatcaaattgccaatgtctgtggggatgctcccggagacgctattaccacgtaagaagaacttttgaagtgttgtcgacaggttaacaatagagattggcagctgcccaatgaaagaattttctgcgatatctagctgttgcagctgactgcagttggcaagtgaagttataaattcccagcccttcatgttatttgcctcaagtcggttgctagacaaggatagacgcacaagagatttcaaccttcccacggtaggaggcacaaatccactgaatttgttaccatcaaggtatacgtctgtgagtgatgatagattgaataaggaagaggggatgactccgctaaactggttcacagacagaacaaagtgttgcatgttaggtaatttgtcgccaatgttggcgggaatgcttcctttgagcttgttctcatatacttggagaacagtcagttttgacagattccatatggagggcgggaattcgccagagaggctgtttccgtcaagaccaatcttctgcagatttgggatgtttccgaggcttgacgggatcaggcctttcaggtggttgaagtccaactttaggaactcaagcgatgataggtttgctagcgaggctggaatcggccctgtgaagctgttgtttccaagatggagcttctggagccacgtcagtgtgttacccaacttcaccggaatgtggccactaagttggttatagcccagggtcaggtttatcaagctgatgcaggagctcagattatcagggaacgcaccggaaaacgaattgcttccaaggtcgaggatccgtagatgctggaggtggccgaggcttgggggaatctccccgtggagcccattggagctcaggttgaaccaccggaggaaggtgaggtttccgatggcaggagggagcgttccggcgagattactggacggcaggctcagccccaccaccctcgtcggcctatggcggctgcacttgacgccctcccagttgcagaagctggtgctgctgttccatgaggtgagcgtccttgagctgagccccgccttgaaagcgggcagcgtggcctcatcggtgctgccaccggcgatcgtcaggacggagatgagggacagtaatacaagaagcctcatgtggtttctttctttggttccgtctgtgagagagagaggagggagggtctttggagcataacatcagcttacaggctgagatattgctcctatcctatgatcctatttggacatctccagtgtttgcttgacttcattgaccgaatggtctactgttcaatgattacttggctgggactggttgacttgacctaa

SEQ ID NO: 10735 - DNA, 7813 bp, Oryza sativa
atggtcatcataacttgacagaaacgccgctgtaactaatattgttgcgtttctgattgcaggtcacataggcgaatatggtttgttgatgatcacaagtctggtgaaataatccttgagtttgatggtagactgaacaaatggggcgtcatcagcttccgttctgatgttaaagtcaagaaattgagtcctggaccgcaggtctctttccctacacaccaggttagttcatacaactatcaataacatatctggaaatatcacttagttaagatgcttctatcttttagcaagatttttcagggtacttcattattttcaaagggctgaaaaaaaactcgtttagctggcctggttcaaaattgctctgattgatgtgattattcttttaaaatgaaaactagtcaattttgaatgaaatgtgtttttattttggctcggctcattaacaagaaattatagaaaaataattttgaagaaagctcgataaaaagctgaccaagctttttcccatccctttattgttgtgctgtttgcagtctggctacatgcctacatcgccctcactacttctgccggtaccgtggatcatgattcatgaaagaggcaaggagaaagcatatgggagaaaatgttctgggattcttctaacagagagatttatcttggatgatcaatagaaaaagacttgctgtcctcaagttcaaggccactagtatcactgtatcaggattcgtatacatgcagtgatgctgtagatggactcaaagctagcagcagcgtagaagatggtgtagatacgtgcctatatgatttatgaattgttcctgttttggattctattgtgccgtctatttagttttattgcccattgatttgcactcgttctgctgtattgtctgtcaatgaaaagttgccggatgttatagaacgtattttctgaagttttagaaaagcttcaactctatagtatatttctaccaggctgtgctgatgcagtgatgcttctgcgagctgagtagctgactgctgttgattgctgatgatttattcggtgctttgagacgatcggcctcatctttcgcttatgcttatactccctccgtattttaatgtatgacgccgttgactttttgacaaacatttgatctttcgtcttattcaaaaaatttatgtaattataatttattttattgttacttgatttatcatcaaatattttttaagcatgacataagtatttttatatttgcataacatttttgaataagacgagtagccaaacgtacgttggttaaaaagtcaacggcgttatacattaaaatatggagcgagtacgtgaaagggcatgtagcctagtggttacaagagcctcagtagcacccgaagtcctgggttcgactccccgtggaagcgaattttccaggatttaacggcgttgtgctttcagtggtaggcgacgtacccgtcgacagcgaggcacctgtggtgacttcatcaatctctccaggatttattaccggcccagtcttcgaagatgctcataggggtgagtgtgcgtgcgttgtgagtgtctgtgttgtactgtgtaattctcaaaaaaaaaaggaggaagtacttatcagtcaaaatttaaattttcgatgttaaatttagagttgattttagagctttttcattaaagtttttttttcacctttgcttttacggcccgtttggttggagggaaattttaggagggattgtgagtttagagggatgaggctattaagagcatgcccaacagattacttattctattccctatcctcgaattaaagaaattttaaccaaaattctcatccaacagattccctaacctacctcccaataatgcaggttcccatatccgtatatctcgttactcatttgcagggaaccactttttcttcccaatcgcggtggtcgctgcttcgcgcgcgtagggggaaaatgttcccacgctccttttctcgccctactcaccagcaacaaaattcctcttcctcccaggcgtcagcggcggctttccaggcggcgaagcaacggccaaccccttcctcgcaggcgtcgtcgacggagttccacgtggagatgcagcagtcgtccccttcctctcagtcacaggggttggcgtcgatgttgctccaggcagcgatgtagcggccatacccctcctctcaggcgcaggcgccggcgttgctccaggcggctatgcagccgccgtcctcttcctcgcaggtgtcggcgtcggcgttgttccagggggtgcccgcacgtcgaccaccgctgccggcgcaagccccaccacctcctcgatttggggccgacggccctctgcgccccgcaccgctgcctcgccgtcgtcttcctcaacctccctactccagtatgcaggcgagagagtccatggggggacatgctccatgggagacactgaatcccctctcatacgaagctcctggcatcgatttctccacagcttattctgtgtgtgatgaagaattcctccatatgagcaatttcggtaaggctgtccctgattcgttcgatgtttagattaattttcagagtgttgcagcctgatctgatgtccattctatgactgacttccccggctagaattcaggaattcaggattcagaacacttagaggaaaatgtcagaaagtctgaaatttgtaccgtatcgaatggaagtctgaaatatgcaggatatgctctaaatctgaaagtctgaacacttataggaaatcaggtttcagaatatttagtaatgaaggatatgctctaaatgtgtggtatgctctgaaagtctgaaatatgctgtcaaatatttttgctatgtcaaatgtactcccaaagtctgaaatatgctctgaaagtttgaaatatttttctctcatcacagcatctttgaaatatgctctgaatttttgcattaagataatgttgttagataatttgatagataatgcaacaagatgcagtccatagtctatttttcaagataaaagaaccacctgcttttgccaatcagactttcagtttcatgaaagctgcaactacagaattataagtacaacaacataagtttagtaggattataataacttatacagttcttagctctaagtacaacagctgcttaattgaagtgatcatctgcatttagtatgcctcactttttagattagcagatgaacaaccacatgcttgtgccaaatattgaaaatagtgtctgaaagatgcaatttcagtatgtatgtgcctaatcactcactgtcgctgacatttattcttctttagttcccttctctgatgccatcatagacagtatgtgctctgaaatattgagaaactacttgctctgaatttttgctatgctctgaaagtatacaagtctgctttttttttttcctcaagtacatgctaacaaggttccccgattaattactgcatgacctataacagatccaccacgctttggaacttcatcatcgtcgaactcaccgtgcactatatcaaccgccgaagaaataaattcttcgtcaccatccgatgaaaactcatccaatagcatttggaggagggtgcttcgacgactcatctcctctttttgtttgccacggtgttggagcgtttaccacagggatgaagtgcaatggagggaactgatggcaggaatagaacaataatcaatctgcaaaattaattatcagatcaaacttaatattttccaacaatatatatccacatcaaaatactgacatagagattgactacggcacaagagattaatgggatttgctaaggattacctccttgatgacacgaattgctacgacatctccttggtgttccgttttttaacaaatcgcagcagtcaggacactggttggctggctggtgatgatggcgctaggtcacggcggcgcaagtgtggggaggaagaagtcgatcggcgctggtgcgggagggagaagacgtgcgcaagtaccgaactgggccccaccttgcttatgtggcaaactaacaaatgatagggaattgatttttgggcttctcttggaggagggggtcattgttgggcccaatttttattttggtattcctaattcagattttttgggaatcaaatattgggtgattgttgggcatgctctaagtgatttgtttggttgggagacatggaaaatttagtgggatagggatggtgaattgaggaaggaactccctccttttcaatacctgggtaggggcaggtaattgggagggaattcctcctttactttttctaagcaaatctgagccatctgtttttattaatgacttaatctccaactaaactccctatcaatttccattacctctaccaaacaagatattgagattaaaaatcaaattcccatcttaatctcattatcaattccctcgtgtaaactcccaatctccttccctcgagttaccaaacaagccgttagatcactaagaatacgtatataaaagttttattcacaaattttttccatttacaaatatgccgatgggtcctggtgatttacttaacaaatgtttgattagatcttcagttttatatacaaattcgttttgtctaaacagataaaattgacttattaatcttgggaaggccgttactcactctagactttactcctccttatctttttttttcttgaacgaacatttcatttcttatatttttgcatagtttttttaaggtagttatagacaaaagtgataatgattgggcttctaaataatgggtaagacttgtctccaacaagtgacccataagggcacctaaatctaaaatgggtttccgatagtattatttcagcctccaacagagtacctatacagaagacctattttacgtgctataagaggcataacctaaatctgagtatcctctctcctgaagacctatttgcagtaagggttctcttttaggccttattgttggagaagaccaaaaataggtattgaactcttttactgtagcgctatgcaaacgtgaaatgagtcttgtattttgggtttcattgttggagatagcctaaccaccacgcgccggaagccaaacccagttctccccgttcccgcctacattttcgccacgtcagcgatccgcaccgaaatgcatcgcagccgtttacggaaacagcatcgaacgtcacacgttcgtccacgttatcgatccgtggggaaaccactccaccaatcagcgcccacctcaagttcgctataaagtcgtcgcccccgtccccattctcttccccacatcgcagtcttgcaaacacacgcagcaaaatccacaccgcttcccctccccgagaagaagagagcagcatccatggcgcccaaggcggagaagaagccggccgcgaagaagcccgcggaggaggagcccgcggcggagaaggccgagaaggccccggcggggaagaagcccaaggcggagaagcgtctccccgccggcaagggcgagaagggcagcggcgaggggaagaaggcggggcggaagaaggggaagaagagcgtcgagacctacaagatctacatcttcaaggtgctcaagcaggtccaccccgacatcggcatctcctccaaggccatgtccatcatgaactccttcatcaacgacatcttcgagaagctcgccgccgaggccgccaagctcgcccgctacaacaagaagcccaccatcacctcccgggagatccagaccgccgtccgcctcgtcctccccggcgagcttgccaagcacgccgtctccgagggcaccaaggccgtcaccaagttcacttcctcttaggctgcacctggtgctattgtgctagtagtaatattagtttgatctatttatctactagctgtagtgcatcaatgatgggaaatggatgttggggatttagtgactgtaagaagaattaggtggggctgcttttgaggaacttctgtttcatggattcgaaatacactagtaatgcttttgtatcatgtgaatatgtgatctctcctatgttgtctttggttgccttgtgctgaacttgtgtttgttttaattaatttatgtctaattttggggaactaatctttgtgttgtagtaactatttgcattgtcttgcaaattcctcgtcatgttaccggaattgattctggagcatgcatgtttggagtttggaactgctgatgtgctcatgtagacgttattatggaagattgctattatttttgtttctgattaccttaattagctaatgtcactggccacaagacgaatttcactgggctccttttggggaactttttttttttctcatggatcaggaatactctttgatttccttgtgcttgaaggtgaactagtgatgcttatgtctagttttgtggaattaatcttcatgctattgctatttttcattgtctagcaaatcatcaaatccctctgcttgttactggaattttatttcttgagcatctattttggagtttggtactgctcgttggattatgttagttttagatttatggactggcactacttttgtactttggaccgtttgtggactgagcatttggagttcatgatgtttgcattcgaaacaaaacagaggttgttagaagagattagaactttgaaaattgtagtaaactttgttttagcttcgtctggtactaattcaaagaaatctaactcaagtggaaatagtactgaaactccacatatattgcctttgctatttcactatttcaggattatgcatgcctgcccgtttgctacatttctgtcctgaatgtcttatggaggttcctctgttgaagattagctaacaacaaatatgaggtatgcatcttttatcaaaccttgctttgggctgttctgttctgtgcaagatgtgctgactgaagagtgaagatgggactcttgtgggacttcttgtaatgcaatccttttattttctattcagggagattatttgaggtgatcaattatctttaaggttctacagggagagcatcctgaatttctgtttggcttgttcaaattaaatattccatgccaaacaactttagctttaactgattactgtggatatgtactagtatctttttctcatgaaaaagctttatagtggctagtacaaatccacagcgactgaaatgatggatctcatatttcttgggtgaacaatccttcattcctatttggttaattgtttgggctattgttcttctattctataattgtcatggatttggtatcctgtgctagaactgtttagatgcgatcttttttgctgctttgtttatgtcgaatctgaaaactggttgcctgggtatttgagtcagggagttaggaaattttgctgctatggttctgtaggtaactaggaattggtattgaattattattggtgctgcgtaacctttatttaacctctaaaatgcacgaccagtaactatagttggccataaggcccgaggcccgaaggcccggcccacggcacgcctttttggcccggcccaagcacggcacggcccgacttgggtcgggcccgtgctggcccggcccgaccgtcgggccgtgcctgggcctccccaccggcacgctgggctggcccggcacggtcgggccggcccggcacgatgggccggcaggccaggcccggtacataaagtatggggactaaaaatagacatataaatgtaactgtctaaagaatagggaccttaaatagacttattttagctatttatataccccagc

SEQ ID NO: 10736 - DNA, 2831 bp, Oryza sativa
ccgcctccgccgcgcccgagacgccgccgccgttcttggcctctccctttcatcggggattactgttaaccaatataccgcttctcagatattgttctctcttgtcaagattcggcagttcgctcttgcccgggacctgtttgataaaatgctccagtccggtgttcatctggatgagtatgtttacacggcaggcattcgagcttattgcgagtccaggaatctggatggtgcgagagggttggtggtaaggatggaaagcgagggggtcaaggccagcgctgtgccttacaatgtattgatgtatggcttatgcaagaatatgcgcgttcaggaggctgtggaggtgaagaatgtcatggtgaacataggagtgacagccgatgaagtgacataccgtactctggtctatggtttttgtcggatggaagagctggaaatggcactgaggataacacatgacatgatcaggcttggttttgtgccatcagaggctaattgctcatttatgattgacgagctacgcaagaaggagctggttgaggaggcattcagtttagcttgtaaattgggtgatttgggcatggtaccaaatgtgtttgcatacaatgcattgattgacaaactgtgcaagaatgaaaggtttgacgatgcagataggctctttaaagagatggcgggcaggggtctggagccaaatgaggtgacttatgctatattgatacatgccctgtgcaagagagggatgatagaagatgcactttgtttgttcgataagatgagggataagggtatcaaagtgacagtttatccatacaattccttaatcaatggttactgtaaacagggttctttggatcgggcaaggggacttttgagtggtatggttaaggagggattgacaccaactcagcatcatattctcccctaatagctggtttatgtaggaatggagatctgtctagttgcatggaactccacagggagatggctgagaggggcatcgcatggaataattatactttcacagcacttatcaatggtttctgcaaagataaaaaaatggatgaagctgctaggctgtttgataaaatgattgacagcaatgtaataccaaatgaagtgacctttaatgttatgatagaagggtattgccttgttggaaatataagaaaggcattccagttatatgatcaaatggtggaaatggggctcaaacctgataattacacttatagatcattaataagtggactttgcttgaccagtggagtgtcaaaagcaaatgaatttgttgctgatctagaaaatagctatgctgtgctaaacaactttagcctgacagcgcttctgtatggattctttagagaaggaaggttcactgaaacataccatctttgggatgagatggcagtgcgaggagtcaagcttgatcttgtcagttttaccataatcgtgtatgctgctctgaaacagcatgataaggaaaaatcatgtgtctatttagggagatgaaagaacaaggtgtcaagccagatgatatattctacacatgcatgattgatgcactgtcaaaggaagaaaatatgatccaagctttaaactgctgggatcagatggttgtggatggctactctccaaacactgtaacacatacagtcttgataaataatctctgcaagccagggtatttgggcagtgcagagctcctctgtaaagagatgttcactgggaatgttcttccaaatgaatttacctataagtgttttcttgatcattttgaactgaggggacatggaaaagggcaagaatctccattcagccatgcttcaaggccatctagctagcatagtgtcatttaacatattgatcaagggcctctgcaaggctggaaagatccaagaggcaattgaccttatgagcaagatcactgaaagtggtttctctccagattgcatcagctattctacaataatacatgagctctgtaagatgggtgatataaacaaagcatttgagctttggaatgaaatgctctacaagggattaaaacctgatgttgtagcatacaacatttttatacggtggtgcaatgttcatggtgaatctgataaggctttgggaatatacactaatatgattagaagtggggtgcaaccaaactgggatacgtatagagctcttctctcaggaatttctctgatggtcagcaaggggcaggcattgctgcttaccacctgatgtctagggcagtgcatttcaggctctcatctaatggcataagttgctatcattcatctagaacaggatccatgaaatagttccctgaactgtagctacattatgacttcagttgcttcagagggacaaaacaatacatacaaatttctgtatatgagctcatggattctacacataacaagtaagcaatttaagacaattacttttctaccaaatgtatgttgtccacaatcttgcagatagtattgtaccatttgtacatttgagctatcagattttaatttgacagtacctttactgctttacattctttacttcaagaaaaagtgttttttgttaatgaatgtttttttttcttatttcatgccatcttactattgatgtttcctgttaagactgaaatagtgttattaagacacattcgtcttggtaaaagttctatagattccaagcttaaaaattcattatcaactgtttggactttacattcaacattgctaagacaacaattatttccaactttgcaattttacataaccttgtctgaaaatataaaaaaggagattacacccttttaagggatttatttt

SEQ ID NO: 10737 - DNA, 7050 bp, Oryza sativa
tttcgaaacggagggagtacgtcattaacttgacaatacaaccgaccattcccgatgacacatattgagcaataaaaatgtggaaccaccagctgttacaaagtactccatctagagcattagcatgtagattaatttaatcactaacgagaacgatcaaacaacaatacacatgcgtgcaacaattagaatcacaggctcgcagctactacatatgggcaacaaacaaaaccgcaaaattatcagcaccagtctatcactaacagcgactcacctggaccgtgccggatcggtcacgaagggtgaggaaggtgaggccggcgtgggcgcggtggagagcgacccagccgcagaggcgcacgcggcggccggcgtcaccggcgccgagctcgccgcacagcgcgtccctcgcaggccactgcagcggctgcagcctctcgcgcttcgcctcggccgcgggcgccgccgcttcctcctccggcggcggggtcgccgcgtcggtggccgctagggttcggagcggagacggcgagcacgaggccgacgaggtggaggaggcggtggagagcagtaggaggcggcggaggtgcgaggcggtggggctagggttgagcggctttaggcgggagaggagggagagcggcgaggcgcggaggagagaggaagccattggattgggctcggagacggtgggaaagcgagcagaggaggacaagggcttgggttgggttttggaggaagacgggatgggatcgccttatcctcctgcacgaatcttacagcacaagtttttcgcctgcctgcaagcacaagcagatagaaccatcgccagaattcgaaatcaaaagctcttcgacaccaaaatcaaaagtgaattcgcgccggaacatttcatgagaaacgtaggagtacttctcagcttatttaatccaaagtaaactgcacgaccaccgtgcttcaccaaattggagcagcaataggcgtcaaaattgtgcttacaaattcagatcccgccaaggcagaaccaaattttgaaaactgcacaaatcacaaaacgcgcaacaccagtagcaggggggaaataaaattggcgcgatgtagagacaattttttttttcagagcgcgcgcgttcatcaggcgaaaaattcgtgaacatcgtgaagttatcgcttccaccgttccaggcgcataacatcaggacaacgaaagttttgaaaccatgaaatcaaacagcgcccagattcactgccagacttcacaacaaattcaaattaaacatcgaaacatgcactaaatgaaaatgaaatacagccccaacgaggctctggataggaaatttaagacaaaatattcagagattttcagataagcaaagacagcgcaggagcaggagcaggagcagattatcgtacaaaccacaggattggaggcgacaggggaataatcaagaacatgtaaaaggcaagcagattaagccatcatcatcataattactactttaccagatccagataacaatattgtcctaaatccaccaggatatttcttacatgaacccaagatagtcaaaagccagaataactacagcacagtaccataccatccaaaattccaacctaccacaactaccattagcagcaagacgagaaaggggcctatgagcctaagcggaggtgaacttggtcacagccttggtgccctcggagacggcgtgcttggcaagctcgccggggaggacgaggcggacggaggtctggatctcgcgggaggtgatggtgggcttcttgttgtagcgggcgagcttggcggcctcggcggcgagcttctcgaagatgtcgttgatgaaggagttcatgatggacatggccttggaggagatgccgatgtcggggtggacctgcttgagcaccttgaagatgtagatcttgtaggtctcgacgctcttcttcgccttcttcctcccagcgcggtccttcttcccctcgccggagcccttctcgcccttgccggcggggagccgcttctccgccttgggcttcttcccggccggggccttctcggccttctccgccgcgggctcctcctccgcgggcttcttcgcggccggcttcttctccgccttgggcgccatggatgctgctctcttcttctcgggaaggggaaacggtggtggttcttttgctgtgtgtggatcgcaagatttgcggttgggaagaggaggagacggggccgattggttttatagaagaggggatgtgcgccctgattggtggaaagcatgcggcgcggatcgatgacgtggaaggattcgtgtcgttcgccgctgtttgcggtgaacgggtgggatgcgtttcggcgcggattgctgacgtggtgaaatatctgggcgcgaagagacgagcgcggggcgggattttctcgcgcgtgagcgaaattgtggaagggcccatgggtcatagggacgcgacgatttttgtgtatcgagaattacaattttttttagagtactggatttttttaagttttaatgtatacataagaaattttgaccaaatattgatttcaaaatgtttcacgataaatgcgcaattctataatagattctaccatggtttttatgtggtactattatgctattatgcaaaggcgtcatgctgaactctttattgttgtaaaattcaagtcaataaggttctgataaaattcttgggtgaaaaatcgattaattcatttagccactttatttggctttccaagatatactaggtgtgattttctgtgaggttctagaccgggctaggcaataactatatccgcttccaaatacttttttatttgtttgacaagcgttgttttaacttcgatcatggctatttttaagtgattagactatgatgaacaaatattaatgcttaggttaggcttcaacacgccctaataatatgatatattataagtatttaattttaaagaaaaaacaaatggtcaaagtttaaatatgaatattttgtgacaaatagaatcttggaacaggtggagtacaaatgaaatagaatggaaagcttgatgctaaaggcacttgagacatcatcaaatgtgaatcacttttcaaaatgaaattaaaaactcagttaaacattagcagaaagttgattttgacatagcttgtctttggcctacaatatattaaactatgtttgttgacaaatatatcaactcattggcaattccctatttttcaagtctaatttaatctactcaaccccgatatcaatatcctcctcgacccagctttgttctgccaagtgccaatgccttggcttccctcactgctgctcttgagttcgcgaccatgtagtcgttgtcgcttcagctgctcgtgttgatctcttagctcgatgctgcaaccaagataattgccttcacattcgtttatgccatgcgccactaaaattattctaataacaagagaaaatcccttgcactcccctgatatttgagtcgatctctaacgtgtccttcagttttttttctttccatggtataattatattatttttttgaggagaacgacggtaggagatctgccaaaatttaacattaggagagagaaattacaaagtagcacagaggttcagaggttacaagccaaggaatggaaagataaatacagctacaggaaaagctaaaaaaaattattggggtttaaaggccaagcagcgcatatcaatagcttgcttgataaaataagctacttcaatctctgaacaggaagagttttggaaaattcttctatttctttctaaccaaatattccagcaagtagttagaagagtttccctgaccaactgcacatccttcttagagcctgcaaatttggttccagaccaccatgttgacacatccaggacaggatttattccgaccgaagtcaagttttggaattgacaaattagggtctacacttgtctgacaaacacacaatcactgaacaaatgatttgtatcttcaaaggcacaaccacaaacgcaacatatccaattgcaaggccaatgcctgtggagcagattttgggcagtcaagttttttgatggagaactagccaaccaaagaatttatttttggttcagtcggggaatttccatagagaatcaaactcattggtggcaaatgagccttcgaactggaaaaggtaagcactctcaatcgcgtgagaagtggcagattcagatgttctccatggtataattatggattttgatttttggtctctttccatattcttttctttaattggccatttaatagttatgaaaagtccattttggcatcagcatgaaaggaaaacataatttagaattatctatatgagattatcatgtattcaatattttgttgtgtgaggtattattcatgacaaaatttgttttgcacatagacgatagagagtttaatagttattcctttaattatagcaaatctaagtagtgtgtttttggatgatatatacaatagatttcaatgcgccctatatgggtaaggtataccctctatcctactacttatgtaattttatggatacaccgcaccttcgtgtgtatggtaaagctccatatgcaataaggaaatcgataagagattatggaaataatcctcgcgggcaagtacataacaaagatctactcggaaaggattaggaatatactatatcgtgcaaggtcctaggtcttcgagttccaggggattcacggtgtaaatacatacccttaaggggtccaaggttttgagtcataagcacaagacaccaccaccataatctcggaggacttgaagcctattcaccgatagatctcgtcgagctaatctcaacaaggatttcatcggtaatctcataatcatttgttctctattgtactatgtgtttttccatatcaatctcatataaactgtaataggactattatcttgcgaggggcatgaaccagtataatccttgttttttgtttgcttgatgttgaatcgtgtagatcctcataccaacgtatcccaataccctcatcatccggtctacgggtatcccccgtcgacaaagggtaaattcaactggaataggactagattctatttaaaaaatatgtgtttgcataaccgtgggtactaagatatcaatattggagacattcacaagtacaccagaatagcttcaattcttcactaactatatattcttatagtttcctcgcactagattatctcatatgttaattcaatctatcttttctaacacgtatctacgttatcttattaaaaaaactaatataaatacataaaagtataagttaaggttatagtttctttgatggtaaaacaagtaacaacaaaataaataatatatatagttttttaataagatagatggttaaacactatgtgaaaaaatcaacggtgtcatacattttgaaatggagggagtatatccactaatgtatttggggataccatgtcattgatcattgttctcgaatgacaactgcttcacgtcgaaagacgtggtaaactcggtgagtggttggaatagtaaagcaatgtattaattgataaaaatttttgggatctccccattacatggctctaggagactatttataatcctagtacaggcttgtaccctttaggatttggttagtacatgtgaatttgcatagttacccttaccgtagggacattacaatgtgtatacagtgtcttttgcatttatgggccttgaggcaacccccttgggccggcccattagttgtcgaagggcctctataggccgctgggcctcctatgtccttagccgaaggtatctactacttcggggcgatggccttgtgcttcgccctacaaccttcgcccgtggtgactctccagttgaccgatgagcttggaggtgaacccttcggtctccattccatggcttcgcgccagtcttgatggcaaaacctacttggttctttgtcattctacttcgcccaaggactttggcccttggcttcactagtggcacatgtctgggacttagccaatcctcgatgttttgggtggtttcggtaggtcggccgaaggccctcatgacatacctccaacacttacagatatagaatattggaatagagtataccaaagtaccaacctatgttgtgccttaagttatctcatatatttgaatttcattttattttgttacaaacttaaaagcaacaccaatggttcccaaaatggtagagggatggtagtgcggagagagtgacgtgtaagcgaggaatcaagtgggagggatgggggagtgatttatgtttctatttccattggtagtatcgagagtcaatttgtactgttccatttttttcttacctaaaccgcttattaccaactaaataataaattatgggttaaacttttatatacttatccttaacgagtcaaaaataaatgttgtaaaataatcttcgatgaagaaaccataaaatcaactataaaattaagttttaaattttaaaatatggcttataaatataagcataaacgaaatgatggaaaatagatgtcttttagagagaagaatctattcacgcctcaaactttaattaggaattccaaaaacataattttggatggtttttttgttatccgttggacatgctctgattagggatactgttagagccacagcaataaaactattttctttagcgaggaatacaactatactaaaatcatggtattgaaatcacagagtattttgggtagtgatgctcgtgagcctatctgacgttgattcatgatctaacggccgttctgcacttactgcagtcatctactgctaggcattttgctcatcttcactgtcaaatctcaatcgctcgccgtcgccccccgcccgacacaccggcggccggcctgtgcgacggcgatcctcaccaccaccgcctccgatgcctccgccggcacgccggcgtatcgccggcgatcccaactccacgtcgatcacctcacatgccggcatg

SEQ ID NO: 10738 - DNA, 20315 bp, Oryza sativa
  unsure (1)..(20315): unsure at all n locations
ttggtgacccgaagcggaagagtgtatcatttcaatccttggaatgaaaggcgaaatgctgaagttgttgacattcgctaccacgcccgagtctgcattgaaggtatcccgatgcatgcaagatcagaagacatggcggcaaagctcataggctgcaaaagctcagtgcactacatagaagaatactcccgtcgccggaacttcaaccgtacttttgatctttggatttggagcttagacttgagcaccatcccaaaggccacccagttcacaatcacaaggccagatagagaagcaagggctactgagatcccttttcctgacctggagccatcccagccggctccaactgatacaaagaaaggcctcacttatccggtcatcattcacatagacactgtccaggacctcttctctcgacagggtcgggtcttcatgtggcactatggagtgcctgatgatgtcacccggatgaggtcgatggctcacccaattcaagcctgcagaacccttccggcgccggagagaaggtctgatgatgaagacgaccacgagcagcgttcaagaaggaggcatagaagtcgctctctttggaaccgcttaggcggtcgttcgtcaagcaaaagcagagagcctggtcttgacaaccggagttcatacaatcaagagacaaggggaagacagagagaacgagctgctgacatcaatagaagtagaagccgacatctgtccaggtcggtcaaacctggagaaacaagaatcaggcgtcaatcggcgacacctccgcatctctctgaccctgctccagcagacaaggtttcctccccctgcaaacctttcagccattcaagagatagcagccctgaaaatgggcattgctctgcagttgcttctcctcctctcgaacctctctcacctgacatattgcctgtgtcacaggagcaaggggcgttgctcatgcttaaaaggcacctagatcctatgctgcatgaggctatggtgggaggttcaatttattcccctgacactactctgccacgccctgcttcccctgtttttgttctttcatctgctgcagaaccacaagagaacttagtggatgaggcccagcatgatgtggagacattcctagcagaggtgaccacgcccattcagcagccactgctgtctgcgccaggaacaaagctgcgtcgaccctgccgcaataaggtgaccactcctattcaaaggcatagtgcaagattggcactgaaagtcagacgcagtacaaagcttgaattaattgcacaagaaattcttgcaaagcaatttggtgttcttgatgataacaagcttttaagtgatcaaattaagaaactctatttgcagcattacaagaagccgctctccccagcagacatgaagacaatcacgaccctggtggaaaacggaggctgcaaaggagttcgtctgcgcgctaagaaggcggcctctatggtgccgatttgaagcagttgtcgcgtcaaaagttgccctacgtgatgatgatgttaggctgcttaagtagaagaatactgtccttgttctctgtattgcaaatgcgcacctcttcgtgtttctgccaatcttcctggctgtgtttcagaggtcgtcagctgagctccatcccaaccatcgcatacaaggccccctcagctgttgtgtcttttgtttatgtcgcagctagactgtttcattctaaactggaatgttagaggcttgaacaaccaagctagaaaaggaagtgttaagcttttggtagaacaaatgaatgcaacaatagtctgtcttcaggagacaaagatgaatgaaatcactgatgttgatgttctacacantcttggtaatcgtttcagaaatgattttgcctatctccctgctgatggcactagagggggtattctgcttgcctgcaatggcaattttttcagcctctccaatgttgttcagaagcagtttagcctcacagcaacagtaaccatgaaaaacgataatgctagatggtccttaactgtagtttatgggccacaacaagatgctcagaaaattgaattccttgctgaactccaggaagttgaacagatggtttcccttccttggcttttaattggagatttcaacctaatctacaaaacctcagataagaacaatagtaggctaaacaggggaatgatgcagcgtttcaaaggtactctggacaggttggggataaaagaacttcacctttcagggagaaaattcacttggacacaggagtgtgctaacccaacccaaacaaaaattgatcgtgctttctgttgtcctgattgggatgtcctctttgactctgcgcacatgtctgcactctcttcgtcctgctctaaccatgcccctttattcataactggctgtatggaaagagaacaaaataattccttccgctttgaatcttattggctcaagctcccagatttccggcaagtaactgcagagtcctggaataggccactacagactaccaatcctttcgtgcgactccatttaaaattaaaaaggcttgcaagagatcttagaagatggaaatcaaccagaataggagatataagattgcaattggcaattgcaaatgaagtagtctttcaactggatgttgctcaagaggatagagtattatcggaggaagaacagtgcctccggaaactcttaaaatcaagggtgcttggactggcagctttagagagaatacgactaaggcaaagagccaggatcacttggttaaagcatggagacgttaactctaaattcttccaaatcaaagcaaatggtagaaagagaaaaaatcacatacagatccttcgaactccagatggctttgctgtaactaaagatcaaaagcaggaagaattgaagcgttacttcacacaaaaattaggagcctttgctctcagaaatcagagattaaacttggctgctctcaatctccctacgcttgatctctcagatctcgatgataacttcactgaagaagaactcaaaaatgcaatctctgacttgccttcggaaaaatctcctggaccagatggatttattggagcctttttcaaacaagcatgggacataataaaaacagatctcatacaagctgtttccttctttggagatatgggatgtgcaagactgcaagaactcaattcggcacatatctgcctcatccctaaaaaggcggatgcaacaaaagcgaaggatttccggccaataagtctaatgcatagttttgcaaaaatagtagctaaattactagcaaacagacttgcaccaaaattagatgagctagtctctcaaagtcaaagtgcattcattaggaaaagagcaatacatgacaatgtcctgtttgttcagaaaaaaaagcctactcttttcctcaaagttgacatatcgaaggctttcgacacagttaattgggcatacttgctagaggtccttcaaatctttggctttggacataaatggtgcaactggatttccaacctactaggtacttcctcttctgcggttcttcttaatggtatcccaggtcaggaaatagaccgtgctagaggtcttcggcagggcgatcccctttcccccatgcttttcatccttgcaatggaacccctgcacaaattattcaagaaagcagaggatcttggccttctctctagtctgcaaagacagcggcgcttcagatgttctctctacgtagatgatgttggtctttttataaagcccattcgagaagaaatgctagtccttcgtggaattctttctgtctttgcagatgccagtggacttcacacaaacatggaaaaaacatagatcttcccgataagctgtaacggagtcaacctagataactgcctttccatcttcccaggtggaatttcaaacttcccatgtaagtacttgggcctgcctttgcacacaagaaaattggggaaattagagcttcaacctctggtggacaaagtgggatcgagaattcctggttggaaaggtcgcttcttcacttcggcaggtagagaggtgctggttaaaaacactctttcctctaccccaatttatcacctaacaattctccagcaaaataaatggctttacaaaaggatcgatcgccttaggcgagctttcctttggaaaggtgacgatcctgaaaacgttagcgggggcagttgtcttttgaattggacagtcgtctgcaagcccaaacctttgggcgggcttggaattctcaatttagagaaattcgctcgggctttaagacttcgatggctctggtacgaatggaaagaggaaaataaaccctggatcaatatggaaattccatgtgatgagatggacagaaatctcttcagagcaagtacacaaatttccctgggaaacgaaaagaaatgcaagttttggtcagacaattggctgcaaggatacgctcctaaagacatagcgccgacattattcagattagcaaagaggaaaacaaactgcgtagcctttgagctgcacaataatcactggatcacttccttaagaacaatcacttcaataaatgagatcaatgagctggtgcacctaggcagtaagctgcatgagatcagattacaccccaattctttggatagtatcacgtggaagtggactaatcatggtgaatactctgcaaaaagcgcttatgaaatgcagtttgtaggatcagttgccaacacaaattttatgccactttggagagctgaagcggaacctaagcatcggttctttggctggttaattttacatcaaagaattctcacagctgaaaacctccttttaagacattggccatgcgattggatttacagcttatgtacagatgcttttgaggacgcaaaccatttggcaaaggagtgcagtttcactaacacggtttggtcccaagtttgtagctggctggacatcatgcagaccccaaatcaactacaggatgcaaacattttagaatggtggacctcaatcatacattcaacttatggaaggagaagaagaaaactgataggggcacttcttataacctggtggcaggtgtggcttgagcgcaatcgaagaattttccatcaaaagcaactaagtgccacccaagtagctttcttagtaaaggaaaatatagatgccattcagattttgcgccatacataaaggcttgtgcttagctctagttgatagcattatgtatgtaaatctctgaaaatgaaaactgaaaatgtcacctagtggtctactctttcttgacctctctaactgcttctccttctaatatatccggcagagctcctgccgtcttttgcttaaaaaaatatatttcatcttttttagttaagttattttaggtcggagaaaatatatatctgacgtgcctatcaacaagacaacaacgtagagttgtcagcattagcttgccacaggtttgacttgcaagttgcatgtgagtgtagcttcgacgcagcaacctggtgacctggattcgtggagagcaaacgaattgggatgtgcgagccgagcagccacctagcaaggtgtcgcgtcagactactgacacatggcccaaacagccaaacgcacagtcgtctcagcccacctaacctaacgatggtcggcctacgggcctcattgctctccatgctcacggcccacggtagagggaggcatgggccgccccctatctacgccggcctttacgggatcaggtgggctctggctctgaagatcgagctcgacaggcaccgctcggaggaggagaaggcggagacgatcgaagagttcgccgcgaggttgcgcagtggccgctgctttggcaattggattggacagtggatgagtggaagaggaacaagatttactagtagtagctgatgagtatagctcagtgatttaataatatccattatcttatcaaccgcaagcgcatagagccatagaacggaacaaatttacaccggattaccgggttagaaccatactaggttttacagatttatcgtcagattcgtaatatccgcgtgcacagcaattgcctatcatatctaccgtcgaattcgctatggttatcatatcgttttccttaaaataatgcagaatacaactatacatagagataatggaaaattacaaaatcaaatatacggaaagatcgcggttgttggcaatcgtgcaccaatcggtttcacgctccatatattccgtgaaaatttgctcgacttaacaactatacaaagcgatctgatcctgcgagggttttacgtacgcggcgcttggttgaagcaggcaacaacatgggcaacgccgccgccgtgccgtcgtcgtgcgcttcggcggacgcggcgccgtcgacgacgccgaccatcaagctgctcatcgccaaggaggcccaggtcgtgctcttcgccgaggccggcaaggacgtcgtcgacttcctcgtcgggctcctcgccatgccggtcggcgccgtggtgaactgctcgcgggcgagaacgcgctcggcggcgtcgcgaacgtgtacgccagcgtgaggaggatggacgccgcgtacatgcagagcgcggaggcgcgcgacgcgctgctgaacccggcgccggcgcacccctgcctcgccgccaccgccggtggcttcccgtccctcgtccagcccccgcgcgtccaggcgccgtacgttgctcctcctcctcctccgccgccgccgccgggccacccggcctaccagtgttcgaccatccggccgacgaccccgtctctgccgtctctgaaggcggcgttcccgcccttcggcgcggggatgtcgtcggacacgggctgccgctgttcgacctgcctcgccgccgcccagactggcaaagggttcgtgcgggacgtggtgacgtacaccgtcatggacgacctcaccttcatgcccatgtcgagcatctccagcatcgcgctgctcagcaagctcggcgtcgaggacctctccgcgctcgaggaaaagacggtcaagatcggctaccaagaggtgataaattaaccagataaattcttcatcgaattctccatactaatttactacttagggtgtgtttagttcacgtcaaaattaaaagtttgattgaaattagaatgatgtgacggaaagttggaagttactccctccgtcaaaaaaaaaaaagacgaaccctggtttccgtgcccaatgtttgactgtccgttttatttaaaaaaataatgaaaaaaattaaaaagacatgttttatcatctaacaacaataaaaatacgaattataaaaaaatttcatataagacggacagttaaagttagacacgcaaacccagggtttgtctttttttttaaggacgaagggagtatgtgtgtaggaaagttttgatgtgatagaaaaattagaaatttaaagaaaaagtttgaaactaaactcggcttactttgttttgatgcgaatttgcagggtttggagattctgaaggcatcgttgcagtccaagaccgtgttgacagatgtcttcctgaacaggaagaagaaggctcgtgccggcgacaagcaccatagatccggcgacaagaacgtcgacgcccgagcaacgagcgagaagaaagacgccgccgccgcagtccagatggagaagagcgcgccgccgatgccacatgattttgacgtctagttcagttcagattaatgtcaaaaaaacagatcctacttttgaaagaactttaccaccaaacagaagcataatgcgttggttgatttctgcgacgttcttgtaggaggcctttaaaatttatgtagtctacgtcatgctcatgtggaaattatttcgaattcagtccaaattcttcattaaggagaaagaaatttcgagttcttctgagcattgctgctgcttgaactgaaccagacaggaacggcgaaagacaacagcaagaggagagttcatagattgctcgagcaaaagagatgcaagcctcgaccggtccagtccaaaaagcaaaggaaaaccggacaacaccggatcaaattgagagtttcagaggcaagcaaatcaagaacagtcaagcacattagaaacagcggtagcattagaaacagcagtacagtagtacacatggtgattcttaccagcggagagtcctgattcacacagattaagggggacttctacgcacactactatacgggtattgcttgaacatcccaaattgcttcaggcttaaccttcatcatgctgcacttcagctactagctagcaaaagatctggggcgcgcacgagtgcacgacggcacaagatactactagtagtacgcattaatttacaggcatcactaaagaccaatacagtcgtatagttaactacttatcgatcgagatggcttgcattttgacatcgccagcgaccagcgttgttgaagtagtagtagaattcaggcttgctttgcaggcctcctggcaaggaaaacgtcgctgagaacggtcttggactgcagcgaggccctcaggatcgccaggccctacaaaacacaaacacaacatatatgcagcatcacggacatggcaacgtgtacatgcaaagcactaatataaaacagagaaagagaagaggagtggtgagtgttgactgatgaatgatgattagtagataatttagtttatcacctcagtgtagccgagctgcacggtctgctccttgagcgcgcccaggtccttgacggcgaacgtgttgagcagcgtgatgctggagatggacgacatgggcgacacggtgaggtcgtccatcaccgtgtacgtcacgatgccctgcacgaaccccttccccgccccttcggctgcagcggcctgcagcttctgggcagcggttggtgcggcatacgtgcatgccgttgtcatctggttgccgcaggacggacacttgacgccgctcacgtccgtcacgtagtagaaacagtcgtaggagcggcagctgaagaagctcttgggctgcgaagaagacggggccggcaagcggaggacggaggtgttggagctggccgccggcgagagcacgacggggctgagcagcgcgttcttggaggcgccgggctggacgtaggtgccgtcgagcttctcgacgctggcgtagaggttgccgacgcagccgaccatggagtccttcccgagcagcttgacggccgtgccgaccggcagcgccaggagggagaagaggaagtcgacgacatccttgctcgcctccgcgaacagcactcgctgggcattggtgtcgacgagcagcttcatgctcagcgcggtggtggaggctgccattgcgcgagctttgccaactgcttttctccgcctacactactactggtagtacactagtactagcgcttcagcaagcgggtgggtgatctgaggctctgagcgactgagcagcacatgtctcggcggcggccgcctgctcgtgatacttatggtcgggggtcggcgatgcacgaggggcagcgcctcttcgagcttaagagcatctccagacagcctctccaaatcactctccaaccgtctatttagccaaatctccatttaattagcaattcaaatttgttatttactccaatagtctctccattcatcctttctattctgatttctattctgagccctgtttagatgggactaaaacttttaagtccctatcacatcggatgtttgaaaattaattataaatattaaacgtagactattaataaaacccatccataatcttggactaatttgcgagacgaatctaatgagcctaattaatccatgattagcctatgtgatgctacagtaaatattctctaattatagattaattaggcttaaaaaatttgtctcgtgaattagcttttatttatgtaattagttttgtaagtagtttatatttaatactctaaattagtgtctaaagacagggactaaagttaagtcctggatctaaacaccacctgagtgcatgacagtaggatccgcatgtcagcctcaactttttcttcttcctcgttttctcccccttttcccgtccccggtcccctccacgcctcgcccctcctcccctatgtccttgtcctcctccgtctccgcctcggccgattcgtgtgtgcgagtcaacagcggtggcggcggcgagaagggagaagccggcgacggcgaattcgttcgcgcgaggcaacggagatagcggatccactccttgccgagaaggaagaagatgccgacggatgtggccgggaactgaggcggtggcggaaacacgcttctctctccattccttgacgccggcggccgacgagcaggaggccgcgggtgcgctcgccgtcgtgctgccccaccgccgcatcctcctccttcactgctctcaaccgacgcgggtagtgctattgcgggagggaaaagcctcttcagcgtgggatccaccaatggcaaggcaggttgggctaaccaaatttggccatgaggggatgagtttggctaatcatttagcttagccatcctaatagagaggttgttggagtggattttttttggttaaaatagccaaatttagctgctctaagccaaaacatagggggtgtttagactttagatccagggaagtaaagttttagcgtgtcccatcggatacacagacacacatttgaaatattaaacgtagtataataacaaaacaaattacataatccgcctgtaaactgcttgacgaatttattaagcataattaatccgtcattagtaaatgtttattgtaacaccacgttgtaaaatcatggcgcaattaaacttaaaagatttgtctctcaatttacacgtaaactgtgtaattgatttttttcgtccatatttaatactcgatgtatctatccaaatattcgatgtgataaggtgaaaaatttcaggtgagatttaaacagggccatagtataaagtttcttcgccttctgcgtgcggtagtgggttttgagatgaggtgatgcgagagggcgtcgtacagcgtgcagattacagacgcagatagtacttgtgtcattacagatttattacagtgcgtaggtagcaatgcatacagcagcgttagtgcgtgatgagcgcacgaactgaacgcatgacgatttttattttgctgtcaagcaacctctgagcggaagcaaaagattttttacggctctaaattttttttggaaaattggtcggtaatcagatgcaaccgaggcaaacaccaaactagttaagcgcctggaactgcacacatactagttcgctacaaatacaccttcgagctgaaccatcatccatcaatacagccatacagcatacaggagcatataccgagttaccgaccatgcccgatcgaagttgggtagtagatacgaagtacttgagtagtagtatactgaagtctaaaggtataaaagcaaaataaaagacgatactccttgtagctagggatgcatcatgcatggacacacacgagcaatgcatcacaaaagctcaacttatcctaaacatatcgatctaaaattctaaatagtccaacttaccatcttcatgtcagtcgtcatccgtcaggcgtccatgacctataactactctaaggcagcgttcgttcggaggacattgagggagaaagcacttcgtttttcgcacacacgctttccaaactactaaacggtgcatttttttgtaaaaaatttttatagaaaagttgctttaaaaaatcatattaatctatttttaaaatttaaaataattaatacttaattaatcatgagctaatggctcacctcgttttacgtatcttctcaatctactcaatcccattcttctcaaacacaccctaaagctgtgtttagttcagcgtaaagtttagattttaattaaaattggagatgatgtgactaaaaaattgtgtgtgtataacaggttgatgtgatggaaaaggattgaagtttggatccaaactttggatctaaacacagcctaagcttgaattgctggtttcttgccaacgaaaacgttgaggactaggctttataaaccacgaacaacatgtacgacttttttttactcaaattatttctaattgcctcatacaaatttttctactgtttatcagcgtaactcaacagccaaatagcttgggcacttgacaagctatccgacaatagtcacgaagagattgatctgctttaaactttttattggattcatgagatggacaaccagcctatccatggtcaaaatttctcaagagcagaagcacattcgcaaaaggtgaatgtgctgtgacaggttgggtgcccggtgtagacaatggatgttcctatataactcaaaccttgttacaagcagtgcactcacttcacgtacggaagccaagatccttcaattgctgtggatctacaggagatggcgctttggtgagtgaacattgagcagttgtagtctttgggaaagcaatcacatcccggattgaattttcaccagccaaaagcatcaccaaacgatctaacccataggcaattcctcctgccatggtataaaaattaggtggaatttgagctcaacattccaaaactaaaagcagaatggaactagacatactataacacatgagtacatggcaatacgcaggtacaagcataaacgctgacgtttttttttcttgaatatgcaagaagcatatcactaacgcttgcatttattaaagcatcttagaatcaatatgctgtccaaaatctgatggtgtggttataacaagaagtaggattgatttgaaagattgctcttgtttgtggaaaaatactgtcttaatgaaacatacaagcatatagtagtaatagaaagttcagtatgcgatccaaaatctcaaatctaatccaaaaatatgtacatggagttcagtggttgaacatagcataccatgaggaggagcacccatgtcaaaacattctaaaagatagccaaatttttcctctgcctgcattgcaatttcggtattttagagctcagcaaaatgcaaaaggtacagcatgttttctatattaacaagtttgaatagaacggataaatactggtattttttacataattcctgcatccaaatgtctcctaataatgaaaataagtgacatcaggtactcaaaactcacagtaggattttttttaacgaatcacagtaggatattatggtcattaactgccagatactatatcactgcatttgatgtttctttactctctagtcttgacactcaacattgaacctttctagatgcatccagcataatttatgatcatttaccttgaatattaaggcatgcttgaattgagctatagataaaaacactggcttatgaatgacagcatgcacctttgccacacaaaacaagactacagtctcagacaatctaaatctggaggtatttcttcacaattatgccattccatgtccagtgaataaaaagcatgcacatatggcctaatgctcttatttcatctcagcataacattaattacttttaaaaaaattatcgatcaatctacaaattgaaaattgaaagcatggtactctcaatagtatgaagtgtcaaatataatacctgctcgggtgagataccgatgatctcaaaaatcctttgttgtacatcacttttgtatatcctcaaactgcctcctccaatctatatttatagcatgcagaacaaaaaagatgcatgttatgattttctacatagatctttacatgaattccagtacatataaagatacacaacttttattgatgtatcagatcagactctgcagtctgcacaccttgtttcattggctattattacagaaaaagggtctaaactcaaaagaaaccagccaaccagtcttacgaattaatcacatctatctgtcatggtcaatttgagatgagtatttagcatctgagattttaaatcacattccaatgaacaaatacagatagacttgtagaaagggctataatgttatcataatccatatttaaactagaagaatgtcttcaataaatgttgaagagcatgtgccatgtatggatacagtccacatgcattacaatacctcaaccccaagactttattaagacttgtgcttcaatgcttacacaagattttgcatcaaggagaatatgtgctaaattttctactatataaatcatgtaaaagagcatgtgcaatcttggacccttttctgaactagtatgtactgaacaaggtagcaagaaacttgatgcagtgaaagtacctccactccattgtaaatcatgtcataagccaaggctcgagctgatggtagatcattcatatcttcaggatttggtgcagtgaaaggatggtgtagtgcctatgagaacaatggagatgctcagagcacgcaaaacacaagacaatctttactttgagttacatgtcaattctctgttttaccagtgtctaaatttcttacatttaactgtttttccttctcagttgttcaggagagcaatgctcattcactgtaagcattaatgacagattacacattttgtaaattttgctattggtatccctatgaaaatttagattgaacatgtaaaactgtgtatgtttgcctcaaaccttccgtgacattgcaatcaaatttgcattctggagacttgtcaatgtccaaaagctcttttttgaccagaggaagtaccaaaaacaatctattatctgatattggcccttaaatttgtttgttaatactatataacctgttcgcatgccattaacaaatttcaggacatcattaaccaatggtctgcattctggtgatactgtacagtatgttatttcctttttgaagaatataactcagtatcctaatttagtaatgtgcattaatggtgtgctttagtaactactacaatcaacattctacaaaataattgaagtctgagcagtcagcaaaatggcagttctttaaatagtgtgatacagctatgcttaaagagtattcattctggttttggaaaagagtgaaggagtaatcagttgtaatttttgaaagaagatacatagaagaaaatctaacctcgtatctctgctcatcactgttccattcaaacattggaaaatccgtcacccaaagaattgaatgtgctgactagcataaagaaaacagaaaatgtagatgaagatatcaggagcataactaaagcagatgatcaggactgctctcagaaggtaatacagaaaggcgaagaggcacagaatctcaataaaatagcattcatattcacagacttactgtatctatcacttccagcttatgagcaataaataatcttaatctgccaagaattcgattagccgctgattgctcacccagtgcaaacaggataagatcacctgattttgcatctagatgtttcaacaactgctctttcttttcaggtttcagacttgccacgagtggaccaattccttcaagctctcctgtgagcagcagaccaattaaaccacaaaacaaattcattggccaggccaaaaagtttatcaaccaaaagagtgcaaaaattattttaccattgtccataactttgagaaaaggcaggcccttggctccagctttggaagcttcagtgtagacagttcctttctttaggtcagtatttgaaaattctttggcaccaccaggaacacataatgccttgatgacacccccgttttctaatgtatctgcaaaaatcttgaagctactgcccaaaaatgcatcactaacctgcattttaacagtaagaaaaggatgaagcgtagctgtgaatttattattttagttatcacagtaagatgggccattcagaaaggataaaggtactcacatctttcagctgccaatcaaaacgaaggtcaggcctatctgttccatagcgattcattgcctccgtataggttagccttggaaaaggatttggcagcttgatatcaccaacctcttggaaaatctgtgatatgaatatccataattcaatcaaccatgagcaatagttaaagaaataatggcatattttctgagcaataaactagtgaattaagagcctgattactactaacgatctgatgtacaatagctaaatgacggaaccagtgacagacctacagtcttgtcatgggaattgagccaggaaggaggctggggcctgaggcccagaaccagcagcaaaacctggccaggtatagggggaggaggctcagcccggagcacacgcgtgactacgtgagggctcatgcaaggaggcacttgtctacattgcagggaagaaggtttttttatatagggatatgtgttcaaacgtctcaggcatagctattactgtcggtatttactaatagacaggggtgaagaacaatgctaactcaaatacgaaattaactaaaaagataagaggaaacaagttaagtatttgaaaaccaacttacatgtctcattaattcttcgttcaacttcaacatatcttccattgatgtaaatgcaatctccatatcaagttgtgtaaactctggttgcctatctgcacgcagatcttcatctcggaaacaccttttatgaagtggttcaatgaatcaagacaatattgcagagcagcattggagataattgtttgactggttcaataatacttccctccattctgaaataagttaacctagtacgggatgtgacacatcctagtactacgaatctggacatgctcatgtccagattcgtagtactaggttaactaattttaggagtgagggagtaatatattccaggaactgagcagtgtacagtgagcaatttatattgagaatattcatgcaaacaggaaaaaaatcaagaacccagctaaacaggttacaggggaaagagattatgcaacagagaatatagagcaactcatgcagagttgtaagataactggaagaaaaattatatccaagaaacaaacatccttcaaaatgttgtacctactaaccttgcaatctgataatatttttcaaagccagagaccatcaacatttgcttgaacagctgagggctttgaggaagagcatagaacattcctggcttcaaaaaccatatttnagggcatcaggggaacatgaagctcttatttgaagaagtttcaaaaattcactgcagaatgattagacctaccgccaaaaagcactagatatatatttatgatactcaatagagttgtactttcataattgtcactgtttatagttaaaataaacccaccagagaatgcaaaagaaatgtagaatgtagtgtatccccacaagaacgtaggcacaagggaagtcttacaaaaaaaggttcttacatttatttttattgcagttttcaaaagttagttctagccataaagtttttcttttaattggaaaaaacaaggagataaaggaaattaactacatccatctactggaagataattgtgcttaacgatggtaagacaattgatatttgagaaagcaattattacaccagtgaacccaaatatgatttgggtaattaggtctttgaaagttgccacaaataaaagtgaacgaaaaagcactgcgcatttttcaacagaagaaataaacgtgttataattgtctgtttaagtgaaaaatagttacagacaacttacctgaactctcgatgggacaagatagtcccgagcaccttctggtgtagacttagataaaactggagtctcaatctaccttggaacatgcggtaactttggatcagacacaatagaaacaataacagatacagacattataggcattgcaaggtactaagatattattagtcattgtgatgtcttatattctaatgactcgctgtaaaggagatacaacagcaaagaaggcatacatgacccatctatttcaactgatccaagttattttaactagcaaattgtacaggaaatgattaaaaaaaatttcatgtacaaagcaaacaaagcatacatgcactctgtaaaaaaaaaaaaagatgattaaaattggaattagagccctaagcccaaggtgcaacatgaccttcaggcattacatcatgaaagcaagtatcttgctctctctactgcaggcactgcatcgaaaagaaagtattttgccgtcttgcaaatttccgttcatctataggaccagactacttggatatattgcattccatagtggaacaaaatgagaagcatatagccaaaggcagattatgttagaggtgcaaactcagcatgaagtaattaatgagtatataattggtatacagcatacctcaacaaaatcatgtctatcctccaagtatcgacgaatatgcttgacaacattatggcgcaacctcaagtttgactgcatttgtggtcggcgtaagtccagcacccggaatctagacatttacaaatatggaagttaaagaaaaagattggtccttaatatatggaacttaaaacccataatataactatattcaagtacaatggtcgcctgctgtgaaagaagacattgagaacagggaaaagtgctttaggcaaactattaaaaacattatacaaacagattcaagcataatggtcgcctaaaatcttgaaagaaggcaaagagaacaggtaaagggctggcaaacacagaaaatgtacatcttctggcaaggatggttaaatctggaacaaatttgtggtcaggattgcagaatgtcatgacatggtattgcaacagagtaaagggtggtttaacagcagtatgtagttaaaaacattcctatacactagcataatccaaatgatggtagaaaattccaaattaaactgaatatgacagccttcataatgaccgccaatatatcgatctagtgaaaaaatattggaaccttggaagaacaaagatccatagaatatagcaatggccatagttcagcgtaaatcagtaactggggtgaatgattaataaacaaagagattgcaaccctcacggagtgaatgatgtgccatgtttcacagtatctccaaagccactattcacagggtaaacatgtgactccccagaaaatgggttaacacctcaacaagttgtgtcccagtagttagtgtcgtaatgcaacctaagtattattttggcacctaaaatcttatgcacaactttgaatgtgcaatgtaatcccatttatgcatgtattcaacaagcctaatcaggcgttaaccaacaatcaaccaccatatttgaggtattcaatactagtatttcttttcttcaggatacttaatatatgagcataaaaagagtgcagataacaatgtattttacctcagtctaatttcttctggaaacttctcttttacagtatcagcagtggtgattggaaaaggcaatgaacgagttactgagttcagcacatatatattatctgcagcaacctgcataggtcagcatgtaatatcatagttagagagcattttgctgtatggaggaacacaataaaaaaattcaggaagtccgcaacaatgaaagaaaagaagtgttagaattacaaataatgttgcacgggctattccttatcctatatattagctcttatagcatctatgtgctccgtacatatgaacagcaaactttaaaagtgtggaatttctgtactagatagtttgaatttcaaattcttcacttgacatatcatctcaagcttctctctctaaactgcaaaataaagtaacatacaaccagtcaatacctctatagccccagtcttcatatctgtgttgatggcttctgttgggcgtgaccgaacaaccccctcgaccgcaaccactgactctactcttagtttgttcaccacagcataaacttctggatattctggcaaagttgtcacctacacagagagaacaattaccgataagaccatgctatcttgtagatgtttatcagtctaccaatcactacagaaagaaaaaacaaatcaactcccccataacattacaaattgatgcgattatatgacttcattttgccttcgtaagttattagatcactcaacatcagtttattgggaatttgtagctgcaaacgttgctaaaaccactcaatagaacaggaaaacagtaggtaatgtcagtgctacaaatactattatactccctccgtttcgaaatgtttgacaccgttgactttttagcacatgtctttgaccgttcgtcttattcaaaaacttttgtgaaat

SEQ ID NO: 10739 - DNA, 7895 bp, Oryza sativa
gattagtcaggtcaggtgtgtagtttagacatggaaaaaccaccgaaaactgtgttggtagtagaagtgttgaattccgaagtgtatatactcccataatctaactcatgaaacatacagattcacaaaaaatctgtcttctttctctgttccaatcgcgatggcgaagtgatgaggtgcgatagttggcgaagtggaggtgtacggcaattcacagtcgcaaattctcctggtctatattccattaattccagcagataaatatttcactgccatggtgatatatctcgacgagacgacggcgtccagggtcaagcaacaatgacgggggaaacttcgatggtcgacaatggtgatatataggcaacattagagcaatataatagaacggttgttgctggcattggctcggatcggcagatggcggagtccttgggcttgaagcgtgatggaagcttgcggggccaaaataagtgaacctatatatttacaaacgaaaaataatttatgaataaaatttttatatacgttttcttaactatctaaaaacaaatactgaaaaataaactttgataagaaaacgttaaaatcagctctaaatttaaggctgaaaattcaaattctagctgataagtataaacttaagcgaaaagatgagactcttagaatatccttgtggcaggaacaagattgtgtgaagattggagggagcattatgaggttgttaaaacgttagatatgaaaaggctttcatatcgatgtgtagtaagagaggagtgagtgttcgctgggaatcggcgcgcaccaccgcagaccctgcccactgcactaggcgcgattctcacgtgtatactttacatgttttaaacaattttttcctacaaaatttatttgatctacaattcagttacaccatcatatttggtacaagtaaatcttatatataggctgttacaccatccataattcgattacaggatgtcacatgattatatattttttaaaaaaaatatatccgtacttaaaaaatatataccatatactccctccgtcccataatgtaaggaattttgagtatttgcttccactatttgaccacttgtcttattcaaaaaattttggaattattatttatttttttgtgacttactttattatccaaagtactttaagcacaacttttcattttttatatttgcataaattttttgaataagatgagtggtcaaacactagaagcaaaaacttaaaatcccttatattatgggacggagggagtatgaaatatcaagttaaaacgaatgaaacattataaaaatacttcctgaaacatccagagaagctttgttcggaagttggttactgccggctggcagcagcagcttgaacaatatttttgctgctgattcagttgttgcaggcttgtagtacagcgttgtggctgcacaggaattgttgccgaacacaggccactatatacaattttcacaaataaaactagtgaaacatcgtaaaatacttattgaaacatccaaataataccatcagaaatatttaaaaagattcattgcaacgtaaaacttaaatgtgcaacggaattgaattttggttgaaacattgtttccaatacgcaaaacatcaattttcactaattgaaacatatgtattttatatgaaatcttgatgtagagttttaattataacgaatagaacaatataatcgaatcacatatttgataaataatttagaagaaaaatcattttgaagattgctaggtaaacaattaatgcatattacatgaaatatgcatactcctttatggagagacagtgaatgagcactttccgtggagaggaaagaataaagaacaactcgcgtacaatgtttttccctttgcattcccccaattattttggttgttcaggagcggacactgtgtaggttataggaattcacccaaacttttttctcttgaaaagaaatactatatgtaaatactagaagatataatgatactgcataagtaaatactttgctgggcctaatacctcgttcttaggcctaatactctgctgggcctcctcccgactcaccggcccaataactgcccaggacgcttcctccctaatcgtcatctcctcccggtccccgtcccccgatccccaatcattcctcccctgacgccgcgccgcaactcgccgccactccccgtcgccgccgccgccgcttgtcgaagctggtttgggggattcggggatttgacggattagaggtgactgaactctcgctctcctgctgaaatcataccgtatttttgtgatgatttatggggaggaacctaggttttgatgagagaggcgaacactgatttgattcatccaacgcgttatattcacatcctaacatccagcctttgcgcctacgcatcaggaatcgcagtcgcagatggaggccatggacgacatggcggctctgacggaggacatcctcctccagatcttctcccgcgtgggcagcatcaaggacctcttcaagttcgccgtgacatgccggcggtggctgcgccgcttcaccgacccggccttcctccgcgggctgtgcctggacagcggcgagggccaccgcgcgcgcctcctcggcttcttcttccagcagacgagattctatcgctgcgaaaagatgatcaagatgcgggtgacgcagcagagctcggtctgtccgcccaccttcctgccggcgccgtggtcgccgctcggcctcacggatcgcaccctcacctccttcctcgccgccgacgacgacaccttcaactacgccgagcccctcgcagcgcgctgcggcattgtcctgatgcggcttgtcccccgcaccgcgctgatgatagcgtgcagccacctcctcggcgtctgcaacccgatcaccggggaatgccacgttctcccgcctctgaatctctccggcctccatcgctacttgaccagctacgccatcatcacgtccaccgacagcgacctagatgggaagcagccgccatcatcatcatcgtcagggcgctccacgttctcgcagctgtacctcgtcgtccaacacaagaaagactgtaacgagtacttctactcctactctgctgctacgtgcagctggagcgctccccccatgtgcgtggacggccgccgcttctccctggtgggtgagagatccgccgtcgttcacaagggcgcggcgcactggctgtttattgatcgtgtatctagcgcaacccaagatgacatactgtacaaactccccgcggcggtggacacctcagaaatctccttgacaaggctcccctttggtgctggaggctcaccgctcctctgcgtcagtggagacggcaaactttcggtcgcttgcgtgtttcccatccacatgagagtttggactcagcaagatgacacccctgcaacgtggctccgcactgtgatcaggataccattggcggtgccttacccagactattcccatatatgtcagccccgcgagaagtggtttaacttcaacaggggatcaatgctcgtgctgtacaggagcaacggcgtcttcatcctcgacctcgagaagaaggtgatggaaaaggtcatggactgcttactgcccctattcagtgataaactgaacaggacggctgtggcgtatgagatggacttggttgagttctttgtgctccagctcagtggtctatgtagagggtctacaggataattacagatgttatgcagtgggaaaatatatgttctagaataagcaagtttaagttaaacaacagcatattacatggatcatatgcaaactgtgcaaactggcgagtgatatatcttgttctgtaacacggcattgtcattgtggatatgggttgacctttactgggttccactgttacataccttctctggaaaaacaaattctcttgatcttacagttcacaactacgcaggtggcattttgcggcacagttcacaattttctttgtttgcctgttacgcttgctagcaccttaatttgtcaacttattgctagtgttaatacttatacatctgatggtgtaaatcaaaatagtttctttcatctgagaatccctgattgatctgtttgtaagctgtgttcttgttttgtatggtctgagtaccagctgctttaggtagagtaactgactgtcagttcctgagaatgccgtaatgctagttgtattccatagaactgtgattccttgcagtttacattgtctttattttatattcgatttcttattattattcggctagtaaatgcgagtttcctctggaatctgaatgtaccactttgagctcttaggagttgaagtgagttggagctagattgttagatcctgacgtttttttcttgttactgtgaagaacctgtttgtgctttctctaaaattggacttatatgcacgatatccttgattattttgtctactgtcaaaatctgatcacccatttatcagaaatcatgcattagtcacatttgtgataattgatcgtaggcaagaagtctatattgatgtttgacatccttgagtagtggttgctgatttgtcagctattgtctagacatggaaaagctactgctgaaaggccttcgagttctgaaggttatatactcctacatcttacatagaatttggatagaatgcgtctgttttgtttgtagttagtggcttagtgcacactgttgaatttgatagtatttgcaatacagtgttatatgctgctaaactaaggctgtgttcgtttgtgtgagatagggtgagaaaacacctcgttttccgcgcgcacgcttcctaaactactaaacgatgcgttttttgcaaaaattttctataggaaagttgctttaaaaaatcatataaatccatttttgaaatttaaaatagtttatactcaattaatcatgcgctaatggctcatctcgttttgcgtatcttcccaatcttctcaatctcctatctctcaaactcaccctaagtgaaaatggatttccttgtgaagattgtagaaacttcactaattgccaggattggtctaatttgttccaaggtttatggcattttttgtatttctttactcctttaaacgtttctggtggcgccgccaccaccaaatgacatttgggctccacataactagttgcagaaaaaaatgtgagagtttgcgtgctcagtgatgtcctgaagagtatgtgtaacacaaagatgcataacagaagactagttatgatcacgccgttgccaaaggttatcatcaagttccttgtatgttgtccactatgacttattttggtgtatccctactttttaatctctagatataaaactatggccaatatattgatagaacacagctgtaactaaatgttgcgtttctgactgcaggatacatatggaaattgagtttgttggtgatcacagttacaggtctggtaagatagttattgagtttaacgattgaacaaggtgtctggaaataccaccaggtgcttcaatctttgagcaagatttttctgcgctctccattgttttgtgttgtgtttgtttgcagtctgaaccatgaaagaggaaggagaaagaatgtgagaggaaatgttcttggatttttctctagcagagagatttatcttgtacgacaataaatgtttgctgaattcttagtgtcatctcaaaattcgatttgtctaaacaggaaaaactgacctattaatcaaaatatatagagtttaccctgtttttaattattattttcttcttatttacatgctgtttatggttacagactccatggcaaaaagcccaaaacctgaacccaaagaaagaacagcccaccaccacagcgctccaaaaacggggcccactgcacatttttctttgcaacgtcagcgatccgcacggaaacgcatcgcagccgtctaaccgaaaaggcaccggacgtcacacattcatccacgtcatcgatccgcgggacaagcctctccaccaatcagcgcccacttttacccactataaactcaccgcacccgtgtcctccttccacaccgcaatctcgcaacacatcagcacacaccgctccaaagcaaaacccacggacccgcttcccctccccgagaagaagagagaagcatccatggcgcccaaggcggagaagaagccggccgcgaagaagcccgcggaggaggagcccgcggcagagaaggccgagaaggcccccgcggggaagaagcccaaggcggagaagcgtctccccgccggcaagggcgagaagggcagcggcgaggggaagaaggcggggcggaagaaggggaagaagagcgtcgagacctacaagatctacatcttcaaggtgctcaagcaggttcaccccgacatcggcatctcctccaaggccatgtccatcatgaactccttcatcaacgacatcttcgagaagctcgccggggagtccgccaagctcgcccgctacaacaagaagcccaccatcacctcccgggagattcagacctccgtccgcctcgtcctccccggcgagctcgccaagcacgccgtctccgagggcacgaaggccgtcaccaagtttacttccgcttaggctgcatgccttcctctagtttgttagtagtagtagtagcagtagattgatctgtttatgtggtagtttaagtggaaatgatgattgcaaatgaagaattgtgcggggcttcttttggggaactcactgatctggaatagtaatgctttttatgtcatgtgaacatatctctggttgccaattgattttttgttttgtagaattgattacatcgttgatgtttgcatcgtcttgaaaatactctgcttgtgactggaatatgattttcggaacatctgtctgtactccctctcccaaaatttgaactggaaatttagctaggactccatttttggtactgctcaagtacccattggctcaatgtattttgtaggtttgatggaagggaagcttgatggccattttggttcatgatgttgcatttggaacataaaaactgtgtactattttgagctgataactttgaaatctgaaagtaagttttgcttcagcttcatttggtactgtttcaaatcgaaatatagaagttgaaatagtaactgaaacgccatatgtcttcgcttactgtttcaggagaatgctgttctctttactccttcctgttctgaatgtccgaatgggtgctttttctttgttactgattcgcttgtatgctagtaactgggaaacatgaggtatgcatctcatctctactgccacatcttctatcatgcttgctgttgtggtgcctgcagccctgcagtacataccatgcctgaaaaatgtgaccaaactcttgtgggttctacttgtaaattgtaatgttatcctttctattctctgtccagcatggttgtttgaggtgtactcaggttctactggaagattctcttgtagcagcatttttggcacgctcatataaaagcttcggtagctactgtggaatgtgatagaaataatgggtctgatgtttttgggaactctccttcatttctatttggttaactgtttgagcatttaagcgtttatctttttcgatagcataaattgttatggatttgatattctgtgtttaatctgtataattgcaatatttgttgctgtgtcgtatatgttgaatctgagtcagggagttagaaattctgcaactatggatgtgtaggaattggcaatgaaatcttactcacattgtgtaagaagccaaaactctcgtacttctacatcgtgcaatcaacattattgcattctgtatgcatctcttacactgacatgcatct

SEQ ID NO: 10740 - DNA, 718 bp, Oryza sativa
actagaaaagaagtcggacaagcagggtgaggaagacaagataaaggagcatcagttggagaagaagcgtgagttgttgctgcttgttgaaatcttggctgcaacactcacttaccaagccggcttgaccccaccgggtggcttctgggaaaatgatgagtttgggcaccgtgcaggcttccctgtcctactagacaagttccctatccgttacaaggcatttttttattgcaatgcagcaagcttcatggcatccgtggctctcatcattctccttctcaaccgaaatctgtacgggccgggcataaagtgctatgcgctctttgtctgcatggtagcgggcatgttcggcctcatcgatgcctatgctgctggaagttcgatgcatctgcgaacctccatcgttgtcttaatattggttacggtagtttttgcagctgtagtctatgtggcaatcatcggtcgtggacaacgtgcaaacataaatcaacatcagtcaaaacaaacacaaaatcaacaaaccaacaaggaagatggcatgatggacacaccaagacaaacacaagatcaacaggaagctgacatgaaaaagaaagccgacatgatggccaagtacttaatgctacaggaatattggctgcgagtgtggcctacctcacgggcctaaaaccacctggtggcctgtggagggatgaaggtaatgggcactctgctggca

SEQ ID NO: 10741 - DNA, 734 bp, Oryza sativa
ccccctcttttccttgctcgatctcggagtttccctacacctgcctcggcattccactgtcagttcgcaagctgccaaaagcggccctgaaaccgcttgtggataaagtctcccatcggctcccccctggaagggccgtctcaccactctggcgggtcactcggttctagtccagttggtctctcttccattccggtctatgtttctgtggcgatcggcttgccaagctgggttatcaaagccattgacaagaagtgtcgcgccttcttgtggacgggtacggactcggccaatgggggacagtgccgggtgtcctggatgagggtttgccgtcctagggatctcggtggaccgggcattccggatctcaggatggctggctttgccttgagtgttcgctagctctggcttcagcgctcggggcatccctactggtctgatctgaaggcccctattaagcggagcgtctccgacatgtttgtagcatacaccttctctatcctgggagatggtcaatccaagctcttctggattgaccggtggatcgatggtcgctcgatagcttctatagctcctgacctcctccacgccgtgcctccacgcttccggggatcgcgcacggttgctactgggttagcgaactactcctgggttggtgacatacgtggcgccctcactgttccggtcatctctcagttcctgttagtctgggacgcggtgcttcctacccagct

SEQ ID NO: 10742 - DNA, 746 bp, Oryza sativa
ggattaccagttgctggagttggaaaggtaagtcttgtgtattgcatcgcacaaacattgaagagcgtctgtaatctttctaatgtacgacctttccatccaggttttcttggagtatgcagatgtggacggcgccaccaaagcaaagacggcaatgcatggaaggaagttcggtggaaatccagttgttgcagtgttctaccctgagaacaagttttctagtgcggaatatgacgcgtagattatcccgctatgtaaaacactagtcttttgtttttcttttgcgccagtttgctaaattgtaacaacaatttctctttaagttgaaccttccaatagcttggatttatgcagagcgaccgattaattaatattaaaagatgtgatggatttcctaaagttaactgaagggcttggagtatgatctgattcttgtccgtttatcctgatagacctggattatttgttaactctgttaggcggtagctcttgtcaccggagacgaaggagaatggtgggggcgaggacacctcatcagtctgtccctctggcgtagacgcgagcgaagaacgcaagtggaaggaaattaaaggatgcgggcgaagaacgataggaagaggattatggaggtttggatgtgatctgagcagttggattgtgatctaatggtctaaaatttgcaagatttggacgcaggttttctggcaaattacatgtaggtaggcccctatgatctagtaattctt

SEQ ID NO: 10743 - DNA, 572 bp, Oryza sativa
gcacagaaagtgcgcgctgagtatgaatcgcttgcgttccgcggtgatgagaccgtggaagatttcgctctacggctcacaaccatcgtcaaccagcttgcaaccctcggtgatcctgaacctgctgataaagtcgtcgaaaagtaccttcgggtagctcgtcccaggttcaatcaactcatcttgtctattgaaactctctcgatatctctactctgtccatggaggaagttactggcagactgaaagccgctgaggattctgggcaatcctcgtcgcacaccgccggtgggaagctgtacctaactgaggaggagtgggctgaacgtcagaagaagaaggatcaagaggcaaagcggggtgactcgggcggctctggcggccgcggcaagcgccgtggcgggagagggcgcactggtggcggcgggactgcgagccccgagagcacgaactctggttcggcgcgcaagggagacaaatgccgaaattgcggcaaacttgggcactgggcgaaggactgcaggaacaagtccaagcgcgaagaacaggctcacgttgcccaggaggatgaa

SEQ ID NO: 10744 - DNA, 712 bp, Oryza sativa
gatattatcaacccaattctacattatcaggtaagacaaacgcggatgaagatgaagcactaatttgggggctacaaggaagaagttcaaaattcactatttatgacttttcgcaagtattagaggccacagataatttctcaaagaaaataaacttgggcaaggaggctttggtcctgtatacaaggtacataagacgaaaaatctgacaaaagttatacacatatattattcgttaatttacatggagtattatgcaattcactctctgctttggccgattatatcttgatcataatatttgtcaagtgtcaaaagtcaattgaaactgcaaattaactcgtgtcactcatccatctcttttgcacttgtctctagggccgatttcctgatggggtggagatagcagttaagagacttgcttctcattcagggcaaggcttgacagagttcaaaaatgaaatccaactcatagctaagctccagcacacaaatcttgttaagctcttgggatgctgttaccagggacaggagaaaatactaatatatgaatatttgccaaattaaagcttggaattcttcaattttgggattaacttcttgctgtaccgaaccgcaaataaaagatttggttcactaactctaactgcaaaatgtatatcctttgttatatctatgttgaattgatttgcagatgaaacaagaagagctt

SEQ ID NO: 10745 - DNA, 630 bp, Oryza sativa
  unsure (1)..(630): unsure at all n locations
aattactctgaatgttttcctgtcaaataaccatctgcactcagaatcagaaaattttaacatataaatagttaccgtcacacttcgctttctctgaaactaattgaataggcacgtgcaacttttggtatgttctataaatgtacatctatatttcctaattatacaaccatttaatgtaaccatcaaagttgcttgataaatgaaaggtatttcttcgtttgattgctcatattgtgcatttattgggagcatgtcgcaattcttccatgtttacctattttttccttccgccaagaactatatatatttattgtgtctctgtgtaatgtgaatgtccagggcgatacgcattcacgtgaagacggattatcaaaccaagagataaagatagagaaagagaaaaagacaaggacagggaacgccacagggaccgtgacagagatcgaggaagagaccgagatcgggacaaggacaaggaaaaagacagagacaaagaaagggacagggatagggacagggacaaggatcgggatcgccaccatangcatcaccgtgaaagaagagaacacagagatcgctctgatgatcatgatcgccacagaagccgtgattctgaaaggtattctt

SEQ ID NO: 10746 - DNA, 1038 bp, Oryza sativa
cccacgacatgtcaccatgcgcctcaataccaccacggtacctcggaaaggagctgtgacagtacccctcgcacaacacaatccaccacagtgcaccgttcctggatcataatcacccccttataaacaaggcatggactccccagcgacccccgtgggcttatctctgccacttctcagtctggtgctccgcaatgaaccatgctatacaaaaggtaaagccgttgcccatgctggcttgtggttggcacggttaatgtttcacaaccgaaactcgtgaaccggtccttaattgtcatgagcacgaccatcaaaaccatgtgctcataacccacctttatcaagttttagttgacatattaattaattaaccaatcacgattaaccatcgtgagcttccattaaatatccataagtgatagtgaagcatgatttatcccattagtgagctattgtttctaagcacggctaagcatctattataagcatctagctgaaccaaaccaatatataaggttctagctaatcaaattataacccataggtaaataaagtcatcttcggccataattaaatgggaaaggctcaccacccggtgacattcgaaaataaatgcacaattaaaataaatagagaatttaaatgtaggatcaacatgctcaaaggaattatgtttgggatctgtgacttgccttgcaataaagggtcttcaattaatcttcttgaatacttccgacgcactcacgaaccttcgaaacgacggaaacgacaagctaacatgcaaaacgaggaaaaagactaagaaactccaaataaacagtacatataaagtaaacaaacatgtagatcatgatttagatgaatttagagacttgaacgacctcattccgatttcatatgaattaattaccaattttacaagatttaattcccatttaacctaattaaagaaaagataattccaaattaattaaccaatttacaaatccctataatgagagaaaagattaaagcaacctccggaaaagggctgcagga

SEQ ID NO: 10747 - DNA, 801 bp, Oryza sativa
taatttaacaatgtggtgttacagtaaacatttgctaatgatggattaattagtcttaataaattcatctcgcaatttatagacagaatttgtaatttgttttgttattagactacgtttaataatttaaatgtgtatgtgtccatatatatgatgtgatatgccaaaacttttcatctctggatgtaaaattgtaaacacagccatatacaatgtgtcgttgcctgcatgcacgcagatcctggatggtcgcggcaaggaggagaagaagaagcgcgtgggattcatcctcctcctgtccgacggagtggatcagttccaatactcgaggatcaattgggagaaggtggcgaagagcaccgacgtcgaccactccgaagttggcgccatgctccgcaagtacgcggtgcacacgttcggcttcagcgcgtcccacgaccccgtgccactgagacagatctccgcgctctcctacggcctctactccttcgtctgcaagaacctcgacaacatcacagaggccttcccccgctgcctaggaggcctccgcacggtcgtcgccgccgaaatccgcgtcgatctcaagcccaaaagcagtgataagcagcagcagcagcagccggtgctcatcaagagcatcgattctgggggctatgagagtcaagtcatcggcggcggaacctccggcaagatcctcatcccggtactctacgtcgacgaggtgaagaagttcatcgtccacctgaaggggcccaaggtgtcggccaccaccgtcaataaccagcaggagattctcacagc

SEQ ID NO: 10748 - DNA, 1435 bp, Oryza sativa
  unsure (1)..(1435): unsure at all n locations
ggggaaaaagagagaggggatggcggtggagcttatataggggagggggaactcggacatggccagtaggggcatgattcccggccgacgtgggggaggtggaggtggagagagaggcgggattcggaattcgaatcccggccatcttgggcgcggcactancgggaatagggggatgggtttgggaaatccgggcataccccgacgttgccgacttggccccgaagaaggcggaccttggctcccgcggccgttttgcgcgtggtgggcaacttggggacggggggccggaggaaggggacaaaccccaaggggggggccccactttcgctttcccgggaaaaaagggaaggccgtttgggccggccccaaagaagaaggcccccccgcngctgtcgattgacttgccccaccgccccagtagaaggaaaaggggggaaaagaaaaagataagggggaaaagattttccctaggatttaaaattgcttgtgctcaattttaattggttaaaattttttcgagggctttgaaaattccactaaaaatcattgttagggtatttcgacaggtagaactcaagaaaaattccacatgctaattccgattattatttttattaatttataaaggtttactcttgcttaacactggtattttttgagcccattaacactccaatttaggcttggaaaagaacttcggggtgtgacaatcaataagggtggtttgcttttaaggatgcaacaaaacctcaactggcaattcccaaatttaatctttcaaattccttgcataactccaacggcaactgtggtccttctgtagcattacaatagcctttcctgctgagagcatctgctacaacattagcctttcccgggtgataattgtcggctcccaaaactaatgattcggaaaccgacatgtttaactgtttcaagccctggatcagtagattgatacaggttcaacaatctagatcttcatcgcatacatttggtaaagactccaaaggagatatctttatataaaataataggacatttacaagtttgtggctaactattacagcagaagctatatgatgactcaactctgtcgttttactatagaattaaaccatctaactatactactagacttgaagactaggtttaaagggaactaacttatgtgattgaactcccagcttcggcaaaaactccaattaaactctgaaaaagaggggttgaagcaagggtgagtacaacgtactcagcaagctattatattattcaccaatgaatgcatgagaggtaatatctgtgtagagctagatttacttgcagaaggctgagaataaagaggtagaacttcctgaaatgtatgatatgcaacagtatttaagaaaatcttgaattatatttctaaccaaagtaccatatgagtccccga

SEQ ID NO: 10749 - DNA, 1210 bp, Oryza sativa
tatctgatcggctacgctataaatatatatagtcctgttattgatatatatttcgatctaagtgatttatactgtctcagcatggtgtccgatctatgccaatcactcgatttaagtttccatcgatttagggagtttttttcgtaattttctttacccaatcgagagaattaagggttaattacctattcatggacggcgaacgaaacacaaatgacattgggttcaagaataatgatatgtcatcggcattctaccgatcggctatcatttataaatttaaccgcggtttctttgcttctatttcttgttgattacaggatcaaatcaactggcacgctaacacatccgaaggcgagctttggacctgcactggagttaagcagatctcccagccacgtgttttctatcaacaaatacccaagttatcatcaatggcataaggtaaacaagatatggctgagtggtaggacccatcccacatgatattgtaaaacaatgcaacatttaatagaaatgcgggacacttgtaaattgggtacaatatgatcaatctaatgcatgacttgccttgctctcgcactgatgagaccacagcaacgtcttcgagaaaccgcggatcgacggaacgaccgaaatctacgcaacaaacaaagcacacaagcaaaacatgctataagtctactgaaacagaaacaaaaccatttttaatggattctatgcatttttatgaatttactaagacttgaatggatttaaacggagctcggatgaattagatatgatttttagaagattatttgtgtttttactattaaagaaaagccttattgatttattgtgcaataaagcatcctagggctgacatcatccaaggggtggggcggcgccgacaggcgggacccaagggtcggaggcacaagggagagggagggggtactagcaggcgggccccaccggccgcggctccaaaaagggggaggggcgacgtctgccgggctcggctcggctccaagccggccggccggctacagcgagcggcggcggtgcacggtcgccggcgatggcaaccggcggcggcgaacggcgcggaaggcgtcggcgtccgccgaaggcaatggcgcgcacgcggtggatggcagtggacacgggagggagagaaagagggaggacagggagttctcaccatggggttggccggcgcgggaag

SEQ ID NO: 10750 - DNA, 19428 bp, Oryza sativa
aaagattcgtctcgcgatttatatacaaactgtgtaaatagtttttctttttatctatatttaatgctccatacatatgtctaaagattcgatgtgatgtttttgcaaaaagtttttgggaactaaacagggccttagtccaatacacgaaggtaatgggaactggagtggagtaggagtaaatctggttcatctcaaaagcttttatatgtcgtgtttgaatttactgttgacacaatttgtaatttttggcgcccatgcttgtttggtgtaatagttgtaattttcggcgtccatgcttgtttgaagttacctaaagagcattaaatgcttatttgatagaatctacgtgattttagaaacattattttagtagatcatattattggcagaagttgggggtttgtcccatctcacctttttaaagctcttttctgttcacttctggactttttggctatgtgcctacgggtagaggccggagatgtaacccatttccattatctaaaaaaaaatgcttgcttggcattttcaccacttatgctcatttaatgcactgtgaatattctatccatctctcttgcctcaatcataatttgcatgttttattaggggtattttagtcattcatattctctcttggtatgtgagatgtgtactataactgcatttaaaataggatggaggaagtaagtaacataagttttatagctgatttacttacttatatatgtaccatcacgtacactgccaccaatccagggccaccaacgtggtcttgctgccgaggagcgtggccgcaaaatcccaccaatggttgatcacatgcctagctatgaccatgtgtgttagctactccctccgtcccacaatatctcaaaccctagaatcccaagggaattttaggacaggtggcaaaagactaaaataccctcagtgaaagtacatgcaatcattggagacaaataaaatagtagtactactcagccaccaagttggataagcatatttctgatgctgccattaagtgctcaatatacaaataatacacagcaaccagtgcgccaaatattttgaaactcagcattgcttcattggcgtcaagcattacaaatttcagcacacaccactacaacaaccctatataagtttgaaatgaacctcaatagcaggtttccctcccactgaatcactgcatgagtcttcaaaatcacctgcatggctcttgatctaaacaagccaatagatgaggcagatgaacaggctttgcctgacgtcaatgacgaaattgctgaagttgaaatccatcttggtcaggaggaggatcaacttggaggtgatgtccagggaggtgacaaccatgtgcttccttttgatctcaatattgatgcacctggccctcaagtgcttccttttgatctcaatattgatgcacctggccatcaaggagaaatgaatctaggtaactttgcaagcattaatatgaaatgattaacatttgtagcactgactagcataaataactcagaatctttgctagttctctgaaaagatgatcagtaacatgtgccttgatgcaatcgctatggttttggaacaaaatcaatctttgataagtatgaggaaattgttaggacttgattctatcaatgagttggccctaatgaagttaattccccttccataatatcacaggttatacatttagctagctgaactaatgcaatacttatctcctgttataatgcttatctaatgtctagaatcaatcctgatatgctacatactaaacaggacaaatcagaaatcaagaccggtgtttaaaatctgtgcactagactccctctactgaaaaacatggttgagggtagaataataaaattgctacacagaaaaactaaatttcatatgggtatatagttggtaccttgattgtggttatttgatctcataatctcctgtgttgatgttgtacagcataaaggaacatatattaatcattggttccattagttatgtaacataatagattagttagtaataaaagtattttggatatattggaaaaaaagtataaacattattcttttagtcacacacatccagtaaggcaaatatgccatggcatgtcaaatatcaagtatcaccagcagcgaacagggcacataatcatgttttctacaacatggcagcctttgtattacttactatatctatttgcacgcatagaatggatgaactaaatcattcagttatatatagagaaacagagatgatcactaagtggacatttcataggtctatctggaatagatgatactttgcaaattgaacacataccacttcagtattgaatcatgggtaaaaaggattgtgcttgcaaaaaatattgctatttgacatggtactaactactgaccgtggtaattgttattgtagacaatggcgatgcaatggatcaagttctgcaactttatggaggtcacatccataatgcctttccttttgatatcaactctgatgccttcgaggaacacctacaaatgcaagcaggtactattattacatcatgccaactacctagaataattcagcaatgccattggctgcattagttgcatcaatagttaaggattataaattggatatttcagcacatagtaaatcacaacgaatgatgggattaaggattataaatatgctaatatgttgtatttacatagatttttcatgttaattggctcacagccatagcaatctcaaagaaagcacatacagtaaattgtgccaatgtttctctgccttctaaatgatatgtatggttaaatcatattataaagtaaaccacatggtgagcctaacaagttgtgcaagaactttattatcaacatgagcacttaatatggagatcacatttccagttttgcctactacgattgttcagtacacatcaaattatataatgcatggtcatgtataaaaagtatatgcatgttgtatcagccataattttgcaagcatgttcatccatgacgataaaaaatccaccatctaaattagtgcagacaactcacctggaaattattgttgtagacatgcaggagtacggtttgtatgccggtgatgtggacattgtttttaaacacgaggagttggatgattcagatcaggaagatgaacagccatacaaaaatctgaccaatatacaaaggcaacatatatatatatatagcattggttgggaaaactaccaacagaatcctaaggaaaaaggctaccactgaagttgcagaaatgtttaatgtgaaaagagctagagtgcaagatatttggagaagagcgaagcaatgtcgtgcccaaggaataccaatcgatgtaagctctagaaagaaaaaaaattctggtcgcaaaaagaatgaaatcaacctatcagatattgctaatgttcccttgcaactaaggggcactttacggtcatttgcatcagccgcaggtgtaccaaagagcacgctgcataggatgttgaaagaagggatactaagacgtcactcgaacacattaaagccattgttgaaggaagagaacaaacgatcaaggctgcgatggtgtctttccatgttagattggcatactttgccaaatgaacccaagtttgttgatatgcgcaatattgtgcacatcgatgaaaattggttcaataccactaagaagacaagaaatttttacatggtccattgggaggatgatccatacagacctgtgcaaaacaagaattctattgataaagtgatgttcttggcagcagtggctaggcctagatacaatgaagaaggtatttgcacttttgacggcaagataggcttgtggcctttcaccaaaaaggtatcataacatcttcatatatgcatttttaattactgacggcaagataggtttgtgatgcaaaacttaattgttaatctaacttacataatttactatttaggaaccagcacaaagggcaagccaaaataggccaagagggactcttgtcaccaagacaatcaaggttgattgagatactgtcagatcatttctaattgctaaagtcctaccagctattatatcaagttggcctcgagaagagcgacacaacactatatggattcagcaagataatgctccctctcatgtgccggtggatgatcctcaatttgcctatgcagtatctcaaacagggtttgacatccaccttatgtatcagcctcctaattccccagatatgaatgcactagatcttgggttctttgcatctctgcaatcattaacatatagaaggatatcgagcaggaatttcaggcttatgatgacaacaagctgaatagggttttcctaactctacaatcttgcttgttagaggttatggaagttgatggtggaaatggatacaggattcctcatatgggtaaagagaggctagagcttctagacattctccctaatacccttagttgtggtcgtcagctatatgacaaggtcagaacagcattatccaaccaagtgcagtaaatcatgcaacatgagaagctctatcatggtttcagcttttggttaaatgtcaggttgtatatatggtaaagtaagatcagtattacgcaagtaaatgcaacaaatcatgtaatataggaagttttatggtggtttcagcttttggaatatgtaatataaagttttatgatggtttgaacttttggactatgtaatataggaagttttatgatggtttcagcttttggcttaattttagattgtacataagacattgtaatatcagcattagagtaaatcatggtgcaaacgtctccttaatttcagtcaccaccataaaccatcataatttgaaatatttcgatacattaccatcataaccacctaatatcatctactaccataattacacatgctttcatacaataccaaaagtgtgcctactttgacagactgtcaaggcttctattcataaccacctaatcttatctaataccatatttacacataatttcatacaataccaaaagggtacttatcgagttgctttgtgaggccaccattcataaccaccaaaccagcacacaaacatcacataattgaagcattcatctaaattttgcactcttaaaacactccagaaatttctttaccgatttttccaatgcatcttggtcttgcaggaggtcttctaggccactatcatcatatggatcttgcgtatatcccccaatgaccatgtcttcatcatcgtcgcttgacttcacctcctcgctgttcccctcctcgctgctcacatccttagcttttcccctcatctcctcgatgccgatttgcttgacgcttgccttcttctcaaacagtgccgtgtggtcgctatcgtcaaccaacattgtcctgaaaaggataaaacaatagcatttgtaaacaagtcacaacaaaataaccactttttttaacaatataattactgaagatatgcgagaagatgaaattgaaatttctcttgaaaaatatcacatttctgccatatatttatatttatatcgatgtaattgttgaaacaaaataatcattgttctcaaataagaaaaccttgattaatcattactgtttaaagaaattaattaggttgacaacttggtaagtgggttaggaatcaatcagatatgctgcatctatctatattcaacttatttaggcaaagcgcaaacaaacaatatcgatacgtgacataagtcctcatctattgctgtcacttgctgtcaattagaatgagctggctactgtggttgagaggaagaatatgcatgcaggttgaagacaaaaagaatatgcatgcagctttcgcccaagaagaaaatatgccattggacccaatcgagtacttaacgaaaaaaaacactgtctgtctcaaaacataaaaaacacactgtatatccttttcttttgtgccataaagcagcaaccagtctattaacacacaccgccgaatggtaatcattcatccatgagtttagttaagtgcttcaagattttgtaggctctgtaatttgaaggatcacatttcaatcacctagaaatcactttgggcttttaattagctgattaattgggtaagtcttgtgttgctagctacggagtagatttcttttgttagtttagttttgtgctaatgacttggagatgcagtacactgcgtagctatcttacgcacagaggaatatgagatctgcttagtatatcttaggatgtaatagcctgagaggcattggagccagggagatcgagtgggagatgtacctttgagtcaatcgacgcataccgccgccaaagaccctagttgttgatgccggaattagaataagaggctggtcagcctcgtcctccactgccccctcctttatcagatccgcgggcgccgccacctccttgagcattacatcagctgccttgcaaacctccgacgccgccgctgcatcccaacagcctccacccaccgccgccgccttcttgcaaacctccgccgccgccgccgcatcccaactgcctccacccaccaccgccgccgccgccgcatcccaactgcctccacccaccgccgccgccgccttcttgcaaacctcctccgccgccgccgcatcccaactgcctccacccaccgcagtcgccgccgccaccgccttttggatcacaaccgcaagccgacatgcctcctccgccttggctcgtgtctcttgaatcaaaaccctaaaattttccgccgcttccatgaacggcgctatcgagccaaacacttccaccgcagccatctccggcatccgatctaactactcgtaaccctcccccgccgcatctgagtggaagcaactagttggacggggaacttggcagggagatgtgggagcctggcggagcagcgtggagcaaggagggacgtgcggggaggagcgggagtaaggtagggagggagttggaagcttgctagggtcggtcatctggacgccgccgcgtcgatgccttcgatccagaggggtgaggggcgatggggaggaacgggagggagaaaaacgcgagagggggagagagaagcatacgagtagtatgcggctgggaggagataaggttccgggaggagagaggagtattttggggaagtcgccactcaccacccacctgtccccacacatgatacggatagagaggtcacgcggttttctgtgcaggaatcgatttttttcgggacaaagccctccctccaggaatcgagatattgtgggacggagggagtagttattagtcatgtagcccacgttttatcccagttatcagctctttcgaatttgagcccaccaatggttttatcccacgtttcaaacttaacaaaaccaaggctgtgtttaggccctgtttagattccaatttttttcttcaaactttcaacttttcgatcacattgaacttttctacaaacacaaatttccaacttttccatcatatcgttttcatttcttcaaacttctaattttagtgtggaactaaacacaaccttagttccatgcaaaaattgaaagtttgaaaaaattagaacgatgtgacggaaaagttgaaagtttgtgtgtaggaaagttcgatgtgacggaaaagttggaagtttgaaggaaaaaaagttggaatctaaacatgtctcaaatctcgttcaactggaggtagaagcttcgagatcttcagtttgtaatctaatctaatgccgttgtacgtaacgcacggacaccttcctagcaaaatctaaaatttgatgagggagaggagaaggcgtgtcaatgctgtcgtcccagggtgcccagctagcagctaccattggctcggtgtgcccaagtgatggggaagtggtaggggtcagcccaaccaacattccgacggtgtcaaccccttttgacctgcaggtgggaccaccgcaaacattccgagtattgtacgttttgtactcgaaaactccactctgttctccaaatggaaagcataactagtatcaaatttcaatgtacattttgaatcgaataagtaaaaactctagacaaaaacgctctctcaggcggtcgtgctagtccgccaaccagcactgcctgcgccgcccacgcgtcgaacacctcctccctgtccctgaaccgtatcctccggagccggttggttgttccgtctgccgggtggcgacggcgccagcgtgagcagcatcccagccacccactcggcctgcagctgcgccggcgccgccgcgacgcgccagcgcgtggttcccaccttcacgagcaatcaagatcttggtgaagtccctggtgacgtcgatggaagcacacatgcatctgcctctgctttgctctgctctgctcgtgggctcgctaggttgggggaaaaagacgaggtggattgaaatccagttccaatgcggataagaaaattcagttaaaagttcaaacgaggtggtttgatattctgcttcagcacgcactgaacgcaggctgagtgtaagtggataagaaaatttttgttatgccatattgccatggcgaaaattcacaatatgtattagaagaataatacattgaagatctaaaagataataaaacaaacataatacatcaaatttagaaagttttgctactacctcaaagaaaacaaacttcaggaaaaaaaaaagttttgccataatgtcttgggcgatgacttaatgtcaagtttttactcacaaacatcacaaaagatttcgggcgaggacttaaagtcaggaaggtttttattcaggtgggtgcaaatgcaacaatatattcagtgctgtggatgatcccaaatgaaatatcggagttcagatacatcagacagccaaaaccaacacaagcaagtagctaggaatacacttgtttggagttccatcttcagaatttcagatatttgcactagaattgcagaaccaacaaccatcaaacacacaagattcgtttgagttgctatgtaatttccctggttttcttataattcgaagaggggattttgatcaatcttctctatttacaagagaacattactgtacatattcttagcatttacaccgcacaaattcgtgcaaaccatgttgatcacaacctgggattagtagattacatgactgaaacctgcagctaagctagcagctatcccggcggcgatctcgctgcctcatggctggccgcgtcccagcggctacgactctgagaaacgacaccccgccgacgattcctcccacgtaagtggagaacggaacatggacggccccacctaggaagaatcctcaagcgcccgaattatgttctctacacaagagattagagtcgacaaggatgccacccagaaaccgagatcttggtgtcctgtacataagacatccaagcatactctcgaagattgcctggtgatactccatgtgaaggctgaactctacgcctgctgggaacgtggaattcagcatacttcaccaacgggtgctatttactgtctgatttacaagtccagatctcacgatcttacaagctgcaagatcttcctcaggaccttcaaactgccgcatcattgtgtccaataaccacgagttcaagctccgtgtgttgccaaggaatgagatgtagtgccgacttcagatcggttcgtgggatacgttggcactaacccaaacgagccatctgtgctaaacgtgttggaagactacgaatcctcttcggagccaccacgagatgtgaacgtggtcgacaccactgagatgggctgatatgtgggcccaatagtttttattttttccggatcagattgctacgtcagcgccacatcaacgttatgtaaatgccacataggacgaatacctagtcaaaggagccacataggcgccccatcagctaaaactggggaccatactgccgagagagctaatttgcaatgattttgtaagttggggatgcgtatctagttttatggtttgaggatgattttgtaattcggtaacaagatgagggacctctggtgtactttttccatgctatatactcccaactcccaagtagcattagcattaccgagaatggcccagacaggtttttacggtgctttaacaaaggtagttgctattgaacataaatgcaacaaaagctagggttttttcgtgaccgacatggttttgggctggcccatatcacatcttgggcccaaatttctgtcacgagacaaccatagtttaatttgtgtccacaagacaaatatggtgctaaccaaccacgaaaatcatgcatatttgtagcactcaaatatcgaccagtacagttgttgatccactggctgcggtttaatttttgtttgaccgttgatatacgatgcacaaccagatgtcggaggaggttttcggacacgaataaaaaaactaattttataactcgtctggaaaccacgagatgaatcttctaagcctaattaaaccattattagcacatgcaggttactgtagcacttatggctaatcatggactaattaggcgcaaaagattcgtctcgcgatttctatgcaaactgtgcaattagtttttgtttttatctatatttaatgctccatgtatatgttaaagatttgatgtgatgtttttagaaaaaaaaaattgggaagtaaaccaggccgaagtgagtgcagatgcacgcatgcaaccatggcagctagcagaggcacctgcagcagctaagctaggtttccctagatagcccgcctgcatgagcaaagctgcgtacgtatgcaatggcattttcttgcaagctttggccaggttgggtacgtctccatctgcaagtattttcgttcatgttatatttgggtcctttttgcttttcttttatttttttattttaagaaatattcacctagcataaaataaatttttttaattaattagactagggttcaagaatacataaattaattagactagttaagttattactccctccattttttttgtttgatgttagttagctcaaaattgaactaactaacgtcatacatttgtgcaaagaggtagtaatttgttagagtgaactagctagttattacacgattgacacgggggccttggcccccagtcccactcggtgtaaaattgttaaaattgttgtttagtgactcatattaaaagaacatcttggttttaatttaaaacattataatgatctttatagagagagaaaaaaaatattgcaagatgttcaaaaaacattaacagtgtttcaagaaacaagtcatattagggttgagataatttttctacataaacatggccagttgtaatcctttaccattagcattctatgaaacaacatatgaatacattatttcccttactccattgtctgttaaaaaatatttgatttatgacaaagaagtatttgcatttatatttgtgtatcgttattgtttccagacatttgaaaaaacaagtcttatattgtatttgtatactaattttttatgattttggcaatgcacccgaaccactacgtacaagtatgaataaacatgtcctttctgtgcccccactcagttataatcatcatttttacatccactaacaatcctcaatggcaaaatttagaaataagatggaaatatttcatgataagacaaaatagtgaatttattctcacaaaaacttagaaaaagtttatcacactttggagatgcatgatttttgttgcatgatgggaaataagtactcatgctttataccttattcagaaccgagagaaatcaagactgaatgccactgtccagactcggtttgttaccaaatctagaagaacaactttgattaaagaccaggttggcgtaatcttaggtgaactgaccatggagggctgaaagcagagggctaaaagcagttatcaatagtataaacacattttctgcaatggtaaagcaaacattaagacttgaaaggcactatctccaactggttatgttcctgatacttttcagcatgttgttcccctaaattctgaagaagtacattattctcatgctgaatatttggtatctccatatgcaaatcctcaatttgctaccacaaaaggagtgaatcctcatccataggaagaacatcaatgaactccccattaagcacaaaatgtgtagagtccttgactctccattacctcccatattagcaggatttaccataacaattctttgagccacttcactagggtctgtataaagatattttgtcagaactctgccaagaacactttctctgtgatgccaacgtattaacttcccaaaagtgtttgcaaccctataaatgtgagtctcatttctgtaatccgaaggaatccctaaaatcattatccaaccttcccgattgaaggggatatcaggtctcataaagtgttcttggaaagccccattatttagcatcaaatattggccggctatcaaagtatccctatgcaactcggaaggaacttggatcaggcataaaaagggaaacctgagggcgtgaatgacatgcatgttgaactgactgtttacggatcaattgcaacattttatatatgtaacaagatccacctcaacagtaattctgaatagacttaatgtttgttatacaatgtataatttcagactaagcaatttaaataccattattgtgagtaactaaacaacaattttacaccaagtgggactgagggccagtcaattttataccgagcaggataggggcttagcccccagttacatcgagcggttacaagatcaaaggatatttaggtcgctactgatgtagtctacatcctattaaagaaagttatactctctaatagatttttttgtgtttcttaactttggtcttgagagtagtataatatgtcgataggttagagggacaactaaaaaagtatagctgttagtgagaattgcaccatgtagttgattttctcccacctatcgacccactcaaacttggtacataggctagatcttgaaaacgaatataaaaaaatggttcaacttagctgagcattgggcctgatcataattatagctatattttgttagcttctcttcttatgtggcaaatcttctagataactttgttactttctttgaaacataagtagcgataagtgacacgtcttgtttagtaaccagttataaatgtcataaaactagttcacaagtatagctaatatgttcatttcatgtagtatactaaattgaatattttcactggcaattgcaattctaagactacaaaagttgtaaataaaaaaatttaaatacttcccagatgactggaaacaatattagacaataacaatataagactggatacaaatataatataagacatgttttctcgactggatacactaacaatacataaatacaaatacaaatgcaaatgcaaatacttcttcatcataaataaaatatttttcaacatgcagtggagtgaggaaaataatgtattcatttgttgtttcatagaatattaatggtaaaggattacaactggccatgtttatgtagaaaaaatatctcaacacaaatatgacttgtttcttggaatattgttaacaattttttctagcattttgcaatatattttttctcaatgaagatcattcttatgttttagattaaattgaagatgttcatctagctaggagaaacaagtgttttacttcttgcttctggatatcacacaagtactacttagaatccaaaataagctaaatacagtcagtgtagcatctgttctttgagagataatggtgctagtatattctaacagcatgtggcaatcaaataacaaaagataccagatctgcaaatagagaatcctattgtcaagtgaccgagtgttatttatgcaaatcctatatatgatagatatgtacttaatcctggatttataggtgtttctactatgaaggtattattgttgttaaaactgaattataagcttgaatgccaatatatttaaaatgctagactttgctgttaaaattctcattaccagcccattggtaaatatgcttgcaatgtgaccacagcaatgcctcggtagtggcagctgtcgtagtttaggtttgttggttgtgagtatgttcagttgtggttttagtttagtttttttattaactatgtatggtaaggttttgtctcatttctctttaaaatgaggtatataaaatacaatggtaatggcttggtctgtttagggaaaaaatgtattactaattaccatatgtctaccctaaacaagctaaaaagtttagattacagtaccactatctccctctcaaaataattataattctaggtcgtttagcatatattaaggtttgaaaagaaagactatgatgcccctcattaaatgatgtataggtaagagttgaatagtggttgagggtagaatagggagaaatttgaataagaagtaattgatgggacaattagtactttattatgataactattttgggacaaatttgaattgtagaaatacaattattatgggacggaggtagtacaatttatttttgaaaacaaatataagtgcaaatttggaaacaaaaattttgaggtaccatatttggaaaagtataaggtgtcatactgtgcattcaaacaaccatgcccttgatatatactccctctgttctttgatgggtatattaatggatggaggtagtattatattttgaatttattggtttcatatacagggagaaaaagtatgtttctagatgagaggggtgattatgataatttcttatgctcccatgagctcaaattaacttgacagattttctatctcagatttatatgaattcttctcaagccagaattgagcgaaaggaagtatctttttttacggtagcgctaatccacgcgctgcgcgcggaatattagttcgagcgccgtacaatgctccctccttccgatctttccgtttttttaccaccccacctttactccgtatcccatctttcctcagtttttttttgttttgtaccaccccaccttctatgtttcttttttctcttttccatcttatccgtgcttcatcaaaggacctttttgttttctgttccttctctctaggttttctgttttcgccttttagtaaaatatttaccgtttagtttttctttcggagttttttgtttttccagtgtctccccacgtttcaaaagtaataaatttagtctgtggagttttccatttactcctaacctcccatatctgctaattcaaaactaacaaatttactcgcatgaatgcccctttcaaaagtaacaaatttacttgcacaaatgcccccacagtgtacgtgcaccattcctagattgtcgtaaaagaattactaccagcatacaatgctagtaattctttcaccagtgttataaatattgtttagatttcgtggtctgcgactaaaacaattaccaccttcctatcgatatagcccatgatctcgtagccaccgtgtagtaatatgtttcttgatgtgtttaatacacagtataagagtaaaaactgggacttcgtggtctgcgagtaaaataattaccaccttcctctcgatatagcccatgatctcatatccacagtgtagtaatatgtttactgatgtgttcaatacacagtataaaagtaaaaactgatactaagagtattgttaatctgtataaaaaatgaccttacgaataaaaaaaattacatgctcaatcacacacaagtgatagaattactcacaagtgaatcaaactagaaaagaaaaaaaatgattcagcgaaaagtccatcgtgaaactgggatcctagtgactttgctggatcttgctataaaaatggagaggatggtttgtgtattgttaatgttaatggagagggcaaccgggtggcgagcggtacgtgatgatggaatcaagggagggtgtagtagcgtggtatagagatgggctcgacattgcacagtagcagccatccatcatctagcaagcacgaaaaaaatgcaaaaacattattgttcatgtcatagagacgacgagcaaaagaaaaatagcaaacaacctccatcaccagcggactccaccctatcatgtggctagacacatggagcacgatgtgcaggacctgtgcaagccatcaatttagatcagataatattggagattacatgttaatttgatttgcaaaaagaaattggggcttcatgcgtgaacgtgaaggtgaaggagagtatgcagatgcaaatcggagtgccatttccttacttgcttgttctatcaatattgccgacgtggagcagccgccggctgttgctcttgacctaggtgaacacctccttgctggttaaggtgttgctcggcgtccgatagcgaggcccggagcagcgccttcgcctcaaccgccgccggccgccgctgtcaaccaccacgatgttgtcgtcctcctccacggtgcgtcaccgatctatgggctgggatggtggatcgattcagatctgaaaaaaaaggaaataatgaagtgggggcgagagtggttggttgggtacgagaaaaatagaatatataccggaagcagggaagttgtttttatcgccgtaaatcatttactccgataatagtgggagcaggatgacgggacatagggttgtatcggaagtagggaagttgtttctattatcgaagtaaatcgtttacttcgataatggtgggagcgggatgatgggacatggggtgaggtgggcctagactaatacatgtttggcgctcggaatattaggaacgcgctgcgctcctaatagtagtaatattaggaacgcgctgcgctcctaatattaggaacgcgctgcgcttcagttattcctctgatcttgtatctactgacaccggcaagatgtgtaacaggaacaatctgaaggacaccctgctctctgtctacgggaacaatctgaaagacgccgtggacgacgaactagtcgaggtaatcaaaccaacgaccccaaatgaaatgtaattattgatggttctaatctctggcatcaaatttgtaaacactgaactatccccaaaactaatccatgaaactcttcctcgagacaagtctctccagttcttcactgctgccttttgtcgtcggaattttttctgttcgagctttgcacggccgcgtcctgtcgtcgttgtgttgatctgctgccaggcctagcgcctttcccctcgtagctcgatgcccacagacgcacgaacacatgtcccgatcaccacatctctcactgaatccacactcgcagatcgtcctatgctctctctctctctctctctctctctctctctctctctctgcaatcgaccaatcgtggactggctgattcggttggactgcaatcccgctgttccctccgagctgattttattgtaattattgcgtccgatttagagtctgttaggaaccacaacctctaatctcaattccactcaaatatgcaagcatccagtacaatagcaaccagtaaatagaggtagaagtgaggatgaactaagcgaatacaagtggtggaagatgccagaaacttctagaaggtagaggaagaaggaaggtaggtagggaggaaggaaatcgacaaggtgccaactggccaccaggtcgccgccgcggttcgccgttcgccaattgatctgttcgatgcctcgagcagggctgctgctgccttttgtatcctttcttcagcctccatgggctgggcttgtagtatggctaacatagcccatgtacagcccaattgagttcctaacagagtcaaaaaaatatagaatcccctccttgacttgccgagttctccgaagttcggcgagcctattttgtgcctctctgaaacccgtccgtcgtcggagctgttttccccaatccaggcaccgcccgcttcaccattgttgcgccctggcttctcatcgctcatcgccattgggggtaatggctttctttttccctccctctcttcctttcaccctgtcgcgttcgaaccagcactccatcccaaagccaaatcttctccccttcgctgggaatttggtcgctgctagcgaatcgatgtagcttggcaacggacctactctgccactcaccgccggtcatctccagtgatccagtgcctaactgatccgtctatcctcgtcgtccttctccactcgttccaatcctatgctccacctccactttaccctctcgtgcctccgttcgctggagcactgccggtcatcgatcccgcctgggttatagatggccatgtgggtcgtccggcacggcacggcctaggcccggccgtgcctaggccgaggcttgtcgggccggcatggcccgactgacgcatcgggccgtgccgtgccgtgccagcccacgtaacgcactcacggcccaggcacgacccaacacgcctcgggccgtgccgggccggcccgaaggcacgatgggctatcgtgcttttcttcagaataagcctaattttcgtccctcttattgggctgtgacatatatatagctaaaaaaaagtctattttacctccctctttttttggctgtggtagataaatagctaaaataagtctatttaaggtccttattctttggacaatgacatttatatgtctatttttagtccctatactttgtgtgccgggcctggcctgtcgtcccatcatgccgggccggcccgatcgtgccgtgctgtgcttgggccgggccaaaaagctgttccgtgggccaggccttcgtgcctcaggccttttggccatctatacctggggtcaactccctccggttaacagatgatatggctgccacgttgggctcaacgggcccgcgttgcgccagcgtccagcgagatgcggcggccacaagctaggccgacggccttggtagcttgcaaagcctcaaggcctagtaagccttgcccaccacaacatctcctcctccctcatggtccagaatccgaaatccaccaaccccctcctttccatgtggaataagttcaccggccgtccctcaaccacaaaaccagaaatatgtacctgaactatgtaaaaccgtgcataaaatgtcccaaggcagtatagaggcctagtcagcaaaaataattaaaattaatatgttgggcccacatataagtgagaaaatggtgtgggtccaacatttcaatttttttttcttttctcttctcttctctccgggttctctcgagcaggcgtagcgacagagggggagagaggtggccggcggtggcaggagagggagagagaggcggcgggcgtgacggcggtggcggga

SEQ ID NO: 10751 - DNA, 14305 bp, Oryza sativa
atttcatcgaaccctcacatataaagtggcatattgtagtggcatattgtccgtttttttcactattgtagtagttgatctagtattctgtctgaactacatattttttagttaaaaagaataaatgaagttcatataggcattcccagagcaaccacgatttagtttttttaaagaaaaatgtgggttttttagtagttgatctagtttcgtatagtattatccaacaattagccggtgtgggggctatggaacatccacaaagaagtaaccattggcccaaacaagaggtttacaatagaagctgagttgttgggcctttttatgcagatgccgacccgagctgagaattcaaatatgaatgttcaaacaccctaattttgttcattctgatttaagctctgaactttatcttttgacgttcaagagtgcacatagttgtctagcacatttggaggaatgaaacaatgcagctgagaaacataacagtatattgcaattgtggcctctctatgaattacttcatgaacagaagaaactaaacagaaaaaaggtgaatcaatcaaacctgcattttgcagaaccgattagtagtgaagattcttcacaaatcacaaaaccagatcaacatatgattaacttacagattgcttttcttgatttcacagatacattgtgttggatagtatataagaagaggtataccgcgtaatataggacacgttgtattgagcctcaggagggcggtatatataggagtacatggggaggagataaggaaggattacagatatgaaaggagttcacacaaatcaatcctatctaatatgactctaactaccatatactctaacatcccccgcagtccaagcgtgagcagcgcggacacttggactggagaagaaaccgacaagagtgctcaacacggatgatagccctttatgccattgtcgacgtagcctgaaggagccgagagagccgtggtcgatgaagccgtgcgtagagtagccgtggtcgatgtagccgaagtcgggaagctgatgtcgagtttgccgagccgcgggccacgcatggggcgccgtagagtggtcgtggacgcacgggagggcgtcgtggaccaaggtgcgcaaggatgcgctggagacgaagacggtgacataatcgcgacagtcgttgaggaagatgatgccgaagagccgatgtagtcgaaccgcgaaggacgagacgtcacacagggcttgccagaccccgggacaactcgggacgaacgcgcgcgccggtgttgccaataccgcgcgggcgagacaggggaccaccatgaatcatacgccaatgtcggaggagactagcagagaagacctccaagacggtcgcggcgcgagaacggcgtagagggagaattgccagagtagcacgcggttgtcggagaaaggcgaagtgtagtcgagaaagatacgacgacgctggcgatgaatcatgttggacgaagacgaaggagaagtagtgggaccaacggcctggatggcgacgtcggtagccatgtagaggtagctgcaccaccggtctagagtggcgacagtggcagcttggagatgcggcggcgatgctcaaagtagaggaagaagaccctgagtggctgacgatgaccagtacggacgacgaggttgtcaatgcgcgaacggcgatgaagacgacaaaagcggcgaagctgcggtccgagaggacaacatagctgcagctccatgtcgatgcaatggcgagaagtccaccgatgatgtagccatgctgaggacggtgtctctcagcactgcaataaccagtggaggtgtggaccacgggcagcggcactgcggcccaaggggacgacgcagcggcaacccgaagcttgatggcgtagatgcgtagtcgaagacgattggcagcaaggtgtcatcgaagctgggcgcttgaacgggtgatcaagccaatgatgcgcgggcaagatgacgaagtggaagcagagtcgatgccgatgtcgaagacgcacagatgtcgacgaggcggtgggcgacgcaaacccgatcactgatcgggaaaaaaaatggatacatagcagcagtagcaagcaccatgtgtcgggaggctagagctctccatgcaggccttgaccaggtcaaccagcctgtgcacccatcttgtcgctcccatgttgtctctctcctcacttgctaaccacggcaagatcacagcaaaggagacagtcaaaagaacaataggcaaggtagcaagagatcgacttgacgtagacgagcggatgggaacggtgttggcatcgtggaggaagacggccggccgcgggcgtcctggaggaagtcggccggcggcggaagcggagatccaaggcgccgacccacgcggtcgcggcggtcgtgccggcctggtgggcacaggcggcggtccaggcggaagaggagacgatggggacggccggacgggtccccccgtaccctgctgcgtccaacgacggcgacgccagccatgcatgcggggatccgtcggccacgccggcggcgcgccgtggcggagcgcggaggacgaggtgctggccgcgacccaagaccggcggctactgtagtgctgtgctgcttgacgacgacaatgacgaacggccttggccgaagagattgatctctcttacgacaagcacgatgtcgatagagaaaaaaaaatcggtgcccgccccgggagcgagatcgtctcccgggggagacggcagcggaagcggtgagcggcggctctaggtcgtccgctctgataccatgttagatagtatataagaagaggtataccgcgtaatataggacacgttgtattgagccttaagggggcggtatatataggagtacatggggaggagataaggaaggattacatacacacaaatcaatactatcctaatatgactctaactaccatatactctaacacattgatggtgattcagtctataattcaattgaagcctgaactagatcaacatattactgcagcttgggcaaacaatggaactacaggacttggacttcttatttttcaaccctgaagcgtcagacccaactgaaaaactgcaagtctgaaatcagacagatggcaactgaagttagtactttagttctacagactgttaacatactcattattgagattgcagcctgaaactcttgcttgctgactgactgctcattttgcagggacacacaacttgcaggcttgcaggatagtaaggatcttgtgcaggaactgaacaaaggataccttcagattttcagaacaggtccatgcatttcactgaagtactatataaaagccctcatgtgattacctagtctagatatgcacaacatcaaactttataactgtagaatatatgtttattctgcaaacccttgtgtttaagcctttacagtcataagtttctgacaagaaaatcagtgggtactaatgttcaaagagatgtggtgaagtaatgttctaggtgcctgatggaaatcatagattcacaatgtaagattgtaagatcaatgtgcattgcattaaaaccaaaccgatttaggaactagggtagatggaagcagcagcttaattataccatctgtgtatgattactcagggagactgggacactgaattgtgtcatcgagtttcagagtttcagaagtgaagcttcacgcttgttgcactgtacacgaagaaagtgatgctctgttctgttccctggatgacttattagtgatctttacttatttattttttttgacgcagattttacttatttattttgatagaactagaagaaaataatttatatagtggcttggttgcagacttgcagtactcttccgtcgtcaagtttacttgtgtttatatgttgtttgaattttgaagccattagtcttcaattctcaagttcacttgcctgtttaactttaagctgaaaatcattatacaaaggcacaaaattggattacaaaagcatgtggacagtgggaacaacactactcataatcagacacattagcagaatgaaccgctgttgcagaatgaaaaacagaatttctattaagaatgaattttattaccatacgaataaatgaaacataatgcagatttacagagaactagataactaaaatctttcctctccataaaattcataatgccattataaaattcagtggcatatatgatatatcatatatctactactaatagtacttagctactgctattatgatctatccactgaagggacggaatttcatgaagtcgccgacgaagttggcgacggcgcccgtggtggcggcggccgacacgacgaagccggcgacggcgagcgccctgagcccgatccacagtgcgctgccgcgccgcacgccgcgctgcgcgatgtacatctccgtggggaggtagacggtgagcggccagaaggagatggcaccgaggaggccgacgatgacgccgaagaagggcagcgccatggcgaccacggtggtgaagcagacgaacaccgagcgccacgccagccggaacgcgctgatggcgaagggccacacccggagctcgctgttgacgaagccgctgtcgggccaccggcgcgacgccttgcgctcgacgaaggcgaagaccggctggcagtacacctggtaggcgccgatgaggtgcacggcgatggcgacgttggcggcgtcgacgagccagaacggctcgaagaagccgaatccggtgaggaggttgtccggcgccgcgttgccgaacgccgcgtagcccatccacccgcacagcgcgtagaacaccgacgtcgccacgatgctcagcagcgacgcctgcttcatcaccttcgcctccgacggcggcggcgccttgatcgtgtcctggatctcggtgtacacgttggagaaggcgaacgcgaaggcgatgttgcccagcgcctgcagcgaccgccacgccttctgcgtggcggtgacgttggtgacgccggcgatcgtgccgcggaacccgccgtcggcgacggtctgggcgatgccgaggccgaggccgacgccggagtaggtgaaggacatgacggcggcgacgatggacagccaccagatctcgtggaagtcggggatctgcgagaagacgatctcgaaggcgccgaagatgagcatgtacggggtgctcgagatgtggcacgggacgttgtggccattggcgtggaagcagcccgccctcttgatggcctgcatgctgatggaggcggcgatggtgtagccgacggcggtgccgacgaggttggcgtactggatgatgccgcagagcttggcgttggcgccgccgaggatggcgcggacggcgccgatgtaggtgtagttgcgggcgccggtctcctcgtcgccggtgcggtagcactcggcctggagcgtggcggtgaagtaggtgacgccgccgaacaccaccatcacggcgggcccgccgacccacccgagctgcgccgtcgcccacggcagcgacagcaccccggacccgatcacggcggtgatgatgtgcgcgctcgccgtccagaacgtgccggtgcggcgcggccgcccgtcgtcgtcgagcaacgccgagtccgcctggttgccggcctccagtgacacctcgagcggctcgatctgaaccatggcggcgaacaggagcgcgttcccggtgttcttggcacggaagatgcgatctctctgctctcgatgtggcaatggcgtgatcaagattgagatgcgtgtggagaagggaggccgccgggagcgcggtataaatggcgggagcggggagtcgacttgccgcgttcatatccgaggcgggaacggagtttgaatcggagacgggagcctaaacttcatccaatctgggggagataaaatttggcatattttagctcggacaggacgacctatccgattgggagtgggactcgttaaaatgcactctgttctccgactcgacaaacacgacaatactcaaatttcaatcaacggttcagtttttcaggtcgaccgaatgatttgcggatcaaatttcattaggttgagagtttaaaatcgaattaaaactctcgaaacactgcttatctattatccttatccttatctttatccttactttattatcctcaaaaacaaaatctctgctttcaaattttttcgttcggactccacccacgcgtcactccgagcatcccagcggacacgtcacgcgcggccacacgtgttggcaggaatatactccctccgtggcgtggctgttgtagttgtaaagaccaataaaaccgtttaaatatcagttacgctgattaattctctccgttcgaagagcgacgtttaggtagttgcgtggtagatacgctagcattaaccaccatgcagcgtgcgctcgacctgtactttccgcgcgaatagccagcatgcatgcagatgcatttttgctagcgcgctttgctcgcctggcataacgccatgtatggattgttttgattcaaaaatttggaaagccccatgcatgcatgcttgatcaaaaatttggatggcgccatcagcaataaaaaatgaatcgaaaattttcacttgacgccactatttgccagcaaaattttcttctataaatatggacaatgcaccacacatttcttccatctctcttcttccctcccatggttcaacgtacgtaatggccagttttgatctaaatctacccatcatcaattgggacgaagttgaggatttcgatggagatatatctgatttgaactatgacttcgtttgggattatgacaatgaaggtgttcataggagtttcttctcttgctttgtcttcttttttttcttgtgcatgtgtgactttataattttgtttcaacgcacagatggtgaagatggcaatggccgcggcagtggcaacgacggtggctgcgacggcagcgacgacgatggcggcggcagtggcggcggtggcgacgacggcggcggcgatcaaaccaccgatggagcagtcgatgcaggtaatactcgttcattttctttttgttgctgtgtctttttgctgcacgagttgaaggcctttgcatgtacacatgcacagtgccatgcttaagcaaactagccgatgcatgccaaccatagtatagcctgcatgttctcagccatcatccaccatgcatgtgtaggtatcaatattaagaggaggagacactaccctcctgatatgaaatgagccatatatgcattgtgtttggagagatcggatcctggtatgatgaaggagggagtgacaaagtcagttgctactgatatgggggttccatggagagttgttcagcgtgtatggcgacatggacaaattggaggtggaattgaagctttcgaatcgaagaagaagaagaactgtggccgcaagaaactttcttttaaccctgatgccatcaaagatgtaccgcttaggcaacgccgaacactccgtgacctagctaaagctttgcatatgtcaaaaaccacattgtttaggcgtttgaaggaaggaagatttaggcgccatacaaatgccataaagttcaccttgaccgaagataacatgaaggcccgtgtgaaattttgtatacaaatgcttgatagccaaagcataccggacgagccaactttcaaatctttgtacaacattgtgtatatagatgagaaatggttttataggacaaagccggacgaaaattattacttgtcacttgatgaaccgaaccctcgaagaaatgtgaagagcaaaaatttcattgataaggttatgtttctagcagcgaaagcccgtccaaggtttgatgagtatggcgaatgtacatttgatggaaaaattgggattttttccttcacttactgggaggcagccaagaggagtagtcgcactagggagaggggtaagttgtttaattatgtttagttactccacatatgacaactctactaattttgtttaatcgcatgatttaatacaggaaccaaggccatgacatctgtcacgagggacattatccagaactatctcattgaaaaggttttgccggccatcaaacataaatggcctaatgaggaacgaggacttccaatattcattcaacaagacaatgcgaagacccatattgcagttgatgatcctgcatttttaagtgttgcacaagaagatgggtgggatatacgacttacatgtcaaccaccaaactgtccagatcttaatgttttggatttaggtttttatgcagcattgtagtcattgtttcagaagtcatctccatcaaacatcgaagaaattgagacaaatgtgatcaaagcatatgaagaatatccggcggatagatcgaatcatgtgtttcttactctacaaggatgcatgagagagattatgcttgcaaaaggagggcagcactatgcaatcccgcatatgaagaaaagatcattagagagaaatggtcaacttccaataaggttgcaatgtgataagcaaatttatctagatgcggtagatttcatcaatacatagttaggatatttctcttgtaactttgcatcgttcaacaattagcaagaaaaagaggagtattcatgtttgtttttctctgatcttcacgaaaaagacattgcattaaattgaatagaacaatcaagtgcatacacattagctaaaccatctagcaatgacaacaagcagcaacattggcaccgattatacctctagtgaatcagttgtttttttccttggcgtcagtctcctctagtgaatctgcaacaaatgtgttgttggccagtgagtcaacaacgtacccaatgttgtcggagtcagtgaaacgatcggcgccggccagtgagtcaaccacgctgccctctcggattccggcgtcccctgccttctctccgttgtcacccttgccgtcgtcggtgttgcaacagcgaacgagctctgcttgcgctcgcagccgcatgcgaagggcatgcacacggagcgtacgagcatgagtgatatccatctgcgcctcctgccacatgcggacggcggcgtcgcggagcgctcggacacggccgagctccacttgagcacggcgtcacatgagcacggcgtggagacgaagtgatcgcgcgcggccgaactccacctgcgcctgttgccgcatgagtcgtgcagatgcaatcttctcctttgtcgtcgccatcgttggcatatgaagtgtgagcagtgtcacagaggggcggtgtgtgcagtgagagagagagaggaagcagtgagagcgagagagagaggggccaggagctgagctttttaaaagccaaaccgagtcatcagttaattctctgcatgcaccagtacaggagccgaggagtactcatcaattcctgcatgcaccaaggagttgccgccctgtattatagaatccagttgaaaagaagttacgccctattttaaggaacggagggagtaacagtttagtgtgctttgaccgggcccacacgcgatcatgttttggattaaatctaaactgaattgtcaaatatagtttgtttcataaagataaaataaagcttagactccctccttacctaaatgtttgacaccgttaacttttttaaatatgtttgaccgttcgtcttattcaaaaacttttgtaaaatatgtaaaactatatatatactaaaagtatatttaacaataaatcaaatgataggaaaagaattaataattacttaaattttttgaataagacgaacgatcaaacatttttaaaaaagtcaacggtgtcaaatattttgggatggagggagtatttaataaatttacatcattatgtccagaggtggaccaaaacttttttttaagatccactataatcaacggcatatatttttcctttagttaatacgttcatttctaataatccacaaatgcgaataaatatttctctatatgcggttacaaaatcatatgtggaaaaaacaaaaaacatatgtacagtgcttcttcatggaaagaaaacatatgttacacaaggtcaccctttgcgattccaatctaggccgagtttagttccaaactttctcttcaaactttcaactttttcatcacatcaaaacttttctacacggataaactttcaacttttccgtcacatcgttctaatttcaaccaaactttaaattttggtgtgaactaaacacacccctagagcacacccctagatcagtttgtagcagaaatcacggcatccgacgagatctaaccaaaatcgcatcagaataaagccatttagctcgctcctctccagtttccgtcaatattgatcatttcaaccaattatctgatccatcactacactcctccatcgtcttcaccaaaccacaatcaccgccagggaccgggagtggtgaatgtgtttcctctcactttctctctccctcccaccctagcaagctgccatagtctaacttgcacttaacattatgttcttattatttcaatttatttttatgcttttccgatttcaggatagatgttcttcggtggtatgagaaacattctgattgcattatttttacgataaaattatggcattatttttacgataaaattatgatttgcatgactacacctaagattgcccaatgcatataaaataaaactttaatcttatgatgttcatcataaatttaatttttctcgtagcaacgcacatgtattttttttccggtctactttaaaaacgaaatctggttccagcagaactttcgtttgtccatcgttgcttgcatcatcgtggcatcctcccatgctgcgcactagcgtgcgctcgtccatcattgggagtcagagtcaggtacccgcacaacaacgatcccaacaagcgatcgatcgcggtagcaacctcaattccgccggtctatccgttgtccgcctttcgcgcgtgtcagggtcctgcatgagaatctttgatgggacttttgtctatggcattcgcgtttcacgtctaccacagagtcttcaagcaagcggggttcgagcgagctgggccaaaattttatataggccgagtttagtttcaaatttttttttcaaactttcaatttttccatcacatcaacacacacataaacaaatgctagctcagctgctggtcactcgcccttcttctcgatccggtgtgctcgagctctctccttctctttctctgaaggactcgtcgcctccgctgccggccaaccggatctgtaggtgagagagctgtatatccaacgtcagccagttgattctccatctaacactttcctctgtcattattgccgccggcgtggtacggtgcagatcgatcaacttaattattgcctccgatcaggcgcaaagatccgcgcgctgcaggccggccgactgcgagtgagcgaggggattgaggagagctgcgtcgatcaacttctactattggcctggtaattaaccacgttctgccaggggcggaggcagaaagtagcatgagtgggggccaatgatctaccgcttaggtagactaacaagtaaaaagtgtagggggcatttgcccccattcactgcaaaattgagtgggggctatttgatttgcaggtttcataaattcatgatttccactgttctactcaagtgattggttcatacatccatgcatcttggcaaaaatcaggtgtatacaactcaaagcttcaaaatcaatattaattatgacttgtttatatatttcttgcattagtattatatcttttttccgtatgtgtctttaatatcttccgtaacactgaattatttacttaattagtagtgcaatagtaatagcaatactcgatttatggtttaaagactttgtattatttttctcctcaagctgatcacgtctaattttaagttgaataggtatttggtggcttttcctctttttcctggcttgtacttttgttaccatttcgcctattctttaatgtactgatgcataagccttttgtctattcaagaaaatgagttttttcccgcctcaaacttatatgtaagtttggccttgtgccactactatacgtatacgtactaggaaaacggctttaatttttgcatttgtatacttactttttataatttggcaatttccatcctcaccactgcaagtatgagataaactatgctcgttctatgcccccaaatggttaagcatcatccgtacccctttaatgattcacaactataaaatctaaaaataaaatgaaacatttcatgataagataaacatttccaaatttagagagagtttattgcatttgtaaagaaaaatatatgccattattttaattttaactaactttgtttaacttcttatttcagtctatagggaatgatggtgaatgcattaagcatcattggatttgcactattagtagggtttaccataggattatctacagatctttggtattttcagtgtgaaggcaagaattttgcatccaaaatcatatacagaagaaacttagatttcttagacactgccacgtaactcgcgggtcatggctaagtcaaggaaagagaaaatttatgctattacacagtgtcgaggagacactaatactaatacctgcaagagatgtgtttctgaggcagtacgggatgtgcaggtggtatgtgattcaagggttgaggctagcgtttattataacttttgcagccttagagtttctagtgaaaatgttcaattcaatattttacatgacatgaacatgttagctatacttggcaaccaatctcatgtcactcataaccgagtttctagtgaaaatgtttaatttaatattttacatgacatggacatgttagctatacttcatggttataaaaaaatttaaaaaaattaaaaagatgtattaacatgtgatatatcactttacaaatatacaagttcaaattcaacttctacgcctcgcaacaaaaaaaaattgactgtgaatatcgttaactagttgtagtttaatttgaaattgactgtgaatatcgttaactagttgtagtttaatttgtttttttcgttgcgagatgtagaagttgaatttgaacttgcatgtttgtaaagtgatatatcacatactaatatatcttctcaattgttttccattttttttcataactatttgggtgacatacaaacaacgaggggatatcccctcgagggatgaaaatccactcccaacttgcacttaacattatgttcttattatttcaatttgtttttatgcttttccgatttcaggatatgatgttattcggtggtgtgagaaacattatgattgtattatttttatgataaaattatgacctgcatgactacacctaagattactcaatgcatataaaataaaactttaatcttatgatgttcatcataaatttaatttttcctgtagcaatgcacttgtatttttttccaagtctactttaaaaacgaaatctgattccagcggaactttcgtttgtccatcgttgcttgcatcatcgtggcatcctcccatgctgcgcactagcgtgcgctcgtccatcattgggagtcggagtcaggtacccgcacaacaacgatcccaacaagcgatcgatcgcggtagcaacctcaattccgccggtctatccgttgtccgcctttcgcgcgtgtcagggtcctgcatgagaatctttgatgggacttttgtctacggcattcgcgtttcgcgtctaccacagagtcattaagcaagtggggttcgagcgagctgggccaaaattttatataggccgagtttagttctaaattttttcttcaaactttcaacttttctattacatcaaaacttttctacacacataaacttccaatttttccgtcacatcgttccaatttcaatcaaacttttagttttgacgtgaactaacacacccatagataggattccaagcagacgatcagctaacactaatcagactatgcatacatagtcacatgcgaatgcacatgtacagattggtttctgcccaatccagtgcatgcaacattgcaacacgaggattgataagtaagagcacacaagattcaagtatccaaccaggagactgcaggcttcatcttaggaactgtttagttggtgaaatgaaaatttttgggtgtcacatcggacgtttgactggatgtcggaaagggttttcggacacgaatgaaaaaactaatttcataactcgcttggaaaccgcgaga

SEQ ID NO: 10752 - DNA, 8695 bp, Oryza sativa
aatcccttatattatgggacggagggagtagcttataaggttctgataaggctctctaagctagactaagcaagtctacgctgattaaattattgaatggtttccatgtcagttatgcactaatcctagaattgattcttcttattggggtgcgtttgcttaattgtcatgtcagtttttctttttaatttagatatattcgtttgcttatatttgcctaatgagcattcacaatatcatacgtgatatgatgtctagtagctattcctataacgccagcattcacatttagcccttaaaatgatttcactatctctacttatctagattaacacataactgccgccacaaactaataaaagataattaaggatgtctaaaaccaattacatgatgtagtaatttctgattattctatttgtgttctcttggcagagatagtgccatactgagtggatcgcacataggtcgtgtcatagacttagacttccttttttccttcccttgtaggatgatttgtgtaaaattaatgagtcttctgtgtaatataaacaatcgtgtcttgtcggccagatttaaaatttccagttccctttaatttgtatataaaggaaaaccagattccccagtcaggtctccagagagttagtgatggaagaatatccctgtgtatgttgatgatataagctgttgatactccatgatatatatgatgcagatcatatctatgatgatctgtgcttgttgcttaattatgtatcaaaagttaagtttgttgggatcttaattagaaataagctaactttgagattatttttcccctgaaaatagattaaattttactgtatattatataaaaagtatacaataatttgtttaatgaatatattaacataagaaaatatccgtaaaaaataatatgctagcaatatccacatacattttttttactgctatatccactttttcaaaggatttcggttggttaacgagtcagcaaggagcatgcagtcatgcatgattctcaggtccacaaatgagcccacatagcgtgtaaatagtgggactcaaactaattagagataaatcatattaatgaacttcatatatggtgctatcccatttatttggaggaacatggttgaaactaatgaattgatgtacaagttataagacaaactaaagtaccaaaatcaataaaaaatgtgttcaaaacaaagataaaatttaatttgttggagatatttgaaaattagaatcctcaacttattaattaagtgtgtgttcatattcataaccatacatggccgtacacacttctcaagtaatgtgcactggagtgtgaatcggatcaatttttacatacagaacacacctagtgaaaagtatcatcagtactccctccgtcccaaaataagtacagttttaacattgttcatgctcaacgtttgaccgttcgtcttatttgaaaaacaattatgattagtatttttattgttattagatgataatacatgaatagtactttatgtgtgattaatatttttaatttttttcataaaatttttaaataagacggacggtcaaaacgctggatacgaatatctatggctgcacttattttgggatggaggtagtaaaaaaaagccttgttaaagatataagcatatcccacaaaaagacacttccaaattaaatcaattgttagtgctcttggaacccataggcttgctataaaattaaacttcaacttgttttctttcttgaggtagatatctgacaactgatcgagtaccattcacatgcttaatttgattaaaaaaattgcttttttttttcatattggttccgaaacgaatatttagtatgcctacaagttgtttcaatttataatggaagccatatatacatgcatgttcttctgttgctggaagaagaatcctttccgaaagtggtgctaatcgagaatatgttgatcttcttggttttattctttgccatcagaagtttgttctagctaggcaaggtggacatatgtttttcctttggtattttcttttgaaccaactgcaaagcctgacaagtacatatctgtgagatgccttttttaaaaaactttaacagtgataagtttcaccttatctcctgaaaaagaaaacagagagaaaggtaaaatatggatgggatgtatgaaaacaatgtttattatttgcaatgcgcgtaagggcatcaattcacttgtttttttacatcattaaaacgacattatggaagttactttctgaatcatagcctatcttaggatatagtaggcaacacgcaacgaaatcagagtctctacactctctacaaaagagggaaactgtaaagatcttaatcattttcagttacaaattaaatggtgtttcaatagcttgaaactcaataaagtttccttttggagagaggatagaaactaccccagctagcacatgcttgcatcgaacaataaaacaactttaagaccatatattcaagagcaaacggtccatcgatcatatataacttctactcctatctatatatatcgcaaatacgacaaatataccaattgagctagctagctataggatgatcaaccaatcaaataagcaacctgcattctcttcattcactcactcactcatactcatacatatatatgtgccccctcaataattaaaagctagatctacgtacacatacgctgataaaggtcgattgagacatcaccccaaatcttcccctaactttgctaattattcactggccttttcctttctatttctgctacagttttaatgaggagaaaaatagatgagctaccagttctttgcttttcctgagctatatatatttgggtggcttgtgcatcggctggcactcacccttgcacactcattctctagagaagggagagagaagagtgtagtagtagctagctaggagaaagagagagatagagagagaaacaatggacaggagagcagtagtgtatgatgctgaagcagttgatgatcatgagagacaaggtatgtgtacatgatgatcaatagctagtttactttgcacctaattgattgatgtaatattcagaagtgcccaattaattgtcaaaagtttattcaaataactactgtctgaacccatgctcatctctctatgttttttcctcgaaggcttttagaaggtctttgcatttgattgtgagacatgcatgtgtgggggttgtcatgcatgcatgccttttgctttgcacaacataacagaatgttaagaggggagctaggggacaaccttttctgttagcagagtgacatgcataaatgatgcaggatgtttgaaagctgcagttcaaaacatggtccatgcatatgcgaagcacacaggaccaatacatactcacatcattcatctacctttttagcttctaactaaaaaccacccagtcttaattactgtcaaattaaatcgatctgcccctacttgtcgtcatctcaatcacaaggaaattttgacagtaattgcaagtgtgtttacttgagctctctgcattgggttgatatgagatgatgatgatgatgatgatggtgatgatcagggacggtgtggacggcgacgtcgcacatcgtggcggcggtggtcggctccggcgtgctggcgctggcgtggacggtggcgcagctggggtgggtggtggggcccctcgtcctcgttggcttctcatgtgtcacttactacacatctaccctcctcgccaattgctaccgctaccccgaccccgtcaccggcaccgccaaccgcgagtacatcgacgccgttcgctgctacctcggtataatatatatatatcattataataatattattgtatttttacgatctataagaaggtaccacgagttaaaaagtgtcttaacggtgatatatacgtcaattttctcatgtgttttagggccgaagaacgtgatgttgtgtgggtgtgcgcagtatgtcaacctgtggggtacacttgtcgggtacaccatcacagcgagtgcaagcatgatgtaagttgctaattgccaatgttaagtatatatgctcgtgcccttcaattagattcaccaatcatcatatataaacgaatggaaattgaacttattttacgtacgtccgtggagtacgtgcatgcgtatatacatcaaacttggggcaaattaactaatcagtgcacattagaacttgaataattacagtgacctggcatgattaagatcttgatttaatatcgctttaacttttttttccatggtgcgttcgtgctcacatcctcctaaactttgtcgggatcgaaaacgtagtcgacaaatcagacagtagtaaaagtgcaccgaaaaaggtggcagagtatgtggctttaattagcagcctacatatagctgattagattatattaattaggctactttaattatccagtctacgagcataacttcgccctgaaacgaggagaatcccttgcaagcatcaacgatcgattttggatgcaaattaacacgcttaatgcgtgacacatcttggttggttaattagcacattctgcacgtacgtacggttgcatgcacgtatctggcgtgacactcacacatgcatgcacacttgtcactgttgcaatttcctaactactcatatagctcttaattgtaaaactaatcttgtgattagagaattattactctatccaatatttagaataacattcaattgctactattaatgatttctaaaatatttagattaaagaaatgatatccataaacttagctccaaaaatattcttataatattataaacatatcaaaattttataaacttacctttattataaaattgacggccagaatttcaaaagttttaacaacccccctcccccctaaatgccatgtttggcagtaacatcgagaaatagtattgtggttagtgaattaatttttacaaataatattttgagttcctatactagtgaattaatgttgagatactagatcgaagcattaatacacgtctaattaaagattactccctccgttttagactataagtcgttttaactttagtcagaacaacatttttcatccaagacaaatatattataacaatattgtcaattatagatttaataaaattaatttgatgttacaaatatatatcactatatttgtccataaatttggttaaatttaagtagtttgactttgatcaaagtaaaaataacttataatatagagagtaattgattaattaatggatggatgcagagcggtgaagcgggtgaactgcttccaccgggaagggtacggcgccggcgactgcggcgcgtcggggagcacgtacatggtggtgttcggcgtcttccagctcctcctctcccagctcccctccctccacaacatcgcctggctctccgtcgtcgccgtcgccacctccttcggctactccttcatcagcctcggcctctgcgccgccaagtgggcctcccacggcggcgccgtccgcggcaccctcgccggcgccgacctcgacttcccccgcgacaaggccttcaacgtcctcctcgccctcggcaacatcgccttctcctacaccttcgccgacgtcctcatcgagatccaggacacgctccgctcgccgccggcggagaacaagaccatgaagagggcctccttctacggcctctccatgaccaccgtcttctacctcctcctcggctgcaccggctacgccgccttcggcaacgacgcccccggcaacatcctcaccggcttcgccttctacgagcccttctggctcgtcgacatcgccaacatctgcgtcatcgtccacctcatcggcgcctaccaagtaattacccatcatcgtctcacttcctcgttaatggcgggcggcgatcgacgatgatcttatgtttgataatttgctgcaggtgttcgcgcagccgatcttcgcgaggctggagagctacgtggcgtgccagtggccggacgccaagttcatcaacgcgacctactacgtgagggtgccggggaggtggtggccggcggcgacggtggcggtggcgccgctgaagctggtgctgcggacgatcatcatcatgttcaccacgctggtggcgatgctcctccccttcttcaacgccgtgctgggcctcatcggggcgctcggcttctggccgctctccgtctacttcccggtgagcatgcacgtcgcccgcctcggcatccgccgcggcgagccgcggtggtggtcgctgcaggccatgagcttcgtctgcctcctcatctccatcgccgccagcatcggctccgtccaggacatcgtccacaacctcaaggctgctgcacccttcaagactgtcaactgatcgatgatcattaatttgatcgcttattaagtggttaaattattcagttaattaatgatcgatgatctagttgttagctcagcaacaagcaccatcagccatcagggagctgcctagctagagctgtggcctcattttgtttctaatttctttctctctgttttttttttggtgaatgattgatcgatctcaatgtactgaggttggttaatttttcttgctgctggttaatttgggcttaattttgatcttggagtaactagaaaacatgtaattcatcgtgttgaggatgagcaatgcaagaaagaaaataattattcgccaaaattaattaatcatgcatgtcattttctttcttttacatcctgatcaaggagtaatataattaatcagattaatgtgtcccaaaaggcatgcaagaacttaattagtgcatccatcgatctctgtaaactatctcgacttgtggtttgtggccttcaagtagctcctcactatcatctccaaagatagtgtaatttctgccatttgcacaaaactatgcacatattgcattattgccatgaccactaattgttctacttagttgattcaggaatcatctcttctctagaatgtggtcatgattgcttggtacaaccaagtttctttccattccattatatgtgtgtgcttccattacacatgtcatctactactctttaagcaaaaggtgattgcttcacaccacatagtacatacttaggcactgaacaaactgatgatgcagaagaatattgtcctcaatttgcctcatttgctgagccctggagggaacaagcagacatattcagatgcatatatatcatggtcatcatcaaccacccatacaatgcatgctaattctcagtattggatcccaactaagttggcacatgataaagtagcttagagggttcattcatgattcatcctgcaggtgcgatacatgatgaattgctgatgtgtgtgtggtgaattagtgcatggctctcactgtcagtagtgtcgcttctgtctgtcagtgtgcacatcgaaattcagatggaacaacgagtgcccactaattgcattctgtatctgtgtgtgttcatccaaaatggttgcatgcatcaccacttttctgaagacttgttctgctctagtactgctttgatatgtgggaccccccttcatcttttacgtatcttcgatcttacttgaaggagaatgacatgcatgtgcgtatctagttgggttaggcccacctgtcattgacacatacgtggctagctaattgaattcataagatgccagatggagctttaactaattaagagaggttaacatgggaattatatttaacatgcacacgttatggtttacagaatttgtagctaatgagaatttgtgggtatgcattatttgaaaattagaaatgtggaaataggtattatttttttgaaacgaactacagatgcaggcgttcatataaacatgcacacactcaccatatatctctataactacctccgaagacatggcaagatatcttgagattcacgaagttaccgagtacgttgcttacaactgaaagaataattgaccacaaatacaagcatccgcgccaaatctaagacttgaatatgagtgaacagatcccaccagcaagaacctagcaagttgagctatgctcacttcgtaaaattgatatttagtttagttcaatgttatactcttatgcttatatagaagcttagttgcactttgcaacaaatttcatatagaatgtattttcagtgtcacaaacataagttgtaaatttgcgtggaatatacctaagatacgcttataaaatctttgaaccttttcattttcagaaacgaacatttaactgaattatgtatcatcttccatctgtctaatatactccctccagtttttaatagataagggtattgacatttttacacacttttgatcatttgtcttattaaatacaagtatgctgaaatataagttggcttaaattatattacctttaatgataaagcaaaaaagtattattatgtaattttttttgaataacatgaatagacaaacgtacccatgtcaaaaagtcaatgtcatcctctattaaaaacgggtggtagtactttcacaaccacaacaagggagtggattttaatccctcgaggggatgtccctcgttgtttgcatgtcacttaaatagttatgaaaaaattaaaaatatttgtgaagatgtattaacatgtg

SEQ ID NO: 10753 - DNA, 16318 bp, Oryza sativa
cgccgctgctggccttctacgccttggctaattcggcgctcgtcacgctgtatgcgatgtgttggaaggtgagctcgccgccgccgagctcgccgtcgccggctgcctcctctccttcctctcccttcgccgccggtggggacgcaatgttcttgttcttgtggcggcggcggcggcgacgtccgccggcgccagcgacaagccaacgtacgagaccaagtccatagacccgagcctcgccgtcatgacgttgccggcgcctgtaagtaagctatccatatccatctagttgcgccgccgtgtgcatgatctcgcatgcgccgacgatttgttcaccaccaggggcggcggcgtttgctcgccggagaagaagctggtggtgccggagagcgtgtgcgggcggccgctggggctgcagttccaccacgcctccggcgacctgtacgtggccgacgcgtacctaggcctcctgagggcgccggcgcgcagcgggctggccgagaggtggtgacgacggaggccgccggcgtgccgttcaacttcctcaacggccttgacatcgaccagaggaccagcgacatctacttcaccgatagcagcagcacgtactggaggaggtaccccaaattaaatcaatcggtcatgttcatactgcacagtgtgcatgcatcatgcagttaatcgtgtgccacgctcgccctccgctgctctgccgccgcgctcgccctccgcttctttgcctgcagctgagctcacgcccgccgccgctatgctgccgcgctcgccctccgctgcgccacctgcatccacgtgtgccgctccgcctaacgccggcctcactcactgaagaagagaaagagaggagagagaaaagagaagagaaggagaaggagaagaaaagagaagaaaaaatatgcagctgacatgtaggccctatgtactttttaaaatttcttttgctgattaggataccacgttagcgaaaccaccaatatatactgccatagaaccttgagtgaacggttttagtaagtttagggtaaacatatctggttttgtggttatggaacctcaaaaattctcgctattaacttgagagacctctggtgaacttattcctttccaagtcaaattattatccttcacctaagttccttttctcatgggccgattcacatgagccaacccttctcaaaccgaagtccaatatacctacccctcaaaacacagtatcagtactggatcttcccatggacccattccaacaaaatgtctctcctgctttacccccaaagcccaaaaggagggctgggaaggtgatcttgatggatttagaaaggaggagaagtgcaagtatcaacaaactttctgatggatttatgtcccctgatccaaacttgggtgtgggaaagccaaggggaaaggatagggcaaagagtaccaagaagcttaaaatgttggctcaagaaagtggtatcttactctctcttaaccctttgcctctggaacttaacgatcctaatgcttcagatgatgagattgatgcccctctcgccgattgttctatacggctccttcaacagattggcactgaggtctgtgggatgaacagggagatggtatctgccaaagccttgactgcccatgctggaactgggagtcaccctgctgctgcatcctaattctgtcccaatgaacagttctattttgctattttgtgaccctgtgttaggtctctcctgggtctgtaataatgaatttgcctttaaaagctgtgctactgtgatgaatgagtcatcttccatgaaggctccaaccgttggtctttggtcatgtattatgcataggactttatcttgtttctttttgatggacaatgaattcgcacaatagaaactggaatattttttgctggaattttaggggtctcaactctcctgcccgttgtcaggctacaaagcaaaagatagatgaaagtgcctgctcgattttttgtttataagaacaaaaaaggatcttttttatgctaagtttcttaagacgctagcccctaagtgatttgataatttctttttctctccttctgttggagcctcggggggtgttttcattggctggtgtaactctatgttttctagagttcacctacagcaaacccagcatgctttagttgtcatgctttagttgtcagtttcacttcaaagttaaatggacagaattgggttttgatcaatgtttatggcccttcccatggtcctcagagagatgagtttgtacagtgcctacatgatcttgatattgccaatgattattggatgatcctgggagatttctgttagaataaatgggctaggcctgatttttctattaaatctcaagagcccataataaatgttaaggataataataccacgctgcaaattaaaagaggagtatctcaacttaaatagggagttattggaggctccctgttgatcggttgaggtggggattggaaagccacacgcgcgcgcgcgtgcgagccgagccgtggcgtggtgtgcgtttgcatttctctctctctcctttttgcaacggaccagaatccaatcccgcgagatttcctctgcgtctctctctctctctctctcctttttgcaacggacaggaatccaatcccgcaagattgcctctgtaatatatagccgattcaatgcgattgatagcgtggttactgcggcaacgggcggattcctttcctgcgatattaggaaacagaggaccccgatcagatctgagagcttagtttccaaacgctggttcttcctcctagtgcctgtgctacttctgtttccccgattctgatcacttgcgcgcacgagtgatcggaaagagcagagcctccgaaaccacaccttcgtttgagatctgcacgggtaggcgggtgatcaggtttttggggagtgcttccgcacgactgctctctcttaatcatcgtcggtggttctgttcggtccgcgtcacggcgatgtctactagtggtggcgtcaacaaaggggccccaggaactggaaatgcaccgatcgacaacaccaacggaggtagttctgcctcacaatccagcggagggacctttacagggtataacatcctactgctatttctgttttcgttacttctggtaatcacaattttattgcattgtctacatgatgttgatgcttattttatcttaagcatgctcctggttatgtttaattttattactagatcacctcatgttgttcatgccatgattattgtcttaatattttggattaaaatatgccgatatatgactatatttccaacaatccaaaaacctgataggtcattttcggtagttggctttgctgctgcactgaaaccacatgcttttgatggttctaattataagagatggaaagcacgtgcactactgtggatgacagcgatgcaatgtttcatggggaaaacgaagtgaaccacctttctctcctgaggaagaggttaagttcgaggcttcggatttcctgttccgtggagcattgatcagtgtactcgctgacaatatagtggacgtgtatatgcacacgccttcagggaaggacatgtgggatgcacttgaggccaagttcggagtttccgacgccggcagtgagctgtatgtcatggagtagttctatgactacaagatggtcgatgaccgttctgtagtggaacaagctcatgagattcagatgttggctaaggaacttgagaacaacaactgtgagttgccggacaagtttgtggcgggaggcattattgccaaattgccaccttcttggtcagattttgccacttctttgaagcacaagagacaagagttcagtgtatctgatctcattggctctttgggtgttgaggagaaggcgagggcaaaggacaacggggcaaaaaggtcgagggaggttctagtgctaatatggtacagaagaagaaccctcatgcatcccacaacaacaagaaagtcaagcctgatgtcaaacccaaggctacaaccaattttaagaagaaaggcaagggaaaggcaaagggagactgctttgtgtgtggcaagtctgggcattgggctaaggactgtcctgagcgcaaagacaggaagtctgccaacatggtcatttgcgaggcggaggaatattggggtacggtaaaattttacctaaagttctctctgtttttcattcacctgattggtaggttgatactggtgctaatattcatgtatgtgctgatatttccctgttttcttcttatcaggtcgagagaggttcctccttgttgatgggaaacgggtgtgacatcccggcccaataaggattaggcctgtgtggcccatgtgagctgtgtgcgcatgtttagtaccaccttgctagtttagcacgagtggaaccgacttataaggcctcttccctccaaccacatcactcccttttacacgaaacgaggacgaaagtgtaagtggggtggtgtgtgtaagtgggcccgctcgtcggttgggctgggctacgcggttctagagggagggctgttacaacgggtcattgcggctgttcatggtgttggtatagtcgatctaaagtttactacgggaaagactgtgcagctgaacaacgtgcagcatgtcccttcaataaagaagaatctagttagcggctctctaccatgtagagaagattttagacttgtgtttgaatccaataaatatgtcatatctaaatatggaacttttattggaaaaggttatgacagcggaggcttgttccgcatttctttggatgacatgtgtaataataataatgttgtgaaccatattagcgagaatgatacgtctaatgtgtggcattcgcgactttgtcatgtgaatttcggttgtatgacgtgcttggctaacatgagtttaattccaaaattcactttggtcaaaggttccaagtgccatacttgtgttcaatcaaaacaacctcgtaagcctcacaaggcatctgaggcaagggatttggcacctctagaacctgttcattccgatctgtgcgaaatgaatggcgtgttgactaaagggggaaagaaatacttcatgacactgatagatgattgcactagattctgttatgtgtatctattgaaaacaaaggacgaagcattgcattactttaagatctataaagctgaagtagaaaaccaacttgaaaggaaaatcaaacggttgaggtctgataggggtggggagtatttttccaatgagtttacatccttttgcaaagagttttgaattattcatgaggcagccgaaagaaacggttgaggtctgattggggtggggagtatttttccaatgagtttacatccttttgtgaaggatttacagttgacacctccctattcaccccaatcaaatggggcagccgaaagaaagaactgtactctaactgagatggtgaatgccatgttagacactgcgggactttccaaggaaaggtggggtgaggcaattttgactgcttgtcatgtcctgaataaaattccaacgaagcataaagaagtaacaccattcgaggaatgggaaaggaagaaattaaatctctcatacttacgaataaggggctgtttggccaaggtaaatgtacctatagccaaaaagcgtaaacttggaccgaatactgttgattgtgtgttccttagttatgctattcacagcgtgggttatagattcttaatagtaaactctggagtacccgacatgcgagttggtacaattattgagtctagagatgctacattctttgataatgaatttcccatgaaaaatatacctagcacttctagtcaagaaactgtcataccccatgagcactttgcaccgatacaacataatgatcaagcgcctgagggaaatcctgaggaggataacattgcagatactcgtaagagtaagagacaaagggttgcaaaatcctttggagatgactacattgtatacttcgtggatgacactccaagaacaatagaagaggcatattcatctcctgatgctgactactggaaggaagcagtacgcagtgagatggactcaattatgtctaatggtacttgggaagtcgttgagcgtccatatgggtgcaagcctgtaggatgcaaatgggttttcaagaaaaagcttaggcctgatggtacaattgaaaagtacaaggcaaggcttgtggccaagggttatacccaaaaagaaggcgaggatttttttgacacctactcaccagttgctcgcctgaccacgattcgagtactacttgctctggcagcctctcatggtcttctcgtccatcagatggacgttaagacagctttccttaacggagagctagacgaggagatctatatggaccaaccagacgggtatgtactagaaggtcaggagggaatggtgtgtaaattgttgaaatccttatatggccttaagcaagcacctaagcaatggcataagaagtttgacaccacacttacatctgtcggctttgttgtgaacgaagctgacaaatgtgtgtactatcgctatggtgggggagaaggagtgatcttgtgtttatatgtcgatgacatattgatctttgggaccagcctcaatgtgaatgaggaggtcaaggactttctgtccaagagttttgaaatgaaggatttgggaaaggctgatgttattcttaacattaagctactgaaaggagaagagggggggattacacttgtgcaatcccactatgtagacaaggttttaagtggctttggatacagtgactgcaagccagctcctactccttatgatcccaacgtgctattaaggaaaaaccgaagaatagcaagggatcaactgagatactcccaaatcattggttcattgatgtacttggctagtgcaacgaggcctgatatctcatttgctgtaagcaagctgagccggtttgtctcaaatccgggagatgatcattggcaggctctggaaagagtaatgcgctatctaaagggcactatgagctatggaattcactataccgggtatccaaaagtactggaagggtatagtgactaaaactggatatctgatgccaatgagataaaggccacaagaggatatgtgttcacacttggaggtggcgttgtttcctggaagtcttgcaagcagaccatcttaacgaggtcaacaatggaagcagaacttacagcactagatactgcgatagttgaggccaagtggcttcgtgaattcctgatggatttgccggtggttcaaaaaccagtgccagctatcctaatgaattgtgataatcaaacagtgattattaaagtgaacagtttaaaggacaacatgaagtcatctaggcatatcaaaagaagactgaaatctgtcagaaagcagaaaaactccggagtgatagcattggactatgtccaaacggctaaaaatctggcagatcagtttaccaagaggctaccacgtaatgtgatagacagtgcatcgagggaaatgggcttgatacctacctaaggtcgcacaatagtggaaacttgtccattgtgatcggagatcccgtaaatttggatggcgaaacaaactattgtgtggctgagagaagagacccttgaaaatggctcattttcatgatgtacttctcttctattctgcatggtaggatggcttatgccttaatgtggtcctagtagcttttctaagcagagatgttgacctgcagaacatctcagaaggaacacacctatatgagttcgactgctagtcacagtctatgagatttggacgatctctagatactcatgaaagggcctggagtttgacttatatgctccaaacagaggggatgcaaatggcagcccagtaccagtcaaaggtttgagtgaaacctgatcacacaagactgacaattcaaggcatagtccattgttcgttgtggtctgatgtagctcatttcctatgtggaagttcaacttaacagtctctaccaaaacactggtatatcaaacaggttcaactttgagaacatttcttatgagccatgaaatttggtgaggattgttagaataaatgggctagacccgatttttctattaaatctcaagggcccataataaatattaaggataataataccacccttgaaattaatagaggagtaactcaacttaaatagggagttattggaggctccctgttgaccggttgaggtggggatcggaaagcgacgcgcgcgcgcgctgagccaggccagctaggccgagggcgtgggcgtgcgttgcgtttgcgtctctctctctctcccctttttgcaacggaccggaatccaatcccgcgagattgcctctgtaacggacggccgattcaatgcgattgatagcgtcgttactgcggcaacgggtggattcctctcctgcgctattaggaaacagaggaccccgatcagatctgagagcttagtttccaaacgctggttctttctcctagcacctgtgctgctcctgtttccccgattctgatcacttgcgcgcacgagtgattggaaagagcagggcctccgaaaccacacctttgcttgagatctgcaccgggtaggcgggtgatcaggtttttggggagtgcttctgcatgactgctctctcttcgtcatcgtcggcggttctgttcggtctgcgtcacggcgatgtctattggtggtggccgtcacagcaatgtctaatggtggtggcgtcaacggaggtgcgccaggaactggatacgcaccgatcgacaacaccaacggaggcagttctgcctcacaatccagcggagggacctttacagggtataacatcgtactgctatttctgttttcgttacttctgttagtcgcaatgttattgcgttgtctacatgatgttacttctgttagtcgcaatgttattgcgttgtctacatgatgcttattttatcttaagcatgctcctagttatgtttaattttatcactagatcatctcatgttgttcatgccatgattattgtcttaatattttggattaaaatatgccgatatatgactatatttccaacaatttcaacttctatagatctgttgacaacagaaataaaccggggggcaacatgaatgatatatttatcttcaatgatgtaatcagttccttgggcctgctcgagattcccctaagtggaagatcttacacatggagtgatatgcaagctgatcctcttcttgaacagcttgattgggtttttacttcggctaattggatcagtgtcttcccaaacacgcaagcactagttacggctaagaatacctctgatcatgcccctatcaagattcagattgccacctccattcctaagtccaatgtcttcaggtttgagaattactggttgaagcagcctgggcttttggatcaggtctctactgcatgaacagacattcctcacataactgatcaagcaaaactgatctttgctaaatttaagagcgttgctctcttaagaaatggagtcaatctatctctaagttgtctagaacaattgaaaactgcaacaaggtgatcctgtttctcgacaaattggaagagcttagacttctgaatgtgccagaactgagatttaggctgatttttaaagatcatgttgctcatctactccacggtcgagagctatattggaagcagagattcaaacagaactcagttcttttagggggtgaaaacaccaagttcttccatgcaatggccactgaaaggtacaggaaaaatgccatctcctccttgcttgatcagaatggcaatcaggtgtttgatcatgaaggaaaagctacaatcctctggaatatttacaaaaataggatgggagtttcggatttaccctctatggtttttaatcttccggatttgtttgacgataatggtgatattttctttctttgtgatcaaatctctactaaagaaattgattgcgtggttaagaatatgccaggagataaagccccaggcccagatgggttcaatggatgtttcttcaaatcctgctggccaactattgctcaagatttttataggatgcatgtgtgcagatttttggggtggttccattgacctttctgccatcaactacataattaatacatggtcccacctctcatacgcacataacgtattggagtacatgttacagctggctacaaatctgtagcctattttccttctctctcttctcttctctcctctacgtgtgcttacagctaacttgtagcctgctattgtactcactctaattggaatgtgcatgcacacattctacatccaaccactggacataatggacaataacaatttggcacattcaatgagcaataaaagtaggcaaatataacgacaaaggagacacaagctttgccgcagctaccagcactggtggagaaaacctttttcctcctggttcgtaacccccctttagtctcggttgtccaacagggactacgaatccgggactaaagatcgctatctttagtccagggtgaaataaccgggaataaagatgagtcaaccacatggtcggcagagccatctttagtcctgttggtgtagctaccttttttttatttgcatgggcaacagggccatgcatgtatctatatatgtaatacatatatacatgcataatagatatgtatatattaaagcacttaacattttatgtgcatatatgaccaaaacatatatttacactaaagtaaatgtgtacatatataaaaatagacatgtattaattacaattcattatgtcctagctagctacgacttcgacgtagtagtcgttatctcagaagctaacgacttatcaattgtatttccgttgtagtagaattcaccctcgggatcaaggacttgttcgttgatgaatcctatgagttgttcttgaaccgccgcgataaattccttgtgtgtgaggttatccctcatgtgaataacctatgaatatatgaaattaattagtaaataaaaaatcgatacgtacgcaatgaaatttggaatttatttatatgtacatcgagctctcttgtggtgtagatttgggttgtaaggcagtggcaatactcgcatacgtagtagccgcacaaattagttccctggtcttgctttgcacactacatatatatacatgacaaacggcgagagatttaatgaatatacacttatatttgaattagagattcaatataaatgtagagcatgtacttataggaaatttgaacctccgcctaagcttttctttccaattgccacagaccaaatgacggaagcgataccaagccctacatggagtttaaagctatgattcgtagtagcaattaatagcaaaattcataataacattggaacttatgacattacatgtctataagttcaaaaacctagtcaaaagtagactcatctttattcattgagtcatagacattgactctgtaggcctctaagtcaaagagtaaaaggacctagtggaatctgcaatatgtgtgaggtgatatatgaaaaattgtacatctatatgtatgggaacgaacttttttcggaagacagtaaaaactaacgctgtgttgtacggcaatagtatgaacgtcttgaaatgttgctccttcaggagatagacgagattgtcctctgtggcttgcggatacttggtgaccatttcgatgtttactttccgagggtcgatgaatctagtatcgaaaactccccgccgtcgggccctttgaatctccattctacaacgatataaaggaattgttatatatatggtgtacatatatatacaaggagctaattaaaggaacataagaaatataactcaacgatacgtacaaaatccatgcgctcagaatagatacgtcgagggcgtccagctggtatagttcgtagatatccttgaaattgatccagagaacatcttccccttgtaagaagtcggagatcttgatcctcgctccgataatctccctaccactggcgctcatctccatgtaccattgatggaatttgtacatctgtgtcagtagggactgcagctgctcaggcttgacaagtggtttaccgagttcgtagtggtgtctcacttctgcctttgggattggtgtgcctttaatcaactgagccctagttagcccggtgtcagaaatgaattcttttattccaatttcttgcccgatcaccaatagctcgacctcctggtttggttgctctccaagctgagggacttgtttgtactttccataatatgctttcttaagtgttcgctcatagtccgttagctttatggcctccttgactggtgccgacatactcctgaagaacttcttggcactcgggtccacaggaatcttcttttctggactccgaggcttcaattgcctcttcacttctgctgccacgtaagcgtcaagctcctcttgcgtgcaatcgtacggtggctccttgttcttagcggcatcaactttcgccttcttcgttgcccttgtgcgggcaaacggtggagcttggtgagttcttgacttggaaggtgttgtaacaccctgaaaatttcgaatctgaaatacggagttaaaaattcggaataatcaaaaatctttttaaacctttttgcatgctaggatttattatgcaattgtgtgtatttaggttgtgtgctaaagatctcgattaaatcttatctcctaaagggacgccctcagtccaatgtcttctcctttccttatctttacggtctgatttattaagtgcttcggtactaaataaatcacagaccttaatatataacccaaaaatcttttcttatgtcgcaatgcgacatatctttctcaattcttgccctccggttatttaaagccgttatgttaattcaactcaataaatcctatgtctacaatcgatcggcgcatttacttatcatacatccattcaaacatatccgattctattcctatcatgacgagtggattagtatgccacgcgtcatccctaaattcacttcttcgtttccgtcgttcgttcgtgcggacgcccttaaaataatcctacgacgatcgacgagttcgcttatcaggcgttaagcctaaactcctatttggcaccacggtgcatccatccaaacaaatcaaatctcatattgcaatccctttattctgtcccggtgcatgctcgaaatatatttacagtccaagtatatttctagtccaaacacagagccaaaatcaatatccatattctacagtccaaatgcacagcacattattcagtccggttacaaatacactgccaatttacaagtccaaatgtacatgttgtttccccccacccaaatccccttgcaaattcctaaactacaaatctcagaataatacaaaagttcctattacagtggaccgccttttagcccaagcccactgtcagcccaactcatctcacaacaagtctgttttttctccctaatctcagaattgcagcctaccaagcaaccttctcagccaaagtctgctctccctccccagccgatcatatgcatgcacagaacctgttcgacgaattgcctacaagccacaacagggttttacacccacttttgccgaaccacaacagtcttttgcaccaaattatgcggccattcaataccaggggcccttcccaaacaacaatccatacaccatacacccaatccacaaaaccatccacaaaatactccccaaacacgtgcagcatagtgggaagagttcacaccgatcaaacacaccgagttcacagagcagccaacaaacttaccttgccccctgtgttccaacagcttcccatgcaccagcagccggcaacatatataaaccatcgccaaaacgcggcctcacttgcacctctccatttcttcacctcctccctgctcgagctctactacagccactcctctgtccagcgcactggctgcctcctctccgcttgctccgccgcggccggctccgactgggcctcagttgagcaagaggacaggaagaccgccgcgccattgatcacctgagaacgactaactttgaacgattaacccctaacatctaacccttttgttgttctgttgcactgactcactaacccgctgactctttactttcggttgcactaacctctgactcactgactcactgacctttccatttttgtttcgctaacccgctgactcctttactttcgtttcgctaacttctaactcgctaacaccctgactcctaactcttacctcgcacctaacccgctgacgttgccccttcgcattgcgtgttcctttgttgacaacgatcgaacacgtggtgacgcgccactgtcgtgaccttaggacacggacaaatttggggataggcgggaaaatacaatttcccgcctatcctggcgctttttatcttaattcccctctcccttgctacagggtttcggttggcttttatagtgctcaaccataatctcaagatttacaagtttgccacctagggttgacatgaagttaccgaattgcccctagtaacctatgtctcataggggtatattggtgcattttgtggtccccaactgacattcagcgccagctggtgagagtggttgaagtggtccccatgcatggtatttccttgaaatgggccaattgctcgatggtactttccttcaatctttagcattcgaattgatctggccacaccaggagtcgaacacacactcccgttttctcagctccttggccacttcataagatcctgctcaaacacaacttcattaggaaaattatgtcgaccaatactactggaacgaattgtcctgttttgggtaaacacaaattcctagacgagagcaaacctcaaaagtggagaattacttcgagcatttttattcgactaaaaggaagaacttctaaaagcatgtttttcagccaaacttgggggatggtgttttaccccttgctacaacaagcccctcacgaataagggcgaagtgttttcggccgaaatcgtgctcgaaataaagatgtaagggataaaccgccgtcccttgtttgggcgaaaacatcttcgagttttcaacttggcgatcgttttaaaattccttaatttgttttaggcaaattaattaagtgattagtgagaggaaaagttttagccacccgtacaggattgaatgattagctaaacgattaattaaacaacacgtacaggttgtctttgatttgattgattgattggttaattttaaataatatttttattattattattattattttatttatttatttattattattatttttaatagaacgtgtaaagttttatgccatgtgtcgcttggttataggggtaatattggccagaacagccaagtctcttcggctatcacgcccttccccctcctgcagctatatatatggagccatgggtcactatccgatgattgctttcttttgtttcttcgagttcttttttccgataagtcaaaagcatttgcccatcatgggcaagtctgtaaagaaatccgtaaaaaagccaaagaccaaaaaagcttcttctggacttggtccttccattttttcggagaagaggctgaggaaattgcttaaaaaaggcgctattgcagatgccaaattagttatccgtcctgttgatgaatcgggtccttctcctcatcctgggtacactcttgtttttgaggatttctttgaggctggttttaggtttccttgcagttcttttgttgtcgaggttcttggtctttatgggattgagttccctcaacttactccgaatgcggtcgtccgtcttggagtgttcgagtggattatccggagttgtggtggcacgccgcatggctcagatttcgcttattttcatactatccggcgatacacaaagcaaaatacccaatttgggtgtgttagcttcacgccgcgctcgaatcgtggttgtccttggccacttgtctctaccatgcgaaccaagtggggatcaaaatggcaatctaaatggatctaccacaaaatcccagccgatttaaaagctatggagaaatgtcctttcgttttttcttgcaaggatccagaggttatttcagagcctgctgtcaatttgtcgaagaacttttcctccatccgatctcggattgaagagcttgtctccaagtttagcgttcgagatttagttgaagagttcatttgtataggaatt

SEQ ID NO: 10754 - DNA, 677 bp, Oryza sativa
gtcacccacaatcggttctggcagtgggaactcagcttctgttacagaaggccgattgacaaccttcataaccatcaggtttaaccaagtttgcagtagccaccagggtccacctgctccaactgccgaccgacggctattctagccgatgtgttgttcaacatctggtacagatagccgagaaggattttgcccaaagggaattctttctttgactccagggcttcggctacgaactgccagttggttgtagggccacaactggatccacagaaaaggaacttttccagccacatgagcaaaaaggctacgtgctctcgaggggtaacggatccttgacccatatatgctgccacatagccggaccaacaacctatgctcttggttttgaaatcgaattggttcttggtattcatgctcatggggttggccgatgaagttacatctagtccggtgatcatagtgatgtcaattaaggttggagtcatcggcccttggttgaacaggaaagcgttgatggtgtttgaccaaaagtaggtggcggcagccatcagaggttcgtctttggcagaattggctatggtgagggctagtgcttggccgattccaatctcatccaagtgaactttcttactagccgatacacgttgataccaagtggaccaactcctgtcggg

SEQ ID NO: 10755 - DNA, 1124 bp, Oryza sativa
gtggtacgccaccggaccaccgttgcctccccgaggagcccgcccccggcttcctcgttgtagtctcgccgtcgccggcctttggtgagcatccctcctctcctccccgcgctgtcgccggccgtcgccgcgggtggccgcgccgccgcgcgccgtcgtttggccagccggctttgtgccgtgctgtgccccaaccgcgccgcccctggccgcccgatcggtttgggccgatccgggccgtcggttcccgtggaccggcggtggaccgcctcggtggtcccggtccacggtggaccggcgcccttgtgccgctgaccggtggggcccgcttgccggcgccgcccctcccctttgatgacgtcagcaaccgtcttttcctttggaaaaataaataataattgcgtcataattcgttaataattatagaaattcatttaaatggctcaaaacttctaaaattcatatctaattcattcgaactccgaattgggccattcaaattgcaaaattcatctaaaattgagctctacatgtttgtttactttttatgtactgttttcttagtttttattagagtttttcctcgttttgcgtgtcagcgtgtagaatccgtcgtttcggaagtccgcggtcgcgaggaaaagagttcggaagatcaaagtgaagcagcaaggcaagtcacacattccccttgagcatgttgatcccaatttataaatgttttaccgtttacaaataaatatgcatgttttactaattacaagggatccgggtattacctatctgctcgcttgttccatgttaacttgatatctgtcatttgtcaaccatgggtaatagatcgcctagcttgtgttactttgatgacttagctagaactatatgcttacccatgcttatttaccactagctcagtcgaaggaataattgcagtattagacattctatatcttgttgagctgcgtgctcgagacatctggcgatgtttcatggtcgtaattatccaactaaaatgcaactgaatggtgggctgtgggtgcatggttttgctagtcgcacccatggcaattaaggaccggttcgcgggatgccctgaagaacttatcgtacttaccacaagccag

SEQ ID NO: 10756 - DNA, 1704 bp, Oryza sativa
gatctcggggatcattttccctcaaacaatttcatcggatcgagaaagggacgagcgaattttgaagggcggcggcggcccggcttggctagggttcagccgggcgacggctggaggtggacgacgagtccgataggtgggccccacctgtcagcgagtgggacgcgcgcgcgagcggcgtctcggctgcaggccaacttgggccggggaggagagagagagggttttgggccgactttcggcccaaagccaaaaggaggatttttaaaacattttcaatttaaattattcatgaaatgcaattccatttattaaaaatacttccttggctcaaataaatcccagaaaaatccaggaactataaaatcaagtaaagtatttaataaaattttatctagccacttttacattgaatttattatttaaaattagatcttctcttctaggcttttaaaatcaattctaataattccaattaaacaaccatttatatatttaggatttttagggtgtgaccaacctatccccctaaaacggaatttcgtcctcaaaattcggaaaaactggcgaacaaattcggaaagctgactttaattcatcttcttgttcccaagtagattcttcctttaagtgattactccattgaacctggcaaaaacggataactctattcctggttcttcttcatctgtttccaagatacggattggtttctcaacataagtcagatcctcttggactcctatctgttcaagattagctttttcggtagggacccttaaacactttttcaactgcgacacatggaacacattatgactcctgccaaagattgaggtaactccaactgataagcgacctctcctcttctactgacaatcttataaggtcccacaaaacgcggtgccaattttctttggtgtgaaaacgatgaacccctcggagaggcgtgacacgaaggtacacatgatctccttcttcaaaacttaaatctctgcggcgattgtcggcataactcttatgacgagactgagccacacgcaatctttcttgaatgatctttaccttctcttctgcttcccttaggatatcagtcccgaaaacctgacgttctcccgtttgatcccacaaaagcggagtgcggcacttccgaccatacaatgcttcataaggagccatttgaagactagcttgataactgttgttgtacgagaattccgcgtaaggcaaattcttatcccaacttccaccgaagtctaaagcacaagctctcaacatgtcttctaaaatctgatttaccctttcagtttgtccgtctgtctgcggagataagcagtactaaagttcagcttggaacccatctcttcttgaagcttcttccaaaactttgaagtaaactggctacctcgatcggatactatcttcttaggaacaccatgcaaacacacaatccttgccatatacaattctgccaaccgacttccggaataggtggtcctcaccaggatgaaatgagccactttggtaagtctatcgactatcacccaaatagagtcatggcccgatgacattctgggtagacagtgatgaaatccataccgatttcctcccacttccattctggtatcttcaaaggctgcaaaaaacctgcgggtttctgatgttctgccttgactcgctgacaaacatcacatactgctacat

SEQ ID NO: 10757 - DNA, 1519 bp, Oryza sativa
caaacaattagcggattttatatttacaaatggcagattacatttttaaatttcagaatgtacagattccaaggttgcaagatgtgaacctttctttgaactgctcaaagtttcgaatatgtgtttttattttcttaccaagaaatattgctgattttgcaaatgtttctaaaattcaagacatgaatgttgaattaggattttgggatataattttcatgcgatgggattataacttatacagtgtacattgttaccttttgaattgattaggtcaagacaggaatgctcccttcaatcggagtagtcagagttttatgtgaaagtctaaagaagtttccagtcaaaggtctgggaaaactatctgcatgccttgaattaacgcatagctatgctagactgccagccatatatttattttgtattacttgtgcttctgaaggcagctttagtggtggatccagttatggtgtccacaagtggagatactctttcagaatcatctactctctctgtatataggtacaggattcatatttggtttgttttatttgtatttataacatccggttggaatgcttcataaaatttagtgtaatagtgcaacatttgttttgtgcagggatgaattatttgctatggctgatatagtcaccccaaatgtgaaagaagcgtcgagattacttgggggtgtatctttgcgcactgtttctgacatgcgcaatgcagcggagtccatttacaaatttggtccaaagtatgtctgccatattttcatgaatattatgttgctgttcttaagttcttccagttacttattacacatgcacttttctgtgctattacatccatatatctgcccaaacaatgttgttagtatacttgtgattaatttctttttaatttttcatgtatggatatataaatctcttagttccagaataaggagaattaatttgtacctacctttgggcctcagtcttactgttttgcatgagagtgaatgctgcattttatattcttaggcctttattcgataagtgccaaaactatgtgcctaggcgttgctatttgcagtattaatggcatatgcaagaatgcgatatttagattcccattaaattgtgtctagactaatgtattattttctgatgcaaataatttaccatttgcagacatgtacttgtgaaaggtggggatatgctagaatcctcagatgcaactgatgtattttttgatggtacaaattccataattcaatacaatactgtccattatcacatctacatcctgcccttttagcggcctcatataaattctgaactgttttcatcaggtaaggagttcattgagctccatgcgcatcgcataaagacccataacacacatggaactggttgcactttagcttcatgtatagcttccgaattaggaaaggtgcaacgatgctgcatgctgttcaggttagtcttccagtccttttccctgactttaccttcatatagtgaagaaactgtgt

SEQ ID NO: 10758 - DNA, 4989 bp, Oryza sativa
gaaggtgggttaatcctgaatcgttggatctcagggagacgatcctgaccgatagaatgaggaatgtaacactgtgttggtaaattatagggtagatttgagaagacgggtgattaacaacgttatcgttttgtttatgcgcataccaaaatttaaattttaaaacataattttaattttaaagttgattttgtgtttgttttatttttaaaatgacgtaaagttttacttacaaatatcttttggcttttaattaaccgtacatataaacgtaagcaaaaggaagcagtgaacctataacatgtgcatagcctcatgtgtacttaccatgtgcatatcatgatgtgatttttggatataaaattggttctcctttagaatatgatttttaaaacacggaaaacgtagaattcaagtgccttggcacctgaaattctatcaaaaatttatgggttaaaaatatactgaaaaactgtaaaaaaaaaaccttctagatggagtgtagaaaaaaaagaatgaaaaatagagattaggcacataagatttttttccctataggtcgaacctcatgttaaaaatcctctaaaataattatgatagataatcctaaggaatttaataggatatttggaatttggaattgctattcctttgttacaaatggatatatagaaaaaaaaatttcataggatgtgaatcctgtaaaattcctccaaaattgaaaaaaacaaaggaataggaaaaacacatgattctggcaggaatacaagtgtaaaacagaggattgaaaaacacaggaaaaacataggaatggccgtttgattggaccataggaaaaacgcaggaatcagataagagagatagattcagaggaaatgttccaagaggttagacctcttgctaactttcctccaaaatgtacataggattactcattccataggaattttaaaggcttggatatgattcaatcctttgtttcaaaggccataggatttttttactataggattgaaattctccaaaattcctatatttttcctacaaatcaaaggggcccttagagggtcattctaataacggacatgaacttaacataccaatttgtagctcagctggtagggacctgttgacgaaaaaaatcgaacacaccggcctgggagatctgcttagctcatgtgcaggtccaaagattgatgatatgcgggcgtgccagtcagtttgatcctgcaactgataagatatgtaaacagcagatcaaaacagccgatcggttgacaagccgatggagtagttccagccggtagccaataatagccgatgctgataccagccgatagcgatagggtttaagcaatcggctatatgtccaatgtagataacgatataaaggcaatcagctgatgatgatgcaataaaataacaatataatccagtataaaccaatcggctagcaatgatatgataaataagcatcgatccgaaggttaaagcacacatcggctggaggtccgatgtcatgaaatccacaagattagattaaacagtgaaacctttgttgtcatcggcgaaatccaacttatatgtatgtgcaatccttatgagccgatgcaacgtccagataactcaccggctgaaatcccgatgaaacccttattggcaatcaagaagcaggctagagattatgtttctaagcacgacttagtagatcaaacttaactgatgcagcactaagtatgaaaagaaacataatatctagacaatcaagccgttgactgaattttcagggtggtagatgtctaagctaatctaatctagcaacacgatttagccgataccggcagaaaccctaaaacgagaagcagccgatagagctaaattgatatgctaagactagattaacagagacatatgataaataggtaagcaagtatatcatccaaaccagagcaatccaagaggtcgaacgtactgatgcaaccttgaacgacgccgatgtagatgagacaattgtctgggccgacggaacattggacttaccctttcgccggagatcgaacaccgatgcagccccgcgtcaggtgccaagtcccgccggacgataaaataaagtaaaaaaggtaaaaggtggcgatgcgccaaattgtattgatcgtgagatagattacatagaccctaggtgtacatatttatacccaagggttgatacaagtccttgtcggataagaaagaaactaacctaaagataaaaagaaaatataaagtccttatcggacactaaacacactttcctaaagataaaaggaaactaacaaactattcctaattaatagataaactgccatgccgcatcctctttaaactcggtcacttagggataagttccctttagtagattgatttccttaaccgaatatagcaggaatccgactattggcgacttgataactcccatcggctgattccgagatgctgcagccgataatgattctaagccgattaccaaatttcactgttaacaggaccaaacaagaggcatgtgcgagtgtgcggtctgtgtatatggtggtgcgtgatttgtgatccgtaagcacttgcaccatgatggcttggctccgatgcgcatcaatgagaccagccacattgtgaactaaatttaaaactacactaggttttttattggaatactgacaagatgtccgtgttttgcaataggatcataacatatttggaattgaaggtggtggtggtgggagcgacacaatccacgatgtgggccattgccgtattctttcatgtcaactcgttaaaattggccacaccatgtgagcgagggtgacgaacataatatctatatatttttttaagtaagatgacaaaaggtgaattatgcgtttaggatgtttaccctcataaagaagttgttggtgacatgcataccatgcgcgccggttagaggagagatggtggtctaccatgatttggtgcacaaagggagtccacggaaattcgaaagctagattagatcatgatacaagggacagctaggatcaacctatagttcggatggctcggatctaagacgggtataccaatcgagatccacatgtcaatcgacgggcaactgatgcattagacccacctatcaactcgggtgatcaaacactactccatatggttgctggagatagtgcacatcaatagacagaggggactagcagaaggaggagaatgaaacgattttgactagcatacacgcaaaggtaaataacaatggaagacaatcgaccacgagtttttgcactgcaactcatttggtcttaaaaaagggggttcaccagcaggcttcaatgggagagagttgtgcccaaggatcttgtaacttctgcgatcattgaagtggatcgatggtgcttcgaagggcaacaatgatgactagagttgatgatgcatgatggagagatacgaaactttgtgctacagctagggcaatcgacaactctagaggggcttgagggtgaggatatgggagccctattatgagggaggggatgttgacacagagactacagtgtggcagcaatattttccttgatgacgtagctaagtcaagcctattaacatgacggcgtcgaggatgacatggactcctaccgagaaagagacataacttacaattgggctacacctattactgacagcaaaaagctggtggcattgggctgactcgggcaattgcacgcatggagaataacacatgccaacgtggttgaatgtgcagaggttttattcgcgtgtcacgcttgatagacaatgggaatattttttttctagatgtatatagataagtgatctgtgcgttgcaatatataccgattataccatatactaattatgacacactgatatatataacacgggtatcggatttggatttgcttggtaacccagctgaactctctgaaccggttttcttgtgtctcgtcgcatcgccttatgtctgataacgattttaaatattttcatatatttttctcaaataatttcaagaccggtaatttttcttagtaaaagatattttcaaatttaatttgatactgtggaggtcgcaatttgcaaatgcgctaaaaatgagcccgtcacatgatctaccccaccaaaacaaaaggagagtaaagtttgactccacagtccaccacccgtgaagctctggagtcgagcgtgaacttggtccactacgccatggcggccgcaccacagcaatccgtgcacccaagcttgccctcctcaacctcaaccctccgcctcctcatctcctcctccccacgacggcctcctccgccgccgccaagagcccgccggtataacaggctcgcggcgtcggcttcggcggcgcgggagatgccgtggccgcacgtgctgacggtggccggctccgactccggcggcggcgccggcatccaggccgacatcaaggcctgcgccgcgctgggagcctactgctcctccgtcgtcaccgccgtcactgcccagaacaccgccggcgtccaggtaggtcgcctggtttcttcttcttgattttctcccccgtgtgctcctgcctgggttctctggattaaggagggagaaatgattgggggttggtgcaggggattcatgtggtgccagaggagttcatccgggagcagctcaactcggttctttcggacatgtcggtggatgtggtgagcccctttttgccttctttttttttttcttcctatctgcctttccaagttccacgaatctttacagttattatatcttagctggttttggttcttgctacatagcttagtgcacaaaatgctctgtgatttccatatgtgtgtgatgggttgatattgtgatatcggtgacgccccctgttccagacaccatttttgtgcagaattaccagcccctgttgaaatctggtgtgccacacaaaaatcgaatctaaaaactaaa

SEQ ID NO: 10759 - DNA, 2757 bp, Oryza sativa
agaatttttgaggttttattttctacgtatagtgcgttatttgagactagtaatatgtccgtactaacgttacggcaaaatttggtaatacacgtgcaaagcatatggtaaaaatataagttaaactgagagcataaagctttactggtaatgcagccggaaaagtttacctggcacatgaaattcatgttaccaagtaataaataaataagcatgtatttaaaccacgttgtataaaaatacaagtgcgtttaaggatacaataatacacaaataatacacagctccaccattgtacatggtataaaataaatgcaaaaaaaaaataacccctcaaagatgaaggagcagaaaatggacacaaaagtcactctgatcatccaatgctactggccatacaaaatttatgcgtaaaatttgtcatttaaattaacctaattattattctgagaatgataatacgcatgctacaatctgattcaagtgcccgtaaaaaaagatctcagcaaatttggtagcagaattcagtaaattgataatggtcgcttacttatgtttgtgcttcaactgtccaagtggaaataaaacagagaaattaacttactaatttgtcaaaatgcccaactgaaaacaacacaattgaattgccagctatatcgaaaagccaaaaatcaggattattcatgttgtagctcagcaaccaaaagtatgagatacgggatttcaaacattactactaatatttaccacattagctagaaaggcgataagctataatattaggaatgattataggaatattgaacatctgaatagaaaatgtaggattatacgatattactaatctgccatatctggctttcgttcagacctagaatacacctgaataaaaatacacatgattaaagttgttgctccaaccctcaggccctcatgaggctcatcctgcggcaaacacacttaaattgtttgtctagaaggttgttattgatagcaaaatatagagcaagcaaagaccagtaggtatttcctatagggttgttttcactctccatgaatccttcatgtcaagataatataataaacaagctaagaaacatcaatcctaataccggattaacataagtaaatttcttttgtagctgcagctctttctcctagaggcattaatatgttgcggcaactatagcaaatcaatatgaaaaagaaagaaaaatattatccattaccaatccttgaactcatgacctcttgagttaactattttttatcttcaatgcactaacaatctcaacctcatataattacatgtaaatatgtgatttgtattatttatatctagttacttgacatatattaatatttggaaaaacgtctttacatcgttttaaatgccttaagaaaatgcctttacatatgaaacaaattttaaagtgccgaaaagatgtctctacaagataaatttaacaaagtatactaaaaatgtctctaaagtgtctctagagtaaaaatattttaggcgattttgaaagtgcctctaaaaagtgtctctagactatagagcttcaaaacttagaggcattttgaaaattgtctctacaaatgagcctctacataaggtttttgttatagtgaaagcaaaggtgatactgatcaattatgtgatttgcaatgtatgtctatggagtgatatgtgggaaaagtgttttcatccctcgaggggatatctcctaattttgtgcatgtcacctaaatagttataaacaaatttgaaaaaaaaaatcacaagaaatgtgcaccaatactcaaatgtatagctcaatgctcagagcagcagggtttttcacgagcaccttatatgcataaaactacacacaacctatatggatgcttggcgctgttcacagcagcaagtccacgaggccaaggtctaagtggtcgatacagcatcatttagctttttgacatgcacagctaagagctacgaccatcaatccgtagcttcagggaacaaatatataagaggtagactcagtgtagaaagcagaaaattgagaaccataggataaccatgaagagaacctgtcagtcttggctgttctatactttgctatataagagtagcacaaaatctaccatcgcaaaagatatggagaacataaagatatcaattcttctctaagatcaatgtgtaaactaaatttgtaaacactttatcacatgatatctcaaagaaacatgtatgctgcccccataatttcatttgaaaatacaagctgatgcttagattatcatcgatagtacgattgtaacatatatactctatagttattatactccgtcttgagctgcacctccttcctcggtgcccgcagatttactggtcccaggaatatcttagaaaagcaccttccaagcccaaaaagcacagaaacaatattagaatatcacaaatccctcaaaaaaacaggttagacagaaagcaagaacaagttcaaaccttctctgttgtaaaaaagaagaaataccatgtgcattgctcaggagtagagacgcaatgtctccgtcgcttatgaggcacgttgctcgatccaagtcctactcaatctcatcaagtccatccactgtcacaattagcacattgccacgatcattcaacagcaaacacattttagcgacacagtgattcagaaagacgaggtggtgtcccgagctgtgctgacgattgaatgaagagtaagggccaccacttcggtg

SEQ ID NO: 10760 - DNA, 1029 bp, Oryza sativa
tttcctattttttatagaatttcccttctattttctacacaaagattcggacaccttcatccgaaacagacactaatcaggacaaactcatggtgatattcaaaagtagcaagttgcaattgttgatgcttcagctgaacataagcatccatattacaaatccaaatactactacctggtagtacctcaactgtactcaaattacttaatggtaatctacaatcgtctctggccactatcggatctgaagcattgttcgccacaccggcgttttgggtcttcttgagccggctccgtcactacctccatctggtgttgccagctccaagccactaggagacataaccatggaggaggagctggagagcggccaggagggaatgaatcgacgcagtggcattttggatgggaaggacaggaggtgtggccgccgccggaataggggatcgatggaggatactgtgcagcagtacagatggagagggggccagcggtggcgatagggtctgatgtgaccatggctactacggatacatccgttgctcacatcatggatgaacaacaagatatcaagttcaagtcctccaagtgctggaatctgattcggccacctactacactgctgacttcaaacggccgccgaatctccatatgacctccgttttcggcccgtgagtacttgatggaaagctctcggagtcctctttccaatgcatcaagcctcattgccaaatttcatctcagtcggcagcaactgaagaaacaaggtgctgcgacacctgtaatgggcctatgggcttgtaacttcgtctgggaccccggcctaagtggggcccatgtggggtgcgccccaatcaggtggaggacgacctagggtcctcctatctctataaatagcttggtaccccttcagggtatcgcgggttttgatagattaaaatttagccattgctacttgcttgtagcgtgcgtgtcggctagaccgtctgtctgcttgttctttggaaccccaacttatcatttgtatta

SEQ ID NO: 10761 - DNA, 2298 bp, Oryza sativa
ccatttgcagacatgtacttgtgaaaggtggggatatgctagaatcctcagatgcaactgatgtattttttgatggtacaaattccataattcaatacaatactgtccattatcacatctacatcctgcccttttagcggcctcatataaattctgaactgttttcatcaggtaaggagttcattgagctccatgcgcatcgcataaagacccataacacacatggaactggttgcactttagcttcatgtatagcttccgaattagcgaaaggtgcaacgatgctgcatgctgttcaggttagtcttccagtccttttccctgactttaccttcatatagtgaagaaactgtgtcaaatggtatgtcatgtctgaccgtgtgatcttatcaagcaaattatttagttccacctcccttttgtggcatcactaggaatgtctttgccacaatggtaacatgaaattggttgaaacagttctgataattttattattgtaccttaatactattttgttacaaagctgcaaactaagaaagggtttagcgactctttagtagtaaggtttcgatcatttaagggaaatctgtgttatttaaaagtagcacttgactggtagtaactagaattgtatccactgagatgttggagtgcacatttactgtatgcaacatcttggttacaaaccagccagtgatatattgaaaatgtgtgttttggcttattttctgtcagaactcgttctcttgcaagaacagtggtttgtgcgaaaaaatgtgtatacctgcaaatcccatcatattatcagaacaaagcctgcataagtcatcctgagactttgagtcttaccaaataccaatctaagtttgctaatcagttccggtggacatcggtttcctgaaaatttgtgttatatgtatcttttcatatcctctattcacaacagtaggctcactttgttgtttattgcacatgtgaactatccaggtggctaagaattttgtagaatctgctcttcatcacagtaaagatcttgtcgttggaaatggacctcaaggcccttttgatcaccttttcaagctcaagtgtccgccatacaatgttggctcacagccaagctttaagccagaccaactcttcctgtatgcagtgacagactctgggatgaacaaaaagtggggtcgttcaatcaaagaagctgtgcaagctgccattgaaggtggcgctaccattgtacaactgaggtctgcctattgaaacacaatcatgatcttgcatgtaatgcaatccctccattttatttttctgatgcattttgggtgtttttgatttccagagaaaaagattccgaaacaagagagtttttggaagcagccaaagcatgcatggagatttgcaagtccagtggagtaccactgctgatcaacgaccgggtagacattgccctggcatgcaatgcagatggtgtccatgttggtcaattggacatgtcggcacacgaagtgcgggagctcctagggccgggtaaaatcatcggcgtctcgtgcaagacccctgctcaagcccagcaggcctggaatgatggagcagactacattggctgtggcggtgttttccctacctccacgaaggcgaacaatcctacattggggtttgatggcttgaagacagtttgcctggcatctaagctgcctgtggtcgctattggcggcatcaacgcttcaaatgcaggttcagtgatggagcttggtctcccaaacctcaaaggcgtcgcagtagtctccgctctgtttgaccgtccgagtgtcgtagccgaaacaagaaacatgaaatccatcttgaccaacacctctagaacctagagctactacaatattctttgttcgaaggggatatgtttatcaaaatgaagagatgtttccaactttaataatcagaaggcatttcttgtaataatgcttgatcaaaagcatctgtgatgcaggggaatgaggaatcacaatcttgcatcattgggatgtaaggtacaatgttcagatttcttttacatcttttgagcaaattatccaacaaattttgttgaaagttggtagtacaaaatgaaagggtgaaaggctgtaactttcaacttctttaagctttcaaaatgaatgttgatgctatcatttagctattcgctagttgttttttttttgtcaatcagtgaacattttacaacatatgaaattgccactttactttgcctttactgtacctttgacagtttattttgttttacgtctctctacgtatcatgcg

SEQ ID NO: 10762 - DNA, 611 bp, Oryza sativa
ttgacacagtttcttcactatatgaaggtaaagtcagggaaaaggactggaagactaacctgaacagcatgcagcatcgttgcacctttcgctaattcggaagctatacatgaagctaaagtgcaaccagttccatgtgtgttatgggtctttatgcgatgcgcatggagctcaatgaactccttacctgatgaaaacagttcagaatttatatgaggccgctaaaagggcaggatgtagatgtgataatggacagtattgtattgaattatggaatttgtaccatcaaaaaatacatcagttgcatctgaggattctagcatatccccacctttcacaagtacatgtctgcaaatggtaaattatttgcatcagaaaataatacattagtctagacacaatttaatgggaatctaaatatcgcattcttgcatatgccattaatactgcaaatagcaacgcctaggcacatagttttggcacttatcgaataaaggcctaagaatataaaatgcagcattcactctcatgcaaaacagtaagactgaggcccaaaggtaggtacaaattaattctccttattctggaaataagacatttatatatccata

SEQ ID NO: 10763 - DNA, 518 bp, Oryza sativa
ggccctcatgcttctcaactcgtcctccaaggaagccacctccttccggacgcctctcagcttgccgtactcttcccccatcagcgcggcgagcttggataggagggagttgatcgcaccactggaggcgctcgccatggttacggccaaagatatctttgttgcttagtcagtacgcactcacttggagttggaagaagccgtggatgcagcgccgcgcaggagccgagccgcgcgtcgcctgacggagcaaccggaggtggcctccacggcgactcgccggtgctcaccgggctggtcgattgcaggatgtgaaatccggcgagtggcagtccggcacggaagagacgtgaaatggggaatttcaggtagagcaggtcaaaaaatcagaggggaatttaactgatacgccgttgacttcttaatatgttgaccattcttcttatctattattccctcagtttcgttttatttgacaccgttaattttttagcatatgtttgaccgttcgtcttatt

SEQ ID NO: 10764 - DNA, 16427 bp, Oryza sativa
actatagggcgaattcgagctcggtacccatttgaccacctcgttttcaatgattgcacagtgtcaattttcttgtggactcactgctttagtccattaagaagatgacacgtgtcctcagcatttgaaaaaaagtgtggtctctgtgcagggagaccagacggaggagtgccctctccctccctcccctcccttgccaagaacggcaaataaagtcatgtctcccagagtctccctttctaaaagcagcaaacatagtcacgagcggaggagacgcagaaggggagcaaacagctcgcccccaacaagttcatccccagtccagagagagagaggcagccaccaccaagttctttccaggccaccctcctcctcttccccccaccgcacgcctcactcaacaccggcgaactcgggagcgcgcggcccgagtgtgtcggcggcatgaaacgcaaggcaacaactgcagcctcagccgaccccgcacaggtgaaagacctagttcttcattgctcctcatataaagccggccccctcggcgtccgcctcggctgccgcgacgccattgttggctggttgcgctcatgcgcgcgatctctgtgcttcgcgagcgcttaacggcgagaggaagttccctctagggacctggggcatggccgtgcaggttcaccatggcccatgccgactacatgcataggaatcggctgctagctaggtggcagtcacggtggcagcctggacggggacgccagggccacgcggggtggtggcggccggcgatggggctcgagccgcgaggcattagccggcgatgagcaaaagagccacctttttattattgttattattattattattctcagatttgtgaattgtgaacatggtagccataaagggtttgacttctcgatctcccaccccgataggtaaagatttcggatgaaagttttcattttttttaatttagaaaaaaaatcttcaaatttggccaaaaaatgttcaggtttttttttctagaattaatagaatcatgttgtcatccctatatatgctcacaaatgccaccaattttctcactgggaatattattgatcatgtctcataattaatcttgtaattagccgatttatctggtcttttctcaggggggcagcgaagctgaaaaaagacaaaagatggagaatgagatcaagaccttacaggtcgttaagttcagtggtgtttactacactctgcctcttcatctcgtcgcacccgctgtccagcacgtgttgggaagaaagaccaccatattaaggatgaggggagctactctagatgagaacaacatgttacatctagagatagaatttttgtcccgtcatgctgccatgaaggctatggaacactgcaacgacatagacccgcgccacaaacgctatattcaagtaaaatggaatgatacaaatttggatgtgtctgctaacaatgaggaaccggtacttcaagaactatcatacctagagcctcagccggattccacagaagaggtaacttctcttttacatgattctaactagaaccggcttgaatatttaagttgatttgaacttgatagtgtttatgttggttaaaccgccctctgactatatataaatttagtgttttttctagagcatggaataaaactacaattaaaattggttctttcttttacagaaaaaggtaacgtcaactatttttcaaggatttaaccgatacctcccgtggcagtgagtgtactgattgttgcagatgaccctttcatgcccccgtacaagaattgttgcagatggccggcttgtcttttgatattagctatgtagtttccttttagaaatttagtggttagcgagaagaaacagatagtaacattttttggtgtaaattttggtactttctatcaagaggtaccaaattttacataaaaaaaagtaacacctcctggtagctcttaggaccattataaaagcactcttcctcttcaattagtctgcaaacaatctaaggtagtgatattttttggcttaccagtgtgccactttcgacaaacacactgtgacaatgttatttatgatcacaggcctatggttggctttggttgtttatacagatgatttgtaccagattgatgaggtacacagaaattcccagatcagatttgatgtttttgttgttctttctccccaatgaagccagaaggccacttttgcttcttggatttgttcatcagtttttgtagtactggccatttctttgttcacgttggtggggacatctttcatcctaagacaaactaatgtgtagaaaagctgtgagagaggcagcatatatgtctagatatgccctctcctccatgggattgagacacaaaacagttgtagatcacagagaaaacatgaatgcagaccctagaacaattggctaatttgtaaaaaaaaataaaaatagctccacgaaaaccaatcaattgggcttgtttggatccggagggctaataaattagccctccaaatcttactatttaggagtattaaacatagattatcggcaaaacccattccataacccccagttaatttgcgagacgaatctaacgagatatattaatccacgattagctgatgattactgcagcaaatcatggattaattaggtttattagattcgtttcgcaaattagctcagatgttatggaatgagttttgtcagtaatgtatatttaatactactaagtaggtacatgatggcccggacgtcatgggtggtgactggtgagcagctccgatccccgcagcttgtccatgataggagagagcaaatgagacgggtactgcgctgtcatggtctgcaccagtttatccggcgcggggtggtctgcttggacggcggcgatcctgagtgcgatcttcatcctgccatcgtcgggaagcaaggatggtcggggaagacagcggcggcggtcatggtggacgagctcgatggcgaggagaaggtcgtaggaggcgaggtagaggtaatgcctggcctggctgtccgtgaggtagcggaattacaccttcatgaacgcgaggaggccacagaaggagttcaatgagatgtacccccagccacggctgtacgtcctgcgtgtcctcttcttgggcggcggcggcaggtcctccgctccgccggcggcgaggtgggcgacggcgttgaggatgatgttggtgacggggtcggcgaggccaaagcagtatccgaccgcgccgacgcagtcgacgatctccgggatctcctcgaggggtagccgtcgcgccgcctcggcgacgtactcccttatggactcggatgatttgtcggccggtggcagccatggcttctcctcctcctcctcctcctcgccgtggtaacacgtccatctgcccaatccgggttcatcggaagacgacgacgctgctcgatttagggtttttcgccgcttcatcctgctacgccggagcgtagtcggacagttgtgggggaggaattagttcacattgactcccttaactactgatgcgaatcagattcggtcactagttaagggggtccatgtgaacttacttctggatcagcccagcccaaccaaacgatcagcccggcccaaacaaacgagaggaggcttttgccgtgtcgtgtccttttttctctcgggtgtaggacagcacgctgtgcactcggttcacgcacgccaaaatattgccgcacccaaagccgcctccgctcctccgcgtgcgccgccgccgactcgatcgaattcgatcgcttccgcctcctccaccacctcgacgcccgtctccgtcggcggcggcggcgagctcccaaatcctaggctagctcaggccccccaacatcaccacagaaaccacgggggtctcccttccctcaactccaccgcctctcatcggccgcgggagaaatcggtcgaatcccctccgcccgcgctgccgccgggaggtatgggacgcgagccccctcctttgctgctctcccttatcgcgccggcgccccgattgtgattgctggttgttggagttgcctatcattcgatctggggggggggggggggggagtagattggtcgctagaattggtggggtggacatgattgcccgatgagtggattgcgccgccggctagcttctaactagtttgattggtagcttctaactagtttgcacactactttcatggcatgggctcggaaaacaagcaaggaagaagaaattctgaaaaatcagttgctggcacctgtaattctatactaccgaacaagtaaacctacatattataaatgtaaattggccggcatacaagtaaacctacatatgtaaatgtaaattggccagcatacatagttctatactgaacaagttaaattacatgaaaaaaaagaaagccaagtctagttgcatgatcagttgcatatcgatgttcggagggaaaaatggatccaatggatacggcatcagataatacaacaattccttgccataggaattcctagtatagtttcacggaactgacaatgtggtttggctcccattttttacctgataagcgtttggcaatttgatgatcaacaacctgatagctgctcatcaagtatataaaaccccatttgatctgtctcctaccagtattgtatagaaacagatgtgaatcatccttgatatggtttgattctgcagttcactgcaaatcttccatagataagaacacatagagaatttggaacttccaaatcaacctcaatcaagattaggacaggaagctttggagtaactttaacaagggtcaactttactgcaatgaattggaattttaatcatcttgcccatttttctctgtaacataatttttttttctctgaaagcacaagaattatattgctcagtcattcttttaattaatccttaatacactgccctaatttttgtgtgacttatctgagtgtctctgtaacacaagtgatatttctctgttagcacaagatggtattttctcattcaatctttagttattcctttaataaactgtcctaattttagtgtgccttatctgagtgtctggattgtattgtactcatcaagtgcagctgaagtcactctactatttggaagtgaagctgcttattcgtaattacactgatgtaagatgccttttcttcccctctgttattaggtcttagctttaaaggtctagctggagtatcctgaatggatttgaatgcttcaccatcgcctgaggaagatgaccagtcttatgaagagcatgctgatttttcacagagtgaacatgctgagtctgctgttgagataatgcgaagggtaaataaaatactttcttgttttaaaccatgcaactgttttgcagcattagaagagcattccccttgagatgagaccatggagtttttggactttgtattatgggttgtggtgaaggcgatatcataagaagtatattagaatataatactctgcaatagacagacctggcaaaccacgttttaacttaacatttttcttctagttactcaatctacatctctattatctggaccaactggtcatttggtgcgatcttcttttgtttcatatagccagcggcatttggttttcatatgttctgtttattttattactaattaagtagttgatgctttttaaaaacagcaatggtgcaaagcgagcttaattattattttaaccaatttcttttgagttatgatccatcattgctacctgtttatatctttcattaatcactaccatgtttcataggaacgcgaagagagacggagaaagttaaagagggagcaacatgatgatggaccaaggctgaatcgacaaccgattaggaatgatcatatgaatcaaaataaaatcattagacatggacgaattaaagagccacctcagggtatgtatcgtgtgctacggatttctttatcatgttgaattcccccatgtaattcttaattgatcaacctatgctaagtagactttaagttatgtattattacatttaaattatcattttttaattattatcaggctggttggattgccctggatctggtgagccaatagataggattgtaccttctaaagttcccctggatgaaacattcaatgagtctgtgcctgctgggaaaagatattcttccaagcaagttgttaataaacaaagaaaagctggaagagatgtaagtactgcatgctacctaatatggccgtgataataatgcacatgatattcgttttgtcctgccttctgtttttttccttacgcatggtcacagatttgaagcaatttttgttagaaaaaacattcgtatttctcagttcaattcttacgaattgttatttgtacagtgatgcagaggcttctaatagtcacaagagggacataaatctagttaaattttagaatattattattatttattgaataatatgatttacagtgcaaatatcatgaattaacaagcagaagttgcttgtaatagatatctgaaataacatttattctgctaagtgctaatgcacttctctcattctttaatatcttgttcctatttattgttgaagggagcatcacaaactccaggacactttattcaatttaaattattttaaagagattgcagctaattacctgtgttgacatatttttttcctccacttattttatcagataggtttagtgattgacttgacaaataccactcggtactattcaccaactgaatggacaagacaaggtactaaatatgtcaaggtgagaaagtgagatgcactccggtagtttaggattaatctaagataaagtccttttcactcttaaagtgtattttcatttagattgcctgcaagggaagagatgctgttccagacaatgaatctgttaacacatttgtgtatgaggtaattcaaattatttggattcatgattttgacataatcttttttgtcagctatgttgtttttcccactttcttttagatatgaatattcagtgtcccttcattgttttacaattgaagcaatttgcttttgtttgagattgaaaaaaaactttatgatgaaaatgtatttgctcctaatgtaacttcatttgacaatgcaactggagttagtttttgattttaggtaactttacaggttatccatttgctttgcttgaagtttgacttatagttgttgatatatttcatcttgttagctgtttgttattaattctaacctcgaatgtgttgggtatttattttccaacatggaagaattactccctaaggtttatggtaattactaatattctttccaaatcaatgacactacatgagagatgctttgctgttataccttttatatcatcaaactacaaagaattaactttcaacattcaaatgcatgtctgctgtagttatcagttctcttaggagttcattaggatcagtgataattctcaacctgtccccatgaaaagtatcaactgtttaaaatgctgcatttatctagtgttcttctggtttatgtgcgtaataatcacctattggcttacacaaagtttcgaaaactagcattgaccgtgtgttccgtatatttaatcaggactggttaaacacagtggactttagaaattacatgtctagatttgagtttgagcttcaaaactatgaactagttggcattgattaaagctatgcgttgtctatgttatgccttctaaatagaaggcctgcatatgtttccttctaacctgaaaatgttgcatatatgtcactagaagtgaattggcacacatacgactgtgaacagagttattacataggtagcttatggcctcgtgtgtcttatttaccaatagaagtaccctgcttatcaaccgttccagattaactccattcttgcctctgctggctgtcaatactatgggttgctggatgataaatttgttctagattgacataggttagttagcctctgaattctggagtaaatattttttttgcaattcagctatcttcaagttattgtggtagttatttttgttgattccaattattttgttgttatgtttgcctgtttggtgcaaatgttgtaaatgtatatgaaatgcaatgagtaggtagtcttgccctatgtttcacctttcactggaaaagctctttattttagggcgtgacaattgtatgtaataagtctgttgatcaaacttgacattgtaacttttaggtgatggcgtttcttgaccgtcaaaaacaatcaaggaatcccaagtatattcttgttcactgtacccatgggcataatcgtacaggttttatgattgttcattacctaatgcgcacacaactctctagcgttactgaggtaagaaaaaaacatgtttcaatttgtatttgttgaaaataatttgacattttcctgagctaatgtttttatttgctaggcactgaacatatttgctcaacggcgacctcctggaatatataaaaatgactatattcaagctatctattcattttaccatgaaattcctgaaaatatcgtatgccctccaacaccagaatggaagaggccctctgatcttgatttgaatggtgaagctaagcaagatgatgatgatgatggcaatgtagatcgtgcaccatcacctgtaggttttcatatagtactatttatgactccctttgttgattttacctggatgtataagtatctgattcctattcaataccgcaatatgatttgacaacactaacaattaatttgaaaaataagtgactatagggaggtatatctagtgtaaactagaatatttttgtaccatgtaatgttagtaaaactgtccttaaagattgcccaaaattctcaacgcaatggatgatatagaggaacagatatttgatgcccctactttttttatgatcaaatttaaattttttgggagaaataaaaattatgtttttccatatacatgcgagtttggccataaaagttttgcagtgtcatttaacacatttcttttgcagacccacatccaccaaagtttgaatatttcatgggaaccgtatgcacagaattaacttgaattgcactggatttagtcttacagctgcacctaacatttaactctgcatatgctgctccaatacagaccaatagtaaaaatgccactgtgatgcattagtgaattacctacccttagctctttcattatagctcttgtgcataaaaatgcacaagaaagatcatgttactctgtttgccactgttgtttctctcactaaccacttaaagaatatggtcacctcataataagagtaaatacagggcaatattggaatttactgcacattaggacttggtatttgctaagagcaatcttaggcaagaaacacaattggatgattgtaaatagggaaaagaagatgaggacatcttggaggtgttacataactatcacttcttcatccctatcatagttgggtgagacaggaaccataatcatgattggtaatttccattgtacatgccaaatcataacccaattcatgtgccatgaaattggtttaaataaatcaaaagttacagggtgttagtttgaaagtggcttataggattctctcttgtctgagatgattgccaaattggaaagtatgatccacttcagttcagacaggttgtacaacctaggtaggccttttttaaggaactgttgtgcttttgtttgaggaccaaaagccctgatgatattcatccaacctcatcctctatttgagcacgtgcctattagaaaagggtataaagtataaacctaattcattgtttataaaatgatgaatctaattcataacgaggctaagcatctcctagacgatagccagatggctttggcttgctagtagggaaggaactagtgagtgagaggggtcaaaaggggacttatgcagttcattgttagctttcaatggatgatctgaatgtatttcctataatctcatcatactaaaggatattttgttcataaataacatgtgcctaacaatgtgtctaataatttagagcgttacagggtgttttatcattctctgttcaaaattgtagatcataaaaaaaaaatcctgaaaagattatatacatatttttatgttctttaatttcactcaaaggatcccttcttattgcagaatcacgaagatgataaagtcattactaatgatgatatcttaggggatgctgtaccttatgaccagcaagatttcctgcgcagtatatgttttaggttacttgaattagtgcccagtgtaagtttacaacgcgttgttggttactttgctatattgttgttgagtcacattgttttccccttcttgattacaaacatcttaatttgcagtactgtctgaaagatatattttgaaagctttgtttctatgttcactgtagtatgaacttgtagcttgctttcttgattatataatactgctgtttcatttttttcttactagtttagaaagttgtttttatcttgcttcaaatgatttcaggaatccttttgttttatcacaactactacttagattaactgtggcacaattttgatgcaaacttatttcaaataattgtaagctgatgcaactgcatgcaacatgatatgatgttactaaatgcaaattcagagtataatttttgaaccttctattttcttgaaaatagcaatagacatatgaattgattagtatcacaatctcagctaaccctttcactcaccagggtagagctaatgctcagtttcccggatctcatccagtttctcttaacaggtatggatttatgtccaattttgattcttttggcaaagtgacaaataaattagtgactgcaacagctgatttaataattaatacttgacggtttatatcaaaggtcatgccaagtaccttatttcaggcatgtgaaaaacataaaatatagatgtatatcacatgcaactatgcaatccttatgtaaccgtagttgagcaactatgcacatggtttactttttaaggcattaatgttctagcaagcaaagcatctgaaggatgaaaataaaccacataagtttgagggtaaagtaatacatactgaagactaagaaatcaacttcaactctttgcaggagtttgagcactaaccttgtatatgtggctggaatttgcttagatttccaaccttccatcaaagatgtacacagtactcaacttcgatacctacccatcccataatgctgtcataattcacttcctcactttattttgcgccacccttgttttatactggcctcctttgtcttaaatatcccactctgcaccaaattcctttgacagttaggcaccccttcagtccctttgctacacggtgctttctgtgtggcatttgggtcattcggagggattctacttttgcctttttttgtgcctggcgcatataattcattctgtaacagttgatgctacattttctggtgagatcatgagagggcatacataatgttttgtctttcttattctagaatctatgggacttaagaacatcattcacacattagtaatttccccctagtccatactttgtattgcaattgtctcctttccctcacctcacccccctatcttgtagtttcttttgttggccttctggtcctttcctcctaactcatttcatttatattttgtatatacagcgagaatctgcaaattctgagacagcgatattattatgctacgtggaaagctgatggaacgcgatacatgatgcttataacacgtgatggttgctttctaattgatcggaacttctgctttagaagagttcagatgcgttttccccttagaaattcgaatgaagtaagattcccattgtgatgcatagtgcattttattctctttttcaccatcaaattgtaaacttcaaacttccttttgctgtctgaagggttttcaccactatacgttaattgacggagaaatgattgttgacactgtaccggatttgggattgaagaggagatacttggcatatgatctaatgtcaattaattcccaatctgtagtcaaggtagatatgcttcatatgttatcattaattggtgatgcaattttgtggtcttctcagttgacactattaatctaagatgttgatttttttatgtacaatatttcgtataaatatttcccaagcactcccattcgaatagtgattacaaagcagtatggatattgttagaggttgctctgaagatttatatgctacttattaataagtcaaaattctcatgtctggtttagatgcttgctgattgaatcgatttttataatgatcccaatatacatcttactctctaaaagagtgagtgattttataatgttctacacccacccactccatacctctctggttttaaatatgtaggaatgtgtgcgttatttgtaagattttaatagaaatatattgtatcttttcatacaagtataggttggtggtcaattagtctatattatcatgtatgtgtgttttaaacttaaattagtatttatttactgcattttgtattttttacttatagtatacagtatatttatttgggatctgttgcatgcacgggtatggtgccactaattttaagttagaatgacattgctgaagaattgattagcttaaggccacataatttcattacttgccatgtttgttattttgtgctccatatgtacatacttattatagtttgatttctggatgcagttgcctttttctgagaggtggaaattacttgatgatgagataatacgcccacgctatcatgataaaggacgcagtccatcatacaaatatgacatggaactattttcggtaccgacatggaatatggaagtttggacttatttgttttttcatactatgttggtgcactaaaattgaaatatatctggcttttattaggtaaggagaaaggatttctggcaactttctgcagtgaacaagatactgaaggagtttattccaaagctttgtcatgaatctgatgggcttatattacaggtaggattcttgtgtcttgtttgtacctttcaaaactagaaaagctattacaaagaagttatcccttcaacttttttcctgattctgatgggtttatatcataggtatggttgtcatatgtcttgtttgccactttgcactctaactgtgatgattttgcattcttctagtttctcttatgcaacattggaactactgccatgttgccttgtacaatcaactagatatttagtgatgtttatgccctctgttcttaaatctagtgtgttgatcctgccacaaatgcgtgttttggaaactgacagtccacaaaacataacttataccatgtttatctatttttatatatttgtaaatccttattcaattttatggtaaaatacttttgattggagagtttaatggcatgtatttctgactgtagggagtaataagcattgtttagctcaactatgactgttaggcccatggtcatatcctccagatgctcttgccgtgtattcggagtagatgtactaatttctgttttcacatgggtggattcttactgttgaactggttctggaagtggtttgctctatgttataagtctcatatctaataattacaatgaatcaagcttaactagggacaagaatcctttgtcagccaaatacttgctgtcctcaagtatttgttgtgaagctaggaatgtttgtgctaggaatttcaggattatgcttcactctagtgcatgtctcatttatgctgagacttctcttttgatcaatttgtatcttgtggcaaaatcccatcaagttgattctgtgataatttcatctcttcagaacgccttgttaaccgccagaatagctgcttccatgcagctgattttcatccctccatgcatgtcaccgtcatatcccaacttacacaaaatgggaacttctctgtttttcttttcttcatgtgtttctgttgttttttatgtagggctgggatgatccttacgtgactcgtacccatgaaggtcttttgaagtggaaatatccagagatgaattcagtagactttctgttcgaggtctgctttcttccatgcaaagttttcagatggatttacttagttatttattgaagttttctttccattgttcaatcgttgtagattggcagtgagaatcgtcagttcattttcctctatgagagaggtagaaagaaacttatggacggtgcccgggtggtgttccctggtaagcatccatttaatttaattacttgtacatttgtctttattttctggataatttacaacgcatagatggtgcctggttggtggtccccagcaagcatatatttttcattttcaaatcgtgcatctatttgactttatcaaacaacttgtttttttgggaattataatcatgtcctatgctaatattctcatgagcacacatatattatgttccgaaattttgaatataacccagcaacttttactaagcagaacatacactggattttgtcctttaaatagaacatacactggttcaatgctttgtcgtgcacttgtgttatgttccttgttaaaattttcattgggatttccatgagttatatagtgttcctatggctcttgatacgcctgattgtttcctttttgcaacatgtcatgattcttgaagtaggctaattgttatactgtgttgttttattttttcctaattattgctgatgcactggaatttaacgcagatgaagttgacccgccttcaatatcagggaaaattgttgagtgctcttggaataaagaagaggactgttggtcctgcatgcgcattcgaacagataaatcaactcctaatgatatcaatacttacagaaaggcacgtcttcctctcctctctcacacatgtactatatcaaattgttgaatactaccgtcagttgcactggttacaaggttaacagttttgtttgcttctgtagaactttacatttatgttctattcttctttcatgaaattgttctgtgatcaagaccagatcctgacagtgttcactgttgatgggctgtaactgcttgctttgaatgcaatatacctttatcttttacaactctgcgtgaagtttgcagctagggagtttatatgtgctgcaaatactgattcctccctattaatttgagttcgtgatgataattcagttgtgctgaggcgctccaagatacagttgtgacatttattggttggatttagttttcaaatgctgtggtttgatgaattgacttgggatttaggacttggggcgcatctcatttcacttgcttgctgtcgtgccttgctgttctggttgtgtcatgaatcaagatgtgtagaaatctaagatttctgttgggcatgagaaagcataaagacaatcctaacctaacatttttcctctggtaaatggacaggtaatgaggagcatcactgataacattactgaagacaagctcctggaggaaatatatgagatcatgacctttctatgtatgctgataggaaagcaaaggctcacgcgcgaagtatggctcaacaacgaaggagatgattaggattggttatatgcattcgtcttacttcttagaattatagagagttgtaaccctacaaccaacagatggcaaaggctagctggcccaggctgtagcatgcatagataatgttactatatcttcatagcgagccttatgcaggccgagaatttttttttcaatatgatctttctgttggtcattcacatgtgtcatttcagaatgctgtaaatcttcaattaatcctgtattctgtatatccctctttttttgggctataccttcctttggttcaaaatcgctccaacatacaaccagggtttccccaaccggcagggccggggttaccacgtggtaaccgtgaaaaactgtataaaaccgggtaaaatttatcaaaaattcaaattatttttaaaatttatttgaatttaagaaggataccgcggtatttatattaccggacccttgtggtaagcccgataaccgcggttaccggcggtaaggtaaaccttgcatacaaatgggggttgtacaaataggatgtgtcacttattagtgatggtgggaagatgtcgacaaccacaatgcacacatgtaatgtgcatgtaatgaaaaagtgaagagtaaattttacaaaactatagatattctagttaaattattataaaaccacagatttaaagcgatgtatcacaaaactccatatttaactaaatttatcacaaaactacaaagattt

SEQ ID NO: 10765 - DNA, 1718 bp, Oryza sativa
aatatttgaaatcaaagtcaaatttgaatcgggtatgtaaacttttaacttataaactttgggtctacaaactttaggtgtataaactttatatgtatagaaatactatatataaaaaatatttgaattcaaattcaaatttgaatcggatataattcaaattcaaatttgaatcgggtataaaaacttttgacttattgtcagggttatggataccacatacctaatagtagtcgactacatctcggcaggacccaccacataccatgtcctacacggaaaccgacttcagatatggagggagttccggataaggaaagacaaccagagttctacatggaaacgacaaggactattcggactgtattcatattggtttccctagttctacttggataaggggacacatatgggtataaatacaagaccccctaggaggagtggggacacaagacaatcgacagacgatcgacacgatcaacatgatcgacacgatcaacacgatcaccacgatcgagacccacctcaatcaacaaccaccacaatatacggaacaacagaagccaatacaagccaacatacgccaagacacgccgccggatatcgacttcagggataggcatggctattcccctacggtgtctccggataccgtcaggagagacgaaagcgctatctctgatctcaccggacacggattcgaggagcaagactaccttgttgtcgactacgagtcagaccttcagaccgacatgtcgacaacagttagataggttacccacatattgtactggtgttattatggtgaataaaagcaactccggctccggccaacaggatgtagggttattacctgacaactcagggtcccgaacctgtataaaaatccttgtctccatctcttttacctcagtctcgcatatatcctagtaccgacgatccccatactatgcaaataccataattgcgacatcaaacgtcgacagtggcgcgccaggtaggggtattttggtgctctaggaattcgacgagatgggttcaaaagatggattcttcgacaacaagctactcgacgacttcggctgtggagatctaacccgatcggagcatgccttccgacgagatcggaaccatcatcgtcattgacaacttggtctatcgagatcacccaagcctcaagatacgtggcataccaaaagatgtcagatcatatgatgtcgaacgagtatgcaataaggtaattggtagattggtttttcaaattgatctactaatttcgtagatacatccggcatatatctacacaggtacgcaatatttgatatgcaatttatcatacctattcagatcatacagcattgtcagatctacaatttattatgtttacctagagcatgtcttttatacaatatccgttgtgcgagtactttcgacgataggccaactacggtataacgctggggctcactctgttttcttctatataaatcatgcttgtttacggtttacataatgcctgataattacatctgctcgttatatcctgataatgctagaagatccatgcagttttttgagtacatactcgatattctctgctatatattttgccttctagaaaatatttttcaggaacaattgagcactcgattaggttatggtcgagtacactccattatcgagaacattctcgacaaatgcggagttatcgcacccaa

SEQ ID NO: 10766 - DNA, 564 bp, Oryza sativa
ctaagaattttgtagaatctgctcttcatcacagtaaagatcttgtcgttggaaatggacctcaaggcccttttgatcaccttttcaagctcaagtgtccgccatacaatgttggctcacagccaagctttaagccagaccaactcttcctgtatgcagtgacagactctgggatgaacaaaaagtggggtcgttcaatcaaagaagctgtgcaagctgccattgaaggtggcgctaccattgtacaactgaggtctgcctattgaaacacaatcatgatcttgcatgtaatgcaatccctccattttatttttctgatgcattttgggtgtttttgatttccagagaaaaagattccgaaacaagagagtttttggaagcagccaaagcatgcatggagatttgcaagtccagtggagtaccactgctgatcaacgaccgggtagacattgccctggcatgcaatgcagatggtgtccatgttggtcaattggacatgtcggcacacgaagtgcgggagctcctagggccggtaaatcatcggcgtctcgtgcaagacccctg

SEQ ID NO: 10767 - DNA, 631 bp, Oryza sativa
caatggtcactgacggaaggcttaatcacctttgcgggacgggtctttgtgtcatccttggtcgccactgcttccagtgattttgagcctgcccacgacatcggccatgagggcacccagaagatgttggctcgcctgcgcgccgacttccacattgctcgtgaccacaccaccgtccaggagtttgtgcgtgcctgcatagtttgccaacgcaacaaaacggagcagctacagccggcgggtctgctccagtctcttccggttctgtcggctgtgtgggctgacattgctatggatttcatcgaaggattgccccgagtgcacggcaagacagtcattctcatagttgtggacagattttctaagttcgcccattttattctgttggcacgtccttacacggcaactacggtggtagcatccttctttgctgagatcgtgcgtttgcacaggattccgacgtccattgtgagcgatcgagaccccatcttcaccagcaatttttttggggaactctttcatctctcaggtgttcaactgaatttcacatctgcttttcgtccacaatcagacggacaatcagaagtcaccaacaagattattgccatgtatatcagatgtctttcgggga

SEQ ID NO: 10768 - DNA, 1951 bp, Oryza sativa
tagttatataaagaacatccttagggtcaacacgaaaataactttgaatcttaaggcgtgggactggagttgttgtaacatcagaagctccaatcaatatagcaatcccatcactttttagaacttccatgacaattggacaattatcataagtctcatataacttatcttgaggttcatttcctagtttaaaaccagtccttttgttatatgtctcaaccatctcatttatatcaaatggagcagaaaacacaaatcccttttgtgctccttccagtctacgggtacaatcaattaccgcagtaattgcatatagagtacaatgtgctgaaatgaaaatacagggaaaattttaaaaggtattcgtgttaaagagacaggaaatgtagtaggataagtgtatccaaaagaaaagtaaaaataaatgaaataatgataataaaaattagatgaaacaaataaaaatggtttcagatgataaaaggagcaccaaaaactgtgttgaattctaagttctctaacacaaataagaaataaaatcacatctacaatcaatgtacaatgtgtaatttgtgaaatccagtccaaagtgcaaatgatggtaactatatatggtgttacgggaaaagataagtaaccttggtcaatgaaagtttaccaaaataaaatttactcaaaataaataatagggatcggaatagtatacttacgttcaagtttttgatcataggtcttaaaatccaaagaaataccattgagtgtacattgagttatcttccactcgtaagctgcatcgttctgagagagagagagagaggaaaatggtagtaaagaatggccatgtacaaatatcttatatttaaaacttctttacgaagtaaaaaagcattaaagatgtgaaaaagatgaatggagctagtttagaagagagagaagtaaaaaaacattaaagatgtgaaagagatgaatggagctagtttaaaaaagagagaggaaaatgcaagtaaaaaatggccatgtacaaatatcttgtatttaaaacttcttcacgaagtaaaaaagcattaaagatgtgaaaaagatgaaatggagctagtttaccttcaaaccacagtcaacacacccgaatggaggcaagtctacaagcatattcttgataggctcgtactccttcctacacccggggcaaatccaattcctgacgtaatccatggccttcctcttatcacggtacatggcagcccgctcatctagctcagaaatctccggagcaggcccgatgacccaactacccatctgaatctgatgccagcaaacaagtaaatgaaatggctaagaatgtgcatagcagagaagaagaagggagggtctagagcccttcaggaagagagaagatagcgtacccggcagatcggaggcggtgcgtgccccggcagcgtagataggcgagcggcggcagatggataaacaaggaggagaaaccctacataatgggggggattccatatcctttataaacgaatttccctaaaaagtaggggatgatccgtgaattaacctaaccatcaactaaaaaaaatcctacaaaagcataatggaaaagtaggaaggactccttgctttggatctagttatactcttcgagtatatcgacaattccaaaaaactgctcatactatcattatagtataatgaggagcggttgtatatggccctatcgtctagtggttcaggacatcgggggggggggtggcaagtgctgctatggctatgggcctgcccttttgggccaggccttcgattttcctttttcctgaatggaataagttcaccatagatcccttaggttgatccacgtaccaaaatacttaatataacgcgcctttcaactcctgaaactgttgcaaacttaatcctaagacggtttggatgatggtttcaactgacatgg

SEQ ID NO: 10769 - DNA, 1248 bp, Oryza sativa
gtaaacttttgacttaataaactttgggtctataaactttaggtgtataaactttagatgtatataaatactatatatagaaaatatttgaattcaaattcaaatttgaatcgggtatgtaaacttttgacttataaactttggatctataaactttaggtgtataaactttagatgtatagaaatactatatatagaaaatatttgaatttaaatacaaatttgaatcgggtatataaacttttgacttataaactttaggtctataaactttaggtgtataaactttaaatgtatataaatattatatatagaaaatatttgaattcaaattcaaatttaaatcggatatataaacttttgacttgtatacttttggtctctaaactttaaatgtgtaaacttgagatgcataaatttattaaaataggaaagtaatatggtgctaaaaaagaaaaccaggtggagggaggggaggggggcacccgatccctatcccatgggctgggcgattgatcgcccattagaggtttcgggaggggagagtgtatagggggatggggatcgatcgatcgcctattagcttattagctgtccccccaatacattgcctacgccgtgccaagtgccaaacagggaaaggagacaatatttttatttttcaattattatattaattataataataatccccgcaaaaaaaaatcataaagacttgtctcttcgtatcgaatatcgattcctacccggactctttatttacctttccccaattctcacaaactgaatgccaccaaaatcgaatcgctacaaaccctatccactgccgctggactcgtcgccgtgattcacctcgtgccgccgctcgcgcagcgccgccccgccccgccccgccccgccccggcgtagtaggagatgaagcggcgaaaaatcgccaaatcgacagcaagccgggggagcaggtccggtgtgaaatccccaaatccacggagcagagcagcgaatccgagccggaccggcggcttcttttctgatgaactccgattgggcagatggacttgttaccacggggaggaggaggaggagaagccatggctgccaccggccgacaaatcatccgagtccataagggagtacgtcgccgaggcggcgcgccggctacccctcgaggagatgccggagctcctccactgcgtcggcgcggtcggatactgctttggcctcgccgaccccgtcaccaacatcatc

SEQ ID NO: 10770 - DNA, 1590 bp, Oryza sativa
ccgttttgtattgagctatataaaaggagaacttttacggtacaatatactatagaagggcatgttagaaattttatagaaaataaaacaacactttagtaattttttgttcaaattaaatctaattgggagtacctcgtcctaaatcttatcatacactagggaaggaacattctaagcgccatttgatgacaaaacacgtgacgatagcatgatctgataatagaataatgaagaaaagacaaaattaccctttcaaacattataatgcaatctaattaactaaaaaatcaaatcaatctacactattagatcatatatacttgtagtatattgtaccgtaaaaatacagtataaaagagccagagagatgtccttgaaaaagaaatagaacaacaatcatcttctctctacattctctattgccatcgtgctgcgttgccataagatccaagctgaccgtggtgctcgtcgtgcaacgaccatcttcatgagcagtgtcttcaaaccttcgctgcatatgcacctgcatggaggcggtgtaaaggtttctgacaacgtatataatatgcggccgctcgacgtcttcaacgactcgatcgctgtcctgttatcgctgcgagcacggaggcacaacatcgatcgtcttcatcttccctgactcgttggtgtagatcaagtgactgcactgctttgcctcactgatcttcatcgatctattcagtgactgcataagttaaacccttttgattaatctcagagtccaaagagaccggtgtatttctaatctagatttgtgtgcacggcactgttaatctagattcaaatattgtggcaagattcgggggtggatccaggaaaaaataatagtggggactgaacaaactagggcagtataaattgaaacatgtcttatatataaattggctacatgtctagttcaaagcacacatacaccaaattaatgatatatagtgaattttatccataccaaaccaatgtccaatagatgacgtgtgtcgcccaatcgcctattattcttcatgactagtaatctatacaaagaaaatagcaaattaatgaataaacaaaacatacttattttgaattcaaatagtttagaaactaagaagataatggaggcatggagcataccactcatttttgttgaggcaataacgtccgacgccttttcatctcttcaaagtgttggatgattttttcatcactaatacttctaaaaatctgcttctcagtgtaacaaatcatctagtcatttagtcattcatcccccattttgtttcgcaaatctttttgtaagacacatagctgaaaagaccctctcaaccgaagccattgccaccggaagtatcaatgataactcaatgagcctatacaccaagtgataagttctgttctttccaatctgaaccattaattcagcaacctttgcaagatctttacatccaagaaattctttagttctcctaacattgctaataaaatttctaagttgagtccgtagtagcataagatcaccaaccaaaaaatcttcaacataaatttcagcaagcttcaacataaatttca

SEQ ID NO: 10771 - DNA, 7754 bp, Oryza sativa
acgccggtgtggcgaacaatgcttcagatccgatagtggccagagacgattgtagattaccattaagtaatttgagtacagttgaggtactaccaggtagtagtatttggatttgtaatatggatgcttatgttcagctgaagcatcaacaattgcaacttgctacttctgaatatcaccatgagtttgtcctgattagtgtctgtttcggatgaaggtgtccgaatctttgtgtagaaaatagaagggaaattctataaaaaataggaaaatgtgttgtttaattttggtttcatatagtcatccgaatttttaataggattattcttgcatcagagtgagttagtgtcccaatgttaacctctacttatgtaattcgtgagtttctctgcaaatcttgagcatgggtcaaaatgattgcaatatatttgatgtatgtaattttttgtatcaataatttcattaggaagcagcaaattcatggttgccagtaatggctgtcatttgtagatcttttgaacaaagctgaagccatatccagaattaaccaatggatacaatgcattaggagaaggtttgttttttttttttggcggatcatggatagttgaatcctctatgttgagagtatgacattatttatacttaacaggatagtttgctactttgcttgatatgccattattctttatttcctatgccccttcccttccagagcataaatggtcttttagttcgaatctactaagcatcttctgctattgtcttttagtgtttctgcaattggtttattacttataaaatcatggtgttaaccacctaattttgtttacataatttctctcatgcataatccttttcagggcaatctacagcatgaacacactggtagcagttgtacgtacatacctaaacagtttaaaaatagggaaaaattttccaaaaataaagtttaagcccgaccgtggggatcgaacccacgaccacgtggttaaaagccacgcgctctaccactgagctaggtcggcttctgaccatttttgcaaaaaccaagaataaatacatattttcaaacaggagaaacgagcacaccgtagccctgaaacagaagtaacctggttttcctctattcctttgttggttaccgttcatctattcaactataaaaatccatttttcaaatatgcacgtaatttcggtaaaggctgtgaaaatatcaaggtgccctcactagctcattttttcttagggctttcacaatgtgtataggtgtcatttagtctcagtctcctacatcaaagatttcacgccacatatgcttctctgaccaagtgaagaacggggagccaaaataggtcgtgagtttctcgtcagggatttctcagggaagggagaggaacggcgcttgcgcggtgatcgttccaagctgcattgtcgcctccaacatagtgcgggagatttgctgggggaaggagatgattgaggaaagtgattttcgtggtggggctggcttgagaaaaaaaaattggtggtgggcccacctaaagccatgcgtgcaccagggagatgggagcttcatttgttttgggagtacctatacatctttcgaaagatttttataatcatatcacacagatttttaatctttatattaaaatccgatagatataataaaaagcaaaaagcaattaagaaacaccataatgaacattaaattaccatatcctcaagaaaaagaccaaatccaatacaaaatttaaaatttacatgtgaagattcaaaaattacagtgtaacttacaaaagttacagtgtaagtttcataaattacactgtaacttacaagaaaatgcactgtaaattcgagtgagaaaatcgagtgagagataagaaaaaatctttcgagtgagatatagcaaaatcgtttgttttttcctacctggagagttgggcttcttgttgaggcccggacgtgctgctattacccttagggcatagacaatgtatagagatcaggttacatacatacatacatacatacatacatatatacatacatacatatatatatatatatatatacatataggcaaagcagacgataaggttgttcccataagaaaaaaaattctctactcctcaatttccctatctctactccacatccaatccgtagtttgtgtgaaatggcgaaatcctatcccgccgggttcaaatccatatgagtggacagccatccatagaagcgtgagcggtgaggcgggcagacaactagctagcgatgagagcagtgttggaagtgaagctggggtgtttgccacgaccggaaataacccaatcaggctttccaatcatgcataaatcctcgtattgggagacaaggtacacaataagttgataaatatcaaagtacataagcgaaagcatattgtatttattacatgggcgaccaaaggtccaatacccaaggagaaacgataaaccatggaagactacgaaaaaaaaaccacatgcacttgatggtaggcccgagctcgtgtgagagggtgaggggcaacgacgatggtcgaaaagggatgagggacgtccgagcaccaatttataggggtcagacctatagctactgcttgtcagcgcctctgctagcgccgaccgttgggatcaaacccatgaccacatggttaaaatccacacgctctacgcctaccgctgagctataggtccgcttttgccaaaaaaatgatagattggttcttttcaaaaacttatttcagactagactatgcaaaatgatagagatacaattttgtattcttatctcttgtcggttttccttgattctctcatgattatgtttttataagtcagttgtagagataaggatgtacgtgcctatatgtactcgtggtccatgattaatcaaattatcgtgttgactcaattaccctttcacagaagaaaaacatcaacaaaaaataggccaaagctcagcactaggcctattggcactaaggtctaatggctcaacggcaatcgaattggcgccaacccctactaatgtggcctgggcaccgatcccctcgccaacgtggcaatgtctcaacgccaatcacccgattggcgctgagctcccaacctcagcactaggcccgttggtgctaaggtaggggacttgatagcccctccctccttatatccatccatctctcactcatttttttagcaaccaaacaagggtttccgaggagcctaggtgatttcaaaagtgagtttacttcttcccctgcaattatctaaaatatagtgtttgatctatctattctaggttggaacttgtattgccacctcatgccttccatagattagagtttatggttagggtttgagtagttccaatctatttgagttttattgtccgttgtttatgttttatggagtggggaattgtgtttggacctacttggtatcatttgtttgaagtgtagatgtggatattagtgtggtaatggtagggtttagtacataatggagaaggaacgaatgttgggttatttttgggtatggtcctaatatttaggagcggaaatggttaggacattactaatacttggaagatgaagtaatgtttgtcaactacattatagttctacagtaatattttgtaggcatattgaataaaagtgttgatttattaaattacatcaaaattgctaatcaatgagtagttcatttgtctatgatttgttgtttacaatggacattacgggctatgtccctccgttgggggttccggactttatgaattatccaagtcctcatcaataaccaccgttgggggttccggactttatgaattatccaaggttgagaattgagggtgcaatttacgggtggataaaatttgtgatgttcaaaacagatggcacagacggcaggagctccaatactatgtttataagcattaggagtttcactttgtctttcaatcacaaaagttatgacacttgtatttggtccaagacatcaacaaaacaatcattctgtcaatctaaagctactggttctcctgccaactgattggtcaaattttggcccatctatgtccactggtacagtaattagaacagacaattggtattgtaaatcagctaagcagccaaccgtgatgagagcttatgctagttctgacgtgaatgattattaccctagtgatctaaggcttcgttcgttcctgatcgatccaagggattgagagagaaaagtatctcgttttccacacgcacgcttcccaaactattaaacggtgtgtttttttaaaaaaaattatataggaaagttgctttaaaaaatcatattaatccatttttaaagtttaaagtagttaatactcaattaatcatgtgctaatggctcacctcgttttgcgtatcttcccaatctccccaattcccttctcctcaaacacaccctaacttaacaataaatggattaaatatgaacatgggtattcatcgactgtacagtggttattggtttggttttctctaatatctcaattagaattgctaaaaatagattaagatgatatttgctactttccgtctgttaagatgatatttgctacttttcgtctagatatttactgcatagaggaatgccaggttagcatagcgcaagcactatatatatatatatatacacacaaaaaaaaagattcataataactgaccaagacttcatcacagctctgtgcaaatatcaatatttactggatggttgctcatggttgataaggtatgtatgatcgtgtgattttttcctcatgagtcatgcgaatgagaggataaagctcatgaatctgaagaaaaacctgtacatcaatcttatgaaacatttttttttgaaaataactgtttttcacaaattcctttggctcagattttctgaaccttcaagcttctcttttccctcaccaaaatcgtagaaggagatcgttccattactcaattactcatattgatatcgttcagttactcatatttgcttactcatcaagttagcttgttaccactgaaataacagcactctaatatacaggtgacagttagtgaaatctaaataccgtaggcgtaatttcactgattaatggttatggtttgaaattgcatccaagcgcaggctgcaatgttcattggagaagcccaactggtcattgaactgcccgtacgtgctccacgtttactggtctaacagtttaaccgctagctcgacaggttctaaggctgcgttcggaaagtccacctgtccgcatggaaaacggtattttctattagcgcacgattaataaagtatttgccaaaaaaaacttgaaaaatgagttcatatgatttttaaaagtaactttcatatataaagtttttctaaaaattacaccatctagcaatttgggaaacgtacgcgcgaaaaacaagtagaagttgaaaaagttgggggaaagaacacagtctaaatgtacgactgtggtcagtttttttttttcaaaaggacattgctccttggccatgtgtcaaagaaaaaagctcacatgggccaacaaggcaatgggtttggtgggtcgaaagtgtgtgctaccagcaaagctgtgacaaacaacattcttgcatgagcgtaagctgttgacaaaggatagggacggttttagaacaggtacaataagactgacttagcaggcggtagattgatctacattagcctaatcctaggtggaagagtgagaaaaggagagagaatagaacgggcgcttcatctgtagccggacgatagcagtagaaacgaagctttccgcccgcttaacgctagtatggttgatacttcacgttattttgtcggcccctgcggtgtttccttgatctggcgtgctcgcttttccatcgttctttccgtgttcaaaactatatactacctttgtcttacaatataataacttttgactatgtatctgaacatatatttaactaatatagcaagaatttgttatattttgggacggatggagtaaatattaagtttttaagctatagaaattatcccataactctaaaataccaaattaaatagtaatttcaaacgaaccgcccagttttctcgccatttgatggttaacattgaacctttcaaatatgtatctatctgtaaatactaaatactatatatcaattggctagtttccattctaattacccggttggaagactacagccaacatatttaagctcagtttgaatcagatttctgtttggctgctaccttgttttccattagcacgtttctcaaaaatgctaaataatactccctccgtcctagaatataagaagtcttagggttagacacggttattaagaaaataggtagaagtgagtggtggagggttgtgattggatgagtagtggaagtagttgagaaaagtgaatggtaggttgtgattggttggaaagagaatgttggtggagaagttgttatattttgggacaaatcctgaggagggacggaggaagtattgtttttcaaaaaagtatatatagaaatttctttaaaaaatcaaataaatttatttttcaaatttataatagttaatatttaattaatcttgtgttaatgactttctacgttttatgtgccatcaattcttgtgttaatgacttgctgcgttttatgtgccatcaaaaagctgcagttaattaacaacctattcgaactaagcctacttgctaacaattcaaattattcagaagtgatacgatttttcttatttaattcaatacatatcaatagaaatactttatcttaaatgaaccgaccctaataaagtacattctcttaactttttaatattttcttgacatgcacttcaattaattccctaatctgctgttattccataagtgtggggatcgtggaagcatgcgcatacgttcgaataaccaccaacccttatttacccttatcggcatagtaatcacaattccaaactagaaacagggagtacgtgaatcctgccgaggcatgtcacctactcgataacgataactcagagtacaaaacctattttacatctcaataattcacatgtctaaattaacatgcaaaatgtgaccacaatttaacatcaccatgttctagtcatctctacatgcaaaatgtgaccacaatttaacatcaccatgttctagtcatctctacttgcaacgcaatgatgctgtggtaaaacaattgctatttattgtgtgtacagctccatccctcttagagcatgttcaatagtatcactggctaccgacgatatccatatccacatcagctaacagttaatatggagagcaaattatccagtacatcacagcccccaagaagcatttctttttttctgtgggatccaactgacaagcatctttcatagtattcatctcactgtgtgtggacccatgaccatttttaaaagttaaaaatttctaccttgctggctttttcaccttggagctcacgtagagctggcgacaaaatagtcgcccgttcctatcacctttcttcttctctgttctccagttcattagttttgctgagatggttgtactatcaccggttattgtactcgctcttacactgcataaggacaaactgatgaaaataatatgcttgtagacattgatcatttcattaatttcagtgcctaatgttagccgcataatatgtgtgcca

SEQ ID NO: 10772 - DNA, 1607 bp, Oryza sativa
aaattttggttgctcacttcagttccaaatcaaactacataagaactccaaatccaaataacacacctagcactcaaaaattggctgctcagcttagtttcagagtagacaattgaaaaaaaaaactaacatcttaggtcagttttcaattacggagctgataaacacaaacatatgaactcagcttttagaccattacaaagaagttgaaaaaacatatagttcagttcagtaccaaactcagcttttaaattatcacatagaagttgaaaaaacatacaactcagttcagtaccaaattacaaaaaaaaaaataagttgaaaaaacatacaactcagttcagtaccaaattaaaaaaaaaattatagaaaaatcagttcagtaccaaatttaaaaaattaaaagaagttgaaaaaacatacaactcagttcagaaccaaattacaaaaaaaattatagaaaaataatggagatgcgggggatcgaaccccgtgcctctcgcatgcaaagcgagcgctctaccatttgagctacatccccttttatgacaaaacaattcaaatcaactaactcaagtaaaattaacaagttgggcctagtgagattacggcccaatgtggtgatgccacttcacttggcagtagagagcagcaggtttagtcccacctcggcgggagagagcgagggggcatcggagacaggctataaaaggaggtcgatctcgccttacataggcatgatccttcaggcagttaaagggagatgaggagtggtaacatctcgcaacttttactgcgagaggggtgcccgccccaacccaagcctgttacgacaacaggggcatccccatcattttaccatctgatcccgaaattttaactgaatttgtttggattttgtttttttgttgtggctttttgtttttttgttgttgctttactccatttcttgattgtttatttggtttatttggccaaatgttttctattaattgccggtttttatttgctttgttcctcttaagttgctggtttttatttaccaatttcaagctgtactattgtcgctctcttcgttgttgagatcacgcagcaagcatgatcaaaatacgaggaaaactaacaaggtgctgcgacacctgtaatgggtctagcacccaccctgatgctctgccttctcgcactcgcggcgctgtctcgcactcatcgtcgttgtcgaccttggagccacccgccgctgccgctgccgctgcctcatcgactcctctccaagaccctgatgaaccctgagttcctctcaacactcaaggctgttgttggcccgatctttcggtgagttgtgataactacgatttgggagatacgttgacgatccgactacaaccgtacgagacgttgtgttgcgccttagcgatcgatacacctctccgtgggttgttgatcttgccggtgcagatcaaccctattcctgcaagcaaatcgaagaaacaagcaagaacaagataaaagcaatatgatattgcaaatagaaatttaatacaaatgataagttggggttccaaagaacaagcagacagacggtctagccgacacgcacgctacaagca

SEQ ID NO: 10773 - DNA, 723 bp, Oryza sativa
tcttcctccgcgccggccaccctcggtgaggcatccctcccctcttttccccttcctcccctcctagtaccgcgccgccgcttcaagtcacgcgcggtcgctttcgacagccgctgccgcttcccgtgccgccggtcgctgccgccgtcgaccgcgtgccgtcgccgctagccctggccggccggtcggctttgatgtcgagccgagcccggcggccgcctctatcgccgcccgtccgatcggccccgagggcgatctgggccgtcggtcccgtggaccggcggtggaccacccgcgtggtcccggtccacggtgaaccgcccccccttgagccgctgaccagtggggcccgcctatcggcgccgcgcctcccccgtgctgacgtcagccctggaaaatattgcgcaataaattatttaaggatttttgttatagtaataaacacaatgaatcttctaaaattcataactaattcatccgagctccgtttaagcccattcaagtctcagtaaatcaagaaaaatgtgtagaatccattaaaaatggttttgttctctgtttcagtagtcttatagcctgtttgcaatgtttgccttgtatgtcgctagattccggttcctccgacgctccggtgtacttcgaaatagtcgccgaggttcctccagcagcagagcaaggcaagtcatgcttgtcacttgaatatgttgatcctatattgcaaat

SEQ ID NO: 10774 - DNA, 982 bp, Oryza sativa
aaaagagagggaaaaagaaaaagaaaaagaaagaaaaaaaaagagaaaaggattttccctggaattaaaatatttcttgctcaattttaattggttaaaattatttctagggctctgaaaattccactaaaaatcctgttagtgaatttcgacatgtagaactcaagaaaaattccacatgccaattccgattattatttgcattgatttaaaagggtttactcttgctttgcaccggtattttcttagggtctcttataaattaaattttagacttgggaggagaacttcggggtgtgacaccggccggcgccgtgggtcccacgcgtcagccgcacctaagggcgcgggcggctgacggccgggccccacgcggcagccactcggcgcgcccgagggcggccaagccggcacagccggcgggaggcggcgcccgcgcccctatggtcgccggcggtggccataggcacggcagagcggcggctgagagagggaaagggaagggggaaaagaagaggcggtccacggctcaccctaggtcgacggcgacgacgaaaaaggcggccggagcggaggaaggcggcggcgcggctcgggtcgacggggtccacggcgttccggcgggcggcgagcgaaatggaggggtggacgaggtcggcgaggatgcggccaacccgaaggaggcggcgccgaggtgggaggtggtccggggcgacgacggcggcggaccggagctcgacggcgactgcagagagagagagcgacggcgcgagctctattccggcgaggagaaagggcggcgagaggcggaaacggacggaagaggtgcggggagggtttaaatatagccgggtccagagagggtggccggggaagggaggaaacctgcgcgggaggtccggctgccatgaatggcgccggcgagatttgcgggggcaaatcccgccgtttgaacgagagagagagagggaaaaatgggggg

SEQ ID NO: 10775 - DNA, 614 bp, Oryza sativa
cttctcaaatacatcctgttgatagatactacttgtcaaccattaactggatggtacatatatactgaaaactcaattaatgatccaactataccttctggtggattcttcgagctgtagctgggtccctcctgtacattgttccataggccactctaattacttggtccagaggacaaggtgtatcttcaacttttgaagccagaaatatgcacactgttgcaatcgtctgcaataaaaaacaagtaaagctattggctctggaatgacaataagcaaataaaataaacaccaattacttgtaatagtatttagttatagacagcttgcatcacatgcacagctttttttttcttttcttgagcaatgaagaaacatgtcagcaagtaacatctgcaagtgcagataacgagcacaactccagattaattgcagagacaagaatgtgtttctcaattaaataaccgcatgacaggaatacagtgaatgtggtgaggcgaatcaaatctataaaactactgaggatttatacttattagatggtcaagtatagtattttagcttctaataacaggattgtaagctgtaatccttgtggctaatggcaatagtgt

SEQ ID NO: 10776 - DNA, 661 bp, Oryza sativa
ttctacacatttttcttgatttactgagacttgaatgggcttaaacggagctcggatgaattagttatgaattttagaagattcattgtgtttattactataacaaaaatccttaaataatttattgcgcaatattttccagggctgacgtcagcacgggggaggcgcggcgccgataggcgggccccactggtcagcggctcaagggggggcggttcaccgtggaccgggaccacgcgggtggtccaccgccggtccacgggaccgacggcccagatcgccctcggggccgatcggacgggcggcgatagaggcggccgccgggctcggctcgacatcaaagccgaccggccggccagggctagcggcgacggcacgcggccgacggcggcagcgaccggcggcacgggaggcggcggcggcggccgaaggcgacggcgcgtgacttgaagcggcggcgcggtactaggaggggaggaaggggaaaagaggggagggatgcctcaccgagggtggccggcgcggaggaagacgacggcgaacgacgaccacgagccacgggaggacgacggcaaccgacggacgggattcggggtaccctaaagaaggagaagagagagattagaggggggagatgaaccacggcgaccggcattcatgg

SEQ ID NO: 10777 - DNA, 515 bp, Oryza sativa
tatgaggcggtcggtcggtgaagatgttgacgcccaacaacagcagcataataggccaaccgtgtagacggaaacaccagtcggcggcggacgaggcggccggtcggtgaagacgtagacgcccaacaacggcggcataatatgccagctgtgcaggtggaaacaccagtcggcggcggacgaggcggccggtcggtgaagacgtagacgcccaacaacggcggcataatatgccagccgtttaggcggagacaccagtcgacggcggatgaggcggccggtcggtgaagacgtagacgcccaacaacggcggcataataagccacccgttgaggcggtgacaccagtcgccggtggacgagacgaccggtcggtgaagacgttgacaccgaacaacagcggcataataggccagccgtgcaggcggtgacaccagtcggcggcggcgaaagcaagcctgtggtgatgttctgactgatccattcctggatcgtaagagataagcttaaagccat

SEQ ID NO: 10778 - DNA, 534 bp, Oryza sativa
tgttgaaaccccagactggaccgcccctccggctgtcggagggcggtggcggcgccgcagaatagcccttgttggagatccagctcgcggaatcatcagcgcgggaatgcgagtcggccccgaacgccacgctacgctccctccgctccatgggcgcgggggctgccgccctcttggtggagacccagtcatcgacgtcgtcggcacgcgacatcgaagagtccacgccaaaccctcccatgcgctccctcctctcgagcggcttcttgccggcgccccagtcatcggcctcgtcggcgcgcgacgggccgaagtcctgggggccagatccgccgcggcggggctcgtcgtcgccgcgggggccaccggcgccggcgccgccccagcgagccccgaagccgcgcgtggcgttggcgagctcctcggcggtgcgctcgcgggggcctgtggggaggctgaggaggtcgtcttgggtgggcccgcggtaggcgggggcgacgaacttggtgctgttgaactcgccgagcgggacgg

SEQ ID NO: 10779 - DNA, 858 bp, Oryza sativa
  unsure (1)..(858): unsure at all n locations
gcgagagaaatcngttaacattttantggtttattttagtccnnccccgtannccactggacgcttttgtggggtttttggttttaatggtttatggttgattttccttatnncaaannnnnnnnnnnaatgtattgatgtcatgtagccancnacacnagagnnnaagacanngaagagcacgaaccagaatagtgttgttcgtatagatgccataggacacgatggtacaactggcatgtattacggtgccatcgaggacatatgggaacttgactatcgacctctcaaggtctctctgttccggtgccaatgggttaggttgactggtggaggcgtaacgattgatggcagtgggatgacaacgattgaccttaacaaggttgtcggactaaccttttgtccttgccaatgatgtaacgcaagttttttacatgaaggacatgtctagcaaaggaaagaagggcaaagggcctgacgagccaaagccccacgtggttctcccaggcaaaagaaaaatcgtcgaagtagaggacaagactgacgaggattacgatcagtttgatgggcaaccccctttcacggtgacaattgaccctagcatcctcctatcaaatgaagacaccccttactcacctagtgatcacaaggaagaaacaatagtgaggagaaactacgtgtggtcaaccgtcaccgccaatgtattgctcgaattgttgtgtacacgatgtaaactatttttggatgtattgaatattccattaaaattaataggttgaatgggaaatggctgaatatagatggattactagaatcttttacacaatttttaattcttgcatattgcttgcgtatttc

SEQ ID NO: 10780 - DNA, 840 bp, Oryza sativa
  unsure (1)..(840): unsure at all n locations
ctaatccgtactccttaaccatatattttattttctccactcccgacgaattgtaagcntttagtctttnnttttaccgatcctcctcacaccccccccccccccaggganatgagatcaattgcgcacgccgcagncgacncnagaggaaccacacagcagganacccggccccagcacgcgagggggagacaacgcncccgcgcccggaagaccaggaacccacaaagccggaggaggacgggcgagaagacaagaacagcggcccgggagcgccagaaacgaaggccaacaaccagggggccacggaaggaccgcaaaaaccccaggagagccgccaagggagaaacgcgaggaacaggcaaggagaggcacacacggggagccgaaaaagaaacgcccgggcgggggaaagggaggaaccggagggccccagcaaaggcacaaaaaaccggaggagctgccaccggcgcgccaacaggggaagaaagcnnggcccaaggggcaaccggagcggaacaggggacacaaacagcaaagccagcacgctggaggaagaagagaccatactaccgccggggcaagagaaggccagaagcccggcgggggacgaagaagcccaccaaaggaagggaagcaccaagggcccncaaggagaacgaaaaccacatagaggagaagggccactggaggagcttatcaaaggaggcagtgagtgcgaagtcctctacgttgaaccaggaaggacacttatccagaagcacaatggtggacaaacaatgaagtgttgaaactgggtctaaaaaaaacaatggggcaaaagaaaggcctaaacctgtg

SEQ ID NO: 10781 - DNA, 560 bp, Oryza sativa
aacttctccaaaatcgctcgacccatgacacagttgttgaagaaagaggagaaatttgtgtggagcccgcaatgcgagaaggcgttcaaaactctcaaagaaaagctggtttcctcgccagtgttaatcttgccggatactcgcaaggacttcatggtgtattgtgacgcttcgcgccaaggattggggtgcgtgctcatgcaggacggtcatgtggtggcctatgcctcacgccagctacggtctcatgaaggcaactaccctacccatgatttggagttagccgcggtggttcatgctctaaaaatctggcggcactatctcattgggaatcgctgtgaaatatatactgatcataagagtttgaaatacatcttcacccagtcggatctgaattttcggcagaggagatggttagaactcatcaagaattatgatgtgggaattcactatcatcctggtaaggccaacgtggtcgccgacgctctaagtcgaaaaagccattgcaacactcttaacgtccgtggcattccaccccaacttaatcaacagatggaagc

SEQ ID NO: 10782 - DNA, 828 bp, Oryza sativa
  unsure (1)..(828): unsure at all n locations
aggaacaaaggcgaaaagggaaacgggaaaagccatcccggaacggcggatgaggcaacggaaaggaaaagggcaatggacacccccaccccacccnnccggggatgatggccaccccagcaccagccngcggnngacncnagaggagccccaggagcaaaacagcggagcaacnaaccagaaaccnnaaccaacacggaacagcacacccaggccgcacaggcccgaccaaccagaacaaccaaacccggcgggacagaacaaacnccaaaccaggagcgaagcaaaacagcaccagaaacaacaaccacaaacaccgagagaggcgngagaccaaccacgaaaaacaacgcgcaacccgcccaaaaccgcgggcacgggcaaacgaaaaaacaaacccgggccagaggggaaccaccggacccacaagacacagcccccccaaaaggacgaccaggcggcgcgaaaccggaaaggacccgaaaagaggcggggacaaaacccggagcacaacacaacncaccacagggcaccangccgggaacaaaaacaccccccccagaaacaaaaccagaggcagggaccccccagcgacccccacggaccgcncgccgcgacncagaccggagccccgcaaagaaacacgccanacagaagggaaagccgncgcccaagccggcnagaggcaggaaccggaaaagaaccacaacagaagcacgagaaccggncccaaagcggcaagagcacgacccacaaaaccaggngcccacaacccaacaggggcagggnggaggaagcaaagaagagcacaacacgagnaaccagcgc

SEQ ID NO: 10783 - DNA, 7952 bp, Oryza sativa
taaagcttgtgttgggggggggggggggagggtctgtgttaacatcaatggtgagagaagcaatttctttagcacttatagagggcttagacagggtgaccccctctcccctcttctctttaatctggttagtgatgccctacagcctcttttgatagagccaaacaatcagggatcctctcaggtttagttccccatctttgtccaggaggtctgactcatttgcagtatgcagatgatactgtgatttttataccctttgataattcccagatcaccattacaaaatttatcatgtactgttttgaggagatggccggcatgaagattaattaccacaagagtgaggtttttactgtggggcttgaggagaatgaaaccatcagagttgcaaagatgcttaattgtcccattgggaagtttcctatgaagtacctgggattaccaattagccctgataagattcttaaacaagacctgatgttcttaccccacaaaatggaaaagaggttgggaaattgggcaggccctttatcttatgctggaagagttgttcacattaactcttgcctatcctctattccttcatatgccatgggcttttaccaactccccgagggtgttcactagaattttgactctttgaaaggtagatattattgggctggcaataaacaggggaggaaatatcatatggtgaagtgggctgacttagcactccccaaagattttggaggtttaggcttcactgaaacaagactgtttaacactgccctccttgccaaatggttaacaaaaattgaatctgaagacaagagcctttgtgttgagcttttaaggaagaaataccttctacaaggaggagtttttcaatgctctactgaaggggtctctcaattctggacaggtgttcttaacactagaaagtggatgaagtttggttctgtgtggcaactgggaaatgggactcatttttacttttggctggacctttgggttggttcctaccctttaaatattgctttctttgagattttcaaaatctgtaatcagcaaaaggttacaattgcagaggtgaatacaaagggcttggggatatttacttttagaagatcttttggtcctcaggaggttgatcaatggaggcagttatgtgatttatttgataacttggagctttctaactccccagatattatgagatgggcgttgacacctaacaaacagtacactacacaatctctctatagggctctatcgttcagaggaattagagatgagaaaatgcatgccatctggagatgccctgcccctatgaagataaaacattttctctggctagcacttagagatagaatccagtcgtgtgaacaattgaaaacaaaaggttgggaaggttctgaactttgtgtgctatgtaactcactagaaaccacaagacatattctctttagctgccccatggccaccttcatttggtgtgtctgtagagatgcttttgggtggcactctgtgcctaacagctttgaggagttcttttctctgattaaacacacttctctgaagagttttagtacttatctggccttactcgctgctatttcctgggtcctctggactaccagaaatgatatgatttttagatcgcggactgtttactcaccactaatgctcccctttcgaattgtttcttacatgttacagtggaggggtttaagtcacgcgaatgaagctgccctgatggaggccctgaccgagaaactgaaatctgctgttacaaatgttggcgcgaccagagcaggaattggctagtctgtttcagtccttgatgtagttcttcagaggctgcgagcttttgttctttttctttaacctgtcgttggtttaagatgttctagagttctggttcttttgtttcgaggcgttgccctcctgcgctataaaacgctggctggtttccccagcataccttctggctttcaatataagccgggctcttgagccttttctctaaaaaaatacagacatcttcagtttgcacttgttcctgtttgggttatgtaatctgaagaaaggaagatggatagttgatcatatgttcagttcttggtgatataaattgcctgtcagttaactacatcagtaactttggctatcaattctagctagaatgacatcagctgcatgctgatcgggatggagcacaacgacaatgctggtcagagactgagagtaacgaagcaactatgtgtctcaatgctatgcaagaaacatagtaactgcagtctcctgcagaaaaagtaaaacatgagcttggtgccagcgggagctgggccggcggcaaactgtggcggtgggggcgctcggcggcggcggagtgatgtgcggggcgtcgagggcaggcggcggcgcttggtggcggtggggcatcgactgggccggcggggtggtggccctcatgctcgcggcgccggagtggatgtcgatggcgctcagatcgatcgatccagactccaaaggatatctcaccctttgatctgacaagtgggcctaggggcaaaacagtccaaaatgcctggaaagaaatacaaattgatttaagaaatgagaaatacatcaaaaactgagaaagtggtaccaaatagactaattagtagtcctaatgatatattatagagggcatacggattgggttgtaaaagagttgaggcacgcgaattggatggtaaatactctaaattatcttttttatgaggtcaggatgcctaacttataccttttttttaatgagaatagctagagcacgagataacttttaatgaatctaacaaattaaatacccctaagctctttttaaccataccctcgagcatatgcgggattcctctcattaaaccacccgatactttatatgatgacaccatgctgacatcaacacgaaatctagatatcacatcaggtacgaggtatcaagtccgatacctactgataccaaagtaccaagtctgataccaggtctgataacgatacccgacctagtacctgttgaagttataagaacataatgatttaatttatttcataaataaatcataacattgcagatgtaaactagcatgaacgcatcattagatctacacatgtaaactagacagtaaagcataaataaatcgaatatgcgcaacatgctgaacacgtaacaagggtaccggaagaccggttacttagcaagaattactcccaggtgcgggtgttgacgacggtgcgcagcacacgagcgaagaggaagacaagccgttgtggtcgaacagggagcaatcacgcgaagcgctttcaaaaaccatattgctgccttcttctggtgcaggacgtcgaaggcgaaggttccgaagacctgctctcccgattgccgtgcacgccgacgagcgggatggagtagactacgagtgacgacgcagtacagaggaggaggcaaaccctagattaatttcgtgtgtgttgcgtggaggcggcagctcagcttatatagagatatcaggacgcttgatcaggatgcctacatgatctctgctccgtgtaaccaaaccggataagtcgcgcgaaacttatctggactccacgatgtttcacgcactggatttttcggagtgtttccaaaacaaacaagtccgaatttcccacggcaaaacaaaactatccggactctacgctttttcacgcacctgattttttggagtgtttccaaaacaaacaaatccgaatttcccgtgcaaaacaaaactgcaaaaagaggttacatctgtgcaaaaggaggttgcatctgcgcaagggtgaagaaccactttttggcggaccattcgacgcataacgtcatgcacacgcgctgccacgccatgtcaggcgagcaagcacgcgcctgtgttcaccctcttctcttcacatcacatgtttcaaatgactagaagagcatcctcccttataaggaggtcttcctctcgtagaataagtaatgtggtactaaactcctatgcttgtcatcccatgaggtgggcttttgtgattttctaaagaattaattttcgaatgggctgagacccatctattaattcccttgttagagtactatgagtacccttacaaccctagcttgccttgtcagcatctgtctccaaaggaagacaactgatcctagcccctaagttcgggtttttttttcatataatttattttcggagtttctctttagcttttcagattcaatgaataaatatggttaaaactttcaccaaattgtagggattcatttcactactagcacctcttatgacagttcaacttgattggtcacataagctgcaaacatgagttttgcttgcggaattacagattggtatctagtttgctatactttagtcagaataatatttcttaaatattgtggattgcagattgagaggtacacctattcaagttattgtggatgacatgaagctattttatagatactggtgttctttttttgtttaattattagacgggaattcctttttcattagttatgaaagccaaaaaaaagaaatactatcatttggtccctgcctattgatgatcaacagtctaggcaacggaacgtgccaaaaaaaaagccaaaaagtcaattcacaacatttctgtttttgaaacagtcataaaacaattaaaaaatagaaaaaaattggtagcatatattacaaatttcacaataacaaacagatttatttaatttatcaacgatgtaagtaccattcataactaaaatttttaactcgctgtatttgtgtgtcagtgttgagattcgatcattcgactattggtatgaagcagattcagtctatttggctcaaagtctgaacctagctactttagtgcaattttagcggcatggcgcagtattggccttatattcttagaaccgtgtactcagataataatatgaaaccacgtataataataatatatactatgggtctgtttgatagagctctaatttctaaatttagctttaagagttaggtctagaataaagttttagagagttttaaaccaatctaaacccagctctagctacctctatagtttattttgtgagaatgctatacccaacttcgctcctattttaagtggagctaaaattatttggctgagctccagctccaggtaaagctgaaattgtagcaaacatgccctataatgcaaatggatccatcattcatgatatcgagagatgcctgaaacacgttcgcttggctgtcacgcctgcaaattaacgcaaagcaattaacgaaagccgcagaaaagcaaatctggaggcatggaaatgagctgcaaagttcatgtgggcctttgcatacagataattcgatcaaagtacgtgtgaatggttgaattcttgtttctaaagatctctcaaagcaacatattctttatataactgaacgtgacatggaacgaaatctttttcgccgggggaaacgggacgaaatcgttatgtgcacaccgaacactggtggagaaaccctttgtagtcccggttcgtaacccccctttagtcccggtttccaaaccgggagtaccaatccgggactaaagatcgctatctttagtctcgggtgaaataaccgggagtaaagatcgatctttagtcccggttggtaacaccaaccgggactaaagatggctcagccacgtggccgggatcgagatcggagagatcgagatgcatgaagggagatgcggcggctctcaccccagagatgcggcggcagcggaggaggcggaggcggcggcgaggacgacgagctcgagacgacggcgagatacggcggcgtcggcgcggggatttgccctaggcagtggcggcgaaggagagaggccgagagagatcgatcggccgaaaacgtttaagtgttggtgaagaagacgagggcgcaccgggaatatatatacccctggatctttactcccggttgttcaacaaccgggactaaagatatctttagtcccggttgttgagaacaaccgggagtaaagaaaagatctttagtcccggttgttctcaacaaccgggagtaaatatcttttcccgctatttcgaaattctttttaaacccggttagggttaagaaccgggactaaagattatagcactgcatatgattttcgcttacatatgtgtttataaaatagaagttaatgcattaacattatttaaagtacaaagattgatgacaattacttcgaaaaattatttttgtctgtaataaattaagtggataaatcgtaataagcaaatatatgacttataattaataaaaattccaatatatatatattcttagcatatatatgaatgatattattatattggtaaaaactctaattaagatattaatgtacatactgcatgatttaaaattaataaaaattgtaatcatcatatgtacttagcgtaggaattatattaaattaaatgctaaaaactctaattaacatatgtaaatgccacatgcatgatttaaacattttaaaaattcgaatagtcatatataagtagcatatgaaagatagtaaattaaattgtgaaaaactctaatatatgaatgatagttttaaaaatatattaaatttaatacttttaaaaattctccagtcaattataattagcatatgaatgatagtaaattaaatgttaaaaactctaattaacatatgaaattgccacttgcgtgatttaaaacttttaaaaatcctctagtcaattataattagcatatgaatgctagtaaattaaatgttaaaaactctaattaacatacatatgaaattgccacctgtgtgatttaaaacttttaaaaattgtaagtatcacatataactagcatatacatgatttaaacttgttgaaacctctaataatcgtgcgtaattaacatatgccatacatcaattgatttatatggataatcaatacatccaaaatagtttacatcgtgtacacaataattacggcacgtactttctcctcactattgttccctccttgtgatcgctgcgtgagtaaggggtgtcttcatttgataggaggatgctagggtcaatcgtcaccgtgaaagggggttgcccatccaactgatcgtaatcctcgtcagtcttgtcctcaactccgacgatttttcttttgcctgggagaaccacttgacggttaggctcatcaggccctttgcccttttttcctttgctaaacatgtccttcacgaaaaagacttgcgttacatcattggcaaggacaaaaggttcgtccgagtatccaaccttgttaaggtcaacagttgtcatcccactgtcatcaatcattgcgcctccaccagtcaacctaacccattggcaccggaacagaggaaccttgagaggaccatagtcaagttcccatatgtcctcgatggcaccgtaatacgtggcagttgttccatcgtgtcccatggcatcgacacgaacagcgctgttttggttcgtgctcttcatgtcttgggctctcgtgtagaatgtgtacccattgatctcatatccctggaatgtcgcgatcgacccagacggtcccctcgccaggaaggcaagttgttggttgatcgactcgttacccatgagatgttgtcgtagccacgcggggaaagtatcaatgtgatgccgtgtaatccatgcatcggacttaccgatgttcctggcgcgaactagagccaagtgctcctcgatgtaaggagctaccaatgaagagtgttgcagaacagtgaaatgggctttacggaataaattgttgtctaccgtcgttattgctttccttccgagagttccctttccccgtagtctcccttcatggcgtgattcaggtaccccgattgggcgaaggtcttcgataa

SEQ ID NO: 10784 - DNA, 1071 bp, Oryza sativa
tttcgcagtcttccctggcgtcctgcaacatctgaccaaaatcatccgcaacgtcgttaccatcagcagctatttcctcctcgcccgtttgatttccttcaaatccaacatactgagcaaagtccggaatattgtcgtcttccacttcatcttcttccatttcaacaccttgctctccgtgggatgtccaacaattatagcttggcatgaaccccgactcaaacaagtggaaatgaatagtcctggatgcagaatactccttctgattcttacacttattgcatggacaacaaataaaacccctttgcctgttagcttcggccactctcaaaaaatagtgcacgccgtcaataaactctttggaccgccggtcagcgtacatctattgccgatccatctacatgagtcaaaaaaaccgcacacaaataattattcttacaataatgacagtcatacaataattataagatatctttattcatacaaaaattataaaatattacaccaaataattcttaaaaactatttgtaaagttttaaactaattttaatgtgttttacttcttttaatttttattttagtttgttttctattatttaatattaactttcactagagttttccttctcaactattttataaaaccttgtttagcaaatgaactaaatttctatatattctttcttccccacacacattttctctctcatcaacttacaactaaattttggagaaaaaaaagtgtgcaaaacataggtgcaaatgtagtatgacaaaaaaaaacattggaggatgaagttgcaaaccttttaggcacctccgatttgatgtaatcaccaaaataaattcaatagaaattttggcatgacctcccctcttttttgaagaaattttgaagcttgctcgggcagctggaggaggaagaagacatatatataggggtgggactttagtcccggttggtagcaccaaccggggctaaagatcaccggatcattagtcccggttggtattaccaaccgggactaaagttaagatctttagtctcggttggtaccaccaaccggggc

SEQ ID NO: 10785 - DNA, 616 bp, Oryza sativa
ctgcggccccgggcagcgtggagagagctatggatgatattttggtaacgtcagacctgaccagtcgctacaaaatttcacgcaaaaccctttggtcatggcaaagtgcagacacaatgcctcggggcttcgtatgcccgttcccaccccctgactggcccggcaaccctaaccgctggcgctctgagtcaatcaaagagtgggaggataaaaagaagataaattaactgaagggctctccgatgatctcttcaagatggctctgccaaacgcggagccagtgtttctgatcatcgatatagtcatgaaggttgtaatgcgccataacccccaccatctgatgcccgagcagcttttcaattacgtgcggcgggcaacctaactcagagagatttgtggctatcgtccgcctcatatcatgaagcgaccactctgccatacctgttccattccaaatagaacgggcgtaattggatgccacaggtgaatgaacgggcgaatctttgatcccgccatcaattttacgttgtgaagtcaccaggtgattggtgtttattttcttgaggtgatttctgaccaggttaacggcggcgtctgagagtccccttctaatatg

SEQ ID NO: 10786 - DNA, 1075 bp, Oryza sativa
attgtctggaaggataccccttattacaactggtagcagttgtgtcatcaacacgtgacagtcatgagactttaggtttgtgaacttcttctccttcgtgcttattattcgcttgatattcgtggagtatccagacggtacctttatgctctccaagcattcaacatactttccttctctgccttgctaagagtgtagctggctggactcaagtaatggcttcctttctcctttggttccgggtgaaggtcgccgcgttgttccatatgcttcagatcattacgtgcttccagtgtatctttcgactttccgtatacacctaggaagccaagaaggtttacgcaaaggttcttagtgaggtgcatcacgtcgattgcgtggcgtacgtccaagaattcccaatatggtaactcccaaaatatagagttctttttccacatcgccgcgtgaccatcttcgctctctatatgctggcttccaggcccctttccgaacactactttaagatctttaaccatagcaaacactgttttcccgctgcgatgtttaggcttcgtacggtggtcggccttatgttcgaagtgcttgcctttcttccgtaccgggtggtttgctgcaaggaatcgacgatgacccatgtatacaaccttcctacagtgcttaagatacgtactttctgtttcatccatacagtgagttgaagccttgtaccccttgttggactgtccggataggttgctaagtgcaggccaatcgttgatggttacgaacagcagcgctcgtaggttaaactcctcctgtttgtcctcgtcccacacggggacaccttccttcttccacaactgtttaagatcttcgaccagtggtcttaggtacacgtcgatgtcgttaccaggttgcttggggccttgaataataatcggcatcattatgtacttcctcttcatgcatagccagggggggaggttgtagatacacatcgtaacgggccaagtgctatggccgctgctcatctctccaaaaggattcatgccatccgtactcaaaccaaaccgtatgtttcgtgcgtcctttc

SEQ ID NO: 10787 - DNA, 756 bp, Oryza sativa
acttgagaattttcgtatcaatctttactacacatggggcatggtcagagatattcctagttagggggagaacagttgtattgcggaaggttaaagtccatgatgcagaggtgaaaactcaatcaagtctttctagcaaatgattttgttgcatattgctccaggcgacccttctcccttgtaaagggtaaggcttccgctacccagctaaaggctatactcaaaaagaaggcgaagatttctttgacacttactcacctgttgctagattgaccacaattcgtgtgctactttccctagcagcctcacatggtcttctcgttcatcaaatggacttctcgttcatcaaatggacgttaagacagcttttcttaatggagagctggatgaggagatctatatggatcaatctgatgggtttgtagttgaaggtcaagaaagcaaagtgtgcaaattgttgaagtctttgtatggtctgaaacaagctcctaagcaatggcatgagaaatttgacaaaacattgacatctgcaagctttgcagtcaatgaagcagataaatgtgtgtactatcgccatggtgggggtgagggagttaatttgtgcttgtatgttgacgacatcctgatatttggaacaaaccctgaggtgaaaaatgaggctaaatcatccttgcctcaaaatttgaaattaaaggattgggcatagctgatgttatcttaaacattaactaacttgaggggagaatgggattacac

SEQ ID NO: 10788 - DNA, 559 bp, Oryza sativa
caccaaatgttcgggaataacttgaggtatcaccgattgatctggttgcacattatgaaccaaatgctctgggacaacttgatttgcagcgtgctgcctcggctgattgtcgggcgtcctgaacccagccgatgcatttaggaaaccttgctgctgaatcggctgagcaacttgctgcctcggtggcgtctgctgaatcggctgctgttgaactgggtcagcagtaggctgagttggtaaaaacatagctgcaacttgctcttgagttagccgattcacattttgtccactatgctgagactgctctctcaccaacaaccgaggattgattagttgacctggtgccgatgatggtccagcaggtgcaggagccgatactggtgctgttggctgagctgatggcacattgggagcaatcggttgaccagtcggctgattattagtgatcaagggccgatagtttgggaaaatacctcctggcaaataaaccggtcctgtagcctgatactcagctattgagccatcaaccatcgacttcaccatgtttgacaaggtattg

SEQ ID NO: 10789 - DNA, 1331 bp, Oryza sativa
  unsure (1)..(1331): unsure at all n locations
cgatgactgagccggttttgaaaccctaggccagtatatgctccgaagatcgtctctttgacagaaccgatgagaattgagaaaacgccaaagctgtgccggagataacaatagtataaatcttgaagtggcgttgccactttgtttcattaatctctgcaggttaaacaagacaaaaacaacaaattaattaggcaaccgtctcgcgggtttagcccggccccctactaccagcttattatatctcgcctccacgtcctcgtcgctcacaacgcgacacactcccaagcacacacacagagcgcgcgcgcgcgcgcccatgcagcagcagcagcagccgcgcatggcggacattgacctcgacgccgtgcgcgccgtccgcgtgctcggccgcggcgccatgggcaccgtgttcctcgtcgccgcggcggcggacgacgccgccggcggcggggcgtgctactacgcgctcaaggtcttcgacaagaggtccgtcgtcgcgtcggcggcgaggcagggggacgcggcgcggcgggcgaagtgggaggtgtcngtgctgtccgggctcgcgcacccgcacctcccgtcgctgctcgggcgcgccgagacgggcgacctcgtggcgtgggccgtgccgtactgccatggcggggacctcaacgagctccgccacgcgcagcccgaccgcgtcttctcccccgcggccatcaggttctacgtcgccgagctcgtctccgcgctcgccgagctccacgccgccgggattgcgtaccgcgacatcaagcccgagaacgtcttcttccgcgccgacggccacgtcacgctgaccgacttcgacctctcccggctgctcccgcccgtctccccctccgcgtccacctccacctcgtcgtcgtcgtgctcggccacgtcgtcgccgccgccgcagctgcagggacatggccggagccagctgaggcgaatcttcgcgagaagtgagtcgtcggtggccgcgacgacatcgacgtcgtcgcccgggcagtacacccacaacctggcctggttcctcaagagaagcgacggcggcggcggcgccgccgaccacctcaagaaggcgaagtcggcgagggtgtcgccggtaagccgcggcaagaagcaggcgagcttctgctcggccgcgagcgcgagcggcggcgccgccgccgcgtgcgagaggtcattctcgttcgtgggcacggaggagtacgtggcgccgaaggtggtgcgggcgaggggcacgagttcgccgtcgactggtgggcgctcggcgtgctcgtctacgagatggcgtacgggaggacgccgttccgggg

SEQ ID NO: 10790 - DNA, 615 bp, Oryza sativa
ggatgtttccttttcaggcattgacaccccacatgcaaacactggtgaaagatatatcaagtccaaaggctgggagtttgttgggacctgctttgggtgatcagcaacaagggaacttctccattcatctttggaaaactgctttccaagatgccttcagcagaatatgtcctcttcgtgctggtggacatgagtgtggatgcttaccagtgttggcaaaactggtatgtttaatcattgatatttaatttgagaagaataatcatttttgtgaagtttatgcatgagttgttttattattgtcaggtgatggagcactgtgtagctcgtttagacgttgctatgtttaatgcagtcctgcgtgaatctgcaaatgaagtaccatctgatcctatatctgacccgattgtcgactcaagagttctaccgattccagctggtgacttcagctttggatcaggtgcacagctgaagaactcggtatgtgcccaaattgcaaaacaactacgttcttagtttaaaaccacttacgttggaacgtttcctgtaactgcatgaagaacaaaccagaacatgtgttttaaatcatctcttccttgcaaacaaaaccaaatg

SEQ ID NO: 10791 - DNA, 1103 bp, Oryza sativa
cttggatcgagtacccaaaggaaaaattgtcttccaaaccaagtctccaacttgaaacaactttcctttcacccttttgttgtatgccttggccaccctcttcttctctttctctatctcctccaatgccctcaagcgcttgtcgatgacttcatcaagattatctcccatcaacgtcttgtaatcttcacttgacaaatcatcttgcttgatataacgaagagaaccaagatttacctcaaccgataaaacggcttctttaccataaactaactcaaaaggagtgactttagtggcaccatgtttagatatcctatgcgcccacaatgcttcggaaagcacctcatgccacctctttgggtgttcctcaatcttcttttttactagcttcaacaatgtcttattactcgactcggcttgtccattagcctaagcgtagtaaggagaagaactcaacaatttaatactataagattcggtaaaactcttcacttcctaagacataaaagaagccccttggtccgtagttaatgtttgcggaataccgaatctatgaataatatgcttcaaactacagtcaataaccattcatatgatgtcatatacttcaaaggcacagtttctgcccacttagtgaagtaatccgtaacaactagcacgaacttatgcccctttgataatgaaggataaatttgaccaacgaaatctaaagcccaccctcggaatggccatggtttgattatgggattcaacacggcggcgggcgccaattgaacattgccgaaccgtagacaagcctcacatcctctataatatttgaagcaatcatcaatcatcctccgccaatagaatcccgctcttctaagcaaccaattcatcttgtgggccgattgatgagttccacaaattccttcatgtacctcccccatagccactttagattgatcttcatctaagcacttcaacaagacaccatcaagcaatgtgtatttgaacgattgccgccgaattttccgatcaaccttaagtgtgggatccttcaaatattgaatcaaaggaattctccaatcttcttctgtcacctgggcacaaatgtccgaatt

SEQ ID NO: 10792 - DNA, 527 bp, Oryza sativa
cattatggctggcgctgaggtcccagcccgcaagcgaaccagcaggctgctggtctgggccttgggggttgcggccaagtcccacctcagcgccaggtgggctggcgctgagtgtcccacggtcagcgccattatggctggcgctgaggtcccagcccgcaagccatccagaaggcttgctggtctgggccttgggggttgcggccaagtcccacctcagcgccagtccggttggcgctgagtgtcccacggtcagcgccattatggctggcgctgaggtcccagcccgcaagcgaaccagcaggcttgctggtctgggccttgggggttgcggccaagtcccacctcagcgccagtccggttggcgctgaggtagctgccacgtcagctggggatcggcccggccgccacggtggcacaatgtcagcgccagtcccgttggcgctgacacagccaacgtcagcgccaatgtgtttggcgctgaggcgacggcctatttttggttgaagtttttggcagtggttagt

SEQ ID NO: 10793 - DNA, 619 bp, Oryza sativa
ctgaagttctctcttaccattaaaaatttcttctttcttctaaatgtgtgacgtaccgggagcaacctccggtgacccatgtataccatctttcgtgatttcttcagccaccggtttcgtggatgttccttgcaatcggagcatgccttctttccttttatagtttgtccggaaagattaccgagtgcagggtagtcattaatggtgcagaacaatagaactcttagcttgaagttctcctgaccatatgcatcccaagtttccacactttctttccaaagaatctccagatcgtcgataacaggctccaggaatacatcgatatcattgccgggttgccttggaccttagattaacaagcacaacataatatatttctgtttaaagcataaccatagcgggaggttatagttcgcaataagaactggccaaatgctgtgagtactactcatgtcaccgaaaggattcatgccatccgtacaaagacatatcctcatgtttctagggtcggcagcaaagtctttgtgttctcgatctatattcctcattcaatcgaatccgctgggtgtctaagcataccatcacttccttctttccgtggcgtgccaacgtactaact

SEQ ID NO: 10794 - DNA, 2304 bp, Oryza sativa
atcggaggtgcctaaaaggtttgcaacttcatcatccaatgttttttttgtcatattacatttgcacctatgttttgcacacttttttgtctccaaaatttagttgtaagttgatgagagagaaaatttgtgtggggaagaaagaatatatagaaatttagttcatttgctaaagaaggttttataaaatagttgagaaggaaaactctagtgaaagttaatcttaaataatagaaaacaaactaaaatgaaaattaaaagaagtaaaacacattaaaattagtttaaaactttacaaatagtttttaagaattatttggtgtaatattttatgatttttgtatgaataaagatatcttataattattgtatgactgtcattattgtaagaataattatttgtgtacggtttttttactcatgtagatgacggcgtgcactatttttttactcattatggatgtacgctgaccggcggtccaaagagtttattgacggcgtgcactattttttgagagtggccgaagctaacaggcaaaggggttttatttgttgtccatgcaataagtgtaagaatcaaaaggagtattctacatccaggactattcatttccacctgtttgagtcggggttcatgccaagctataattgttggacatcccacggagagcaaggtgttgaaatggaagaaaatgaagtggaagacgacaatattccggactttgctcagtatgttggatttgaaggaaataaaacgggcgaggaggaaatagctgctgatggcaacgacgttgcggatgatcttggtcagatgttgcaggacgccagggaggacagcgaaagtgaaaaggaggcccataaattggacaagatgttggaggaccacagaacttcgttgtacccaggttgcgagcaggggcacaaaaggttggataccactctggagttcttgtaatggaaggcaaaaaatggggttagtgacaaggcatttggcgatttattgaaactcgtcaagaacattcttctggggggaaacaaattgcccgagacaacgttcgacgctaagaagatagtctgcccgctaggactggaagttcataagattcacgcatgtccgaatgattgtatcctatatcgcggtgaggagtatgagaacctagaagcatgccctgtttgcaaagcactacgatacaagattagacgagacgatccaggagaagttgacgggcagctaacaaagaagagaattcctgctaaggtgatgtggtatttccctataataccatggctaaggcgtttgttcaggaacaaggggaatgctagaatgatgcgatggcacgctgaagagcgtcaacaggacgggatgctgagacaccccgccgatggttcgcagtggtgaaacatcgacagaaaacttaaagaatttggaaaggacgcacgaaacatacggtttggtttgagtacggatggcatgaatccttttggagagatgagcagcggctatagcacttggcccgttacgatgtgtatctacaacctccccccctggctatgcatgaagaggaagtacataatgatgccgattattattcaaggccccaagtgtcacaccccgaagttttcctcccaagccaaaattgtaatttataaatgaccctaagaaaataccggtgcaaatcaggagaaaaccctaagaaagtaatgcaaataataatcggatttgacatgtggaactttttcttgagttctacaggtcgaaattcattaacaggatttttagtggaattttcagagctctagaaataattttaaccaattaaaattgagcaagcaatattttaattccagggaaaatcctttttcctttttctttttctttttcctctctttttcctcctttctttcgaatgggccgccggcccattccctccttccttccctcccccttactgggccggccgcaggccgaggcccagccaggcagcccgccgcctcctctctcggggtcgccgacaggtggggcccacctgtcgggcccgtctccctcctcccgccgatctcgcgctcgcgccgccgcgccaaaaccgccgccgcgcccacgtccccgccttccccgggccacgtcgaccacgcccgcgcgtgcgccgcgtctcccgcgcccactcccctctctctcccgctcgcgcccgcgcccgagatggccgggattcgattttcgaatccctcctctctctcctcccccactccccacgtcggccggcgattcccgcctctcccggccacgtccggttctctctccccctt

SEQ ID NO: 10795 - DNA, 1415 bp, Oryza sativa
ttaatgtattggaccagtctccattattcactgaaatgatacaaggaagagcacctcctgttcagtttaccataaatggtacacaatataacatgggatactatttaactgatagaatttatccggagtgggctgcatttgccaaatcaatcaccaggccccgaagtgctaagcacaaattatatgcccaacgtcaagaatcagcaagaaaagatgtggaaagagcctttggggttttgcaaaaacgttgggccatcatacgtcacccggcgcgtatttgggaaagggaagagcttgcagatataatgtatgcctgcattattttgcacaacatgatagttgaggatgagagaggctcatatgatataccggatgacaatacatatgaacaagggcagtattatcctcaaatgacagggcttgaccatggaccaatatatggatttcaagaagttttagagcaaaacaaggctatccatgaccgacaaacacatcggcgtctgaagggagatttgatagagcacgtgtggcagaaatttagtggtcagcaacaataagattagattttaataattccatatcaaccttgtattttactagtttaatttgtctttaccaatttagaatctaaatgtttgcttccaaaagtacttgtatttgtatgtcaaatgtattactttttatcagctacgtattccaatagggactatgtacactagctagttatcttgcaatacctacaaaaatggattgccttttatttctgaagaactatatatatgttctgtatacagctagtagactgaagaaaaaaggagagcaaaactaccaacagagaggcaaaatgtggttcctttttcctgaaaacatttgaacaggaaacaactgtgttgatacatagcaacaaggttacttacaccaacaccaatgcactggtgtcaagtatactcccctgcagctagctgatcgagaatcgagaatcagctagagccctgacaaacatatactccagtagctatatcgaatactattgaagttttcagattaatcaaactccgatgcttacttttgattagtgttgtaagaattaaacataattatatctcatcatcatgtagcttgtatttttgagaaaaaagacagtcggttgctgttaacaggccggcaacatagcaaatagatatattttggatggcaagagagttaaattaaattttctgcaacataatatttagcaagaacataaaaggttagtgctagctacatccgttcgtgatgtagaacagtagaaggttaatgtagctacctgttttaaactgctgtatgcagggctcttatggagtggggaaacctagtgttgtgttctttacttggatagaagcacgaaccataacacagatcaaacggtaaaacaa

SEQ ID NO: 10796 - DNA, 7814 bp, Oryza sativa
cttttagatttcatattgttcagctattttgtttgtttacaacaaaatggaccatatccaaaactgcaacaactctatgcatggatcaatgatgctatataatcaggtaagtgtaattttgatcagtcttttgaattggtatccggaaattttgtgagcgctttagcatctttttaacctcataggtgctgctagatcaatagcattttttatctctctgtagttgtcgaatgaaacttcacaaatgtggatgtgtttttttttttcaaataatgagtggtagctgctacaagtatatcttcctatgtccagatccatcatgtttttcattgtcaatttgagtggaagctattctcaatatttttcttgactgcataggtcccttcttttttggcctcatagatactgctatggcaacttgattttgtaaattactcacttgacaacgatatggtgagagcttaaatatcttttttttacatgtgattgttatttaaatgcttaatatgtttataaggccagtcccaacccaagaaactagacatagtttccataaactctacatcatcaagaaactagtactatacactactttttcaatgcaaacaccactttttcatgcttaaaattaatgctacttatctcacatgatgtcttaaatgctgtgtagaaatcatgtctcatgcaagaccctcatttattcacttgccacatcatcttttactctaggtggcagcttatttaatgctatagacaccatcctagtcattaggttgggaatggcctaagagcaggaacaattgtagactattagacagctgtaaatatattttaatgagatgaaagatgagggagaagagcagccggctatagatctgtagccagctgcagcacggactccaatacacaatgtgtgtatgacaggtgggaccatataacagtatagtaagcaactattttatgaatttactgttagattagctaaagatgaactggagctagtagtgggctatactattaaacttgctctaatagagctgtttgtggaggtggttggtcccgagtgcatcatacccgagggatgagggatatagatcctctaatcttcttatcatcggcttcattttatcaagcgttattatgctagcactcatcaattcatcctttcctcacatactacgtgttttagctataactatcaattttatacatgatgccaatactcttatctacaaaatcctgttattttacctattatattagctaggttgattgtacaaattactaaacagaccgcgaaagtaatcatataaaatcctataaggccctgtttctttcagcttgggattattataatccagattattaggagtaagctgaaagaaacagacaacttattgaagtagcttattataatctggagctcagcttattataatctgataagctcatttaggtaagctttttctagattattgggtgaaaaattacccaccatgccatcccacttcctctttagacctgcaaacccaataatctatgctctaataatctagaaaagaaacaactaaccacttattctactacagattataacaatctagcttatagtaatctgactcaataatctagattataataatcctaatctgaaagaaccagggcctaaagctcatgtcgttgctgtacactgttcactcgcccgcgcggccacgtcacccaaaaaagcagcgccgtccgatgccccgcccagctacgcgttcgccatcgtatcaggccaccgcaacaggcagtcggtcgtgccctaatcccttatttcctctccccttcccacgctccgccgccgccaccgcgattcctcgcattcgtccccactccccagcggcaccgcatccgagccagcgcgacctcctcctcgagccagtggtcgcccgcccgcccgccgtcgctacctcctcctcgagccagcggctggcatagatccggttgtcgatgtggttgcagatcacggacgacgtcggccaccaggtggatgaggtcgagggaggcctggcggcgctgagcaacgatgtccaggtatggtgcttcttctccacctctctccctcatctcaggtcagtcccctctctccctcatctcgcttcttatcctgcttctccacctcgacctctgacgacgaccaccactgcgatggggacaggatgcgtcagatggtgctctccgggccgggatccttctctctcgcgcctcggtgtcgtcgacggcagcgtgaggaggccacggggcacaggatggagcacgcatgggctagcgagaccgcgaggtcgtcttaggtcgtcgtccccgtctcccccgagctgccccgttgtcgcttcttcctgtgagctctgttctttgacccaacaactatttggggtttagtctgtggcaagtgttctgctccaaatcactcgagagattggtgtcgatctgtaggtatgattgactgatttatgccctggattgagagagtaatatgtaattaggtgctttcttggtcattttttcctggggatttaactggcatccgtagatttcttggatttgggattgatttactgcttgattcgaagctctgtttcgttaatataatggcgagaacttgaactccatctatttaagacatttttttttgtttcagctctctggatcaaattaatctgagggtctcttgattccaattttttcatccaggatgctgctgccagtacatgcgttgcagctcttcttttccttctggatctggattttaatccacatgtctgccttttgttatttttaattattttgttcgattgattagtctcatcaacctttactctacaaatgatgatttacatggtcattattccatccagaagaaatgcattgactgttttacatggcaaacttattgaagggttgtgttctatctcgaccaaatgttctcaaattattttgcctgctgctgcattataatactcacaagctattttactatcatcgaatcctcatccggatacccagctgtgtttttgttgtatagtgtccaatggatctctgagcaacccagttatactagaacaaaatgaagatacacagctttgttattatttcgttaaatacttgcagattccatatttcttcacaagctttcattttctttactataatcttacaggcaggacacatgacttcgatcatggtttagcatcatctgtcttggaatctttggaattcctaaagctaaattgatcaggcactcagtgtcctatatatgcagcagatgaaatgattcaaaaacataatatacaagtatccgttgttgattagtccagtgaatattgtcgtagccacacaggtaaccaaaactgcacaaaaagctgcacaacaatttcacttggttttagttttcttattgcttttgcttatataagagttagggcatattacaaatagtaattattagctttaaatcttttttttacctaatgatttaactggaggaaaagttcaagctagctactgcagataatcagttttgctttaattatcttgatcagtctgtaagtgataacctgttttggttatgtttaattccttcattattaactttggttggaagttcaagcgttaattaaagtttcattggttggttcattcacattatcatgccatataatcctgtgacaaggcatatatttctagaggtttgtccaacatatctaaaattctgtatgggtgccgtgttgttcaagagttgtgttcttttctgccttagtaccaacagagttccgctttatggttcacttcacaaaattttctccgcatgttgtttatttatcttaaacgagcaggatggaatgcttcataggctgcttcaaggaatgggaggtaaaaaatgtgactagcaatcctatagttttggttctacatatatgtaatcgctgtacatatacgcagttaacttgctgctcactgatatttgtttttctggtcactgatggatgcttatattatttgtttctcaccgatatatctttcacgtatgatagttcattttagactaatttgtcattcaaattttatttcatacagataggcaagtcctctattttccagattaatacgggggagacatcgaaaagatatgcacctcttccttctttgtacagctgaagtaatgccttatgatagcacaccaaccacatgcaatttcttctaatgaacacacaattgtttatactttgctacatacagtggacagttacacctcaaatccctcctagaataaatcgaatgaaacagttacataccagtctgtactatgacatcagtatggcccttttggtctgtatagctgtcattattgtaaactatgcactatgtgtacatgtgcttaagattactagctacctattcatgttttcatgctatattatggtatgacatgtacattcattgtacaaataccacactaaaacttttttccttccgtgttcaggtacatcttgaacggcagttaatttccaaactgaaatcatgtttcttcaggttcaaagaaaaaaaaagccatgtttctggaaattcactttatttgattatcaacaccctttcacactgttaaattgtttgactcctatcatggatatagtatcaatacatgtactctattattgaacgtgtattactgacactgaaagtttctattatttcacaattcctattatcttcttcgttctaatgatttcctattattcaccatgcgatttttaaattattgcaccatgtattatgctattgaacttattaaattacatgtccttgcagaagaagttgacattggcattgtgcaagctctattgatgctatccaacctccacataaacattgtgccttcttttggtaatatgggcgctttaggcatagacctctgtagggatcttcatcctgtagtcaacggttatgcattcttctaattgttgtatattactcttagtctggtggtatatatgcagaaagatattcatacccttaccataaccccaaaaaatgtaattgttaagataaatgaaaatttttcaagatttattgtgacttagaacttcaattttcactttagtaatgatatctcactttcatggtacaaatctatatataaagatttgtactttggtatatcttttagtcggtgtaatatttcttttgttataacaaatttgttttgcgtggtttattgtaaaattagtgatgtaacaaataatgtgcccgcgcaacgcgcgggccgggcatcacctagttagggcacccacaatgttgtaaaaaaccaggtagtaagcattaaatggttgcttactacctggtattagtcattgtgggagtagttcattcttaaagccaggaagtagcgctgctgccggcaagaagggaataaaaaatgaaatgtgtacagtggagttctgacaaaaaattttaaattgcaagtagccgttgcttcttccaaccgttgctctcctccccagccaaccgttgcatggactgttcttcttgccatcttcatctcctacaaaaacagagatggctcataatttctttgaatcaacacaaacacattctgtgaaacttagctagctgagagcttgagatggatccctccaagagaggtttcatgaacttgttaaaccaaggctctccaagccaacaatctagccaaaactcccctcctactcaattcccctcaactttctcccaatcacaatttccccaatccccacattttacccaagcctcaccacctaatttccaaaccttcaacccttttggtcctccagccaactatcacctatatggtagttctcctccaaactttcaaggttttctgcagcaagcaagctggttacaatctgcaccaataagctttcaaggttttcgtccccaagaaagttggatgcactcaccaaatcaagttgtcgggtccgcctcatctcatggatccaaatcagcctctcagtgccctgcaagacaggaagagaacaatttggttaacatcgaagagtcaagtgacaatagccaagagacagggagaagagggacacacgtcaactggaccgaagaagaaaacttacgactcctcagctcttggttgaataactcactagattctataaatggcaatgacaagaagggagaatactattggagggatgttgctgcagagttcaatggtaatgcatctagcaataaccgcaaaaggacagtcgtgcaatgcaagacacattggggtggtgttaagaaggacattgcaaaattttgtggagcttattctcgagctagaagaacctggagcagtggattctctgatgatatgatcatggagaaagcccatgcattatataaatcagaaaacaatgataaaacttttacattagagtatatgtggagagaattaaaggatcaaccaaaatggcgacggatacttgaagaggacagcaagaacaagaggactaagatttctgaatctggtgcatatacatcatcatccaaccaagaaactgaggaggagaccagccgaaaagagaagcgtcctgaagggcagaaaaaagccaaagccaagcttaaagggaaaggaaaaaaacctgcaccgtctcctttgggggaccagccatctcaagattttgttctcttcaacgaagctgtaaaattgagagcagaagcagtgctgaaatctgcagaagcaaccaccaaatcagcggaagcaaagaaggaacaaactaggatggagaagtatcagacatatttaaagttgttggacaaagacactgccaattttagtgatgcaaaactcaagaggcatgaagctgtcctcgaaaagctagctacagaacttgcagaagaatagaagatccctaagttatgtttgtacccctagtacttagtgtgtcactgtttcattaagtttaacttgctagtaatatttagacttgtgataggtttgtagggcaagtaattgttgtattgtgaactcagtgaatgatgaatgtaatatttcactagtgagaaggcatatgaagtgataatatttgcccacaatcataatatgtctgaaccttcttctctgtagtctctgatttgtcccataacaacagcaattcgtttcttaagcagcctgcagaaaaatatacattgataataattagcacaacattttataatatggtggtttgaatagatagaaaaggaaggtatggttgtttaaaatctagctgttagaatacatccaaaaagcaagacatggttgtttaaaatctagctgttggaatacatccaaaaagcaagacacagttgtctaaaatttagctgttggaatacatccaaaaagaaagacatggctgttcagaatctagctgttggaaactagccgttgcaatggaagcaaaagcaaggcatcaatgttacacatagctagcaggatgaaccatatataaataagacatgcacatcacgaaggcagcattccccttcctttccttcaacttcttaccaacatagcaacccatctccaaaaaagatgtccactgagtcacaagataattctagtcattccgatgagtccatcactagtgagaagcttgatgatatgacatgggaagaaattaatgaccctatggaagctcagcttgaagctcggttggaagctcaacttgaagcgagattgatggctcacctagctggtagctctaatcagctggggggctacacaaggaggtacattagtagagatcatgaagatgaccaca

SEQ ID NO: 10797 - DNA, 3886 bp, Oryza sativa
ccctctcgccgagataagcattgtggatagtgtcttctcctattaccgcctgtgactgggtcccacactaatactcatcttgataatatacattggtgttgcccttagagaataaaattatagcacctgagtcgtaggctagtggcattccgttttcaaaacggatgacccagatgcctctgagtactgtatagcaattaactatgaaaaataaaatagtacggttctgatcgttggaccatatggtctctagtggaatgaaacgttttgcatttggagggaagacttttttcatattggggcacctctctatgcggcaccacctgagacattgccaataccaatcccctggcatacttgtgatagtcaagacatcgtgcacatgcaatgactcggacacccaacctattaggtaagctaaagtaggacgaaactaccaatttccatcggattcaccctccaagttgtggctcccttgagcaatctcgaaatgacgcgcggctcaagtttgtggttggaggatgtgggaaagactgcatgggggcatccccaaccttgcgaagtacatcttggtactggactgctggaaaagattgttgttgtagattaacttgatcatttatttgtccattattatatttacaggctccatgttgaacaactccattatacaccgttgatgcgatggtatggatattgaaaaaaatatcacgagtaaagtgtacgggcagtccttaaacttgtagtggtgtgtcatctagatccctaaactctcaaaatacatattcaagtcctagaacttatcatagtgtgttatctaagtcccaaatcgccacaaccccttcaggatcctgcgtggcgttgatgtggcatgccacacggaatgatgtggcatcgttttgactgacaaatggattccatttaaaattttttctttttcttttttttcttctctctttttccctttcttctcctttctctatgaccggagcagaagaaaggaaaaaaagaagaatgagaagaaaaagaaaaagaagaaaagaagaaaaaaagaaaatgacatgtcacgtccatgtggcatgccacatcagcgccacgtaggatcctaaaggggttgtgtcgatttaggacctatatgatacactttgacaagttatgagacctgaatatgcattttaagagtttagggacatatatgacacaaccctacaggtttaaagtaccgcaaatgatatcattatacatggcccttttatttattggatcacacaaggaccgagcaagtcttacatcctcaataacagcttggatttgtaactggaaatagttattattcttgttaaaagatggttgaggaagttcaattccaggccttaataaatttatatattcctataaatttctatcattccaaaggatccatcaatgttgcaatttttttcttttactgccatgaacaagccacggcctatttattttaatttctttaataggttgagttctttttattattttctaaaaactttcatagaatatatacatttgtgccaaatataaaaactttaaggtcggacataaatattaaggaattatttgagatattgtgattggttgagaactatacggagaagctaaattagttgagaagataatatatatgaagaaatcatattcaatgctatattttgggtacgtttcggtttcgttggaatggctccaaaatcttcccggtatttcgtcgagcacctgctctgctaccgtcttctccgtcaacatcgcgcgccggcgccgcccacctcagctccaactcctccacaactggccaatgcaacgccgccatcgggggccgcctcgactccggattccccgcggcggccgtatccaccttcgccgcgatgctccgcgccggcgcacgcccggacggctacacgctcccgctcctcaaccgcgccgcagcctccctccccgccagccgcggcgaggccgagctcgtcggcgccgcccacgccgtcggcgtcagggcggagttcgccgccaacgtctacttctgcaacacgctggtggatgcctacgcgcggcgcggggatggtcgcgtgcgccaggaagctgttcgacgaaatgcccacgcgcgacgtggtttcttggacgtcgctggtctcttcgcatgccggtgtctgggacgtccgggaggtgtcccgggtgttgtactacatgcggctggacggctgccagccaagcgccgtgactctcgccgtggtgctccgcgtgtgcacggccaaatagaacgtcggcggcggggggcagctgcactgctacgcggtgaagatcttgacgcacttgtgcaggatggcagcctcggacgacgcggtggcgctgttccagcagtctccgagaagagatgcaatttcttggaacattatgatctcagagtattcttcggaagggaacatttccaaagttgccgaaatgtatcaaaggatgagaagagaggaggtgtgtcctagctgccagaccttaaccacagtagttgctgcattcgccaagtgcaagtgtctccgagaaggtgagaaactgcattctttcgcttttaggagctgtctcagcgatgcaattttggtggagtcctttgttgatttttatgccaaaatgcgacagattagattgatcagttcagtcatttgaagaattcagcgacacaggcagttgcatatggtcagccatgaattggagctttatttgctgttggcagtttatagaagtaatacatttgtttgggcgaatgttaaattctacatttgttccagtgcgttgagctgcaaggattagtcatcagttacagagaacttggtgcactacggctaggtaaagcaactcatgggtacatgataagaaacaattatgaagcacaatctgaaaagagcgccttggtgacatccatcattaaactctatgctaggctgctagctgtgggagcattaatttggcacgaaggtgctttgacagcatccatcagaaagatattgttgcctggagttcaattattgaagcatacacgatccatggctatggtatggaggctctggaaatctggcattgttccacatgatgctagacgaaggaggaaggccaaatggggtgactttcctgagcttgttgtcagcatgtagtcactccgggcttgttaatgaagttcaagagttttttgattgcatgacaagaacgtttggcatcacacctgagcttggccatcacacctgcatggtggatgttcttggacgatcaggcaacctagatgatgctttgcaagttatcagtgatatgaatgttaagccagatgggagaatttggggtgctctccttgcttcatgcaggacatactcgaacagtaagcttgcttcttatgtggctcagaaacttatgaaattggaaccaggtaatgttggctaccatgtggtgttcagcaatacccaagctagtagtgatcagtgggatgaagttgaaagcattagaagctctatggtagagatggacctgcaaaagctgcctgcatggacttgtgttgctgagactggtagcccttgatttgtatattccatctcttcccaaaacttatgttgatttggtcagaaaatgaccaaaagatttgtggaagttgctgtatgactatattggactgaactgtatcaactgttgatctttcagggtgtgagattgaagtttctattgatgggccctgtagccagtgcactgttctttggagccgatcacctcgtgaccgccgctgtcaatgggggttgttcgtggcaggcagagttcagctgcttgctcgagggtcaaatcggtcggattggatgggatgcgaatatctggcattactggccgtgaa

SEQ ID NO: 10798 - DNA, 2791 bp, Oryza sativa
aacttattgtaagccatccttgaaattgttatccatattccttactgcctgagtctattatttataggatcgtaaagggccttttccaccccaaaagctagccattaaagtgaggggctcccccacttatatcttaagtcctttgcccttccacaaccaatgtgagactattcaacaatctcccccttcacacattggtgtccctcagcccttcaccgccccttcactgtattcgggccccaccgcccacggtccatcaggtatacgggccccgcaggcacccacggtactattcaacaatctcccccttcacacattggtgtccctcagcccttcaccgccccttcactgtattcgggccccaccgcccacggtccatcaggtatacgggccccgcaggcacccacggtacatcaggccttcacacgtgtccatcgggtcagagatgttaacctagcctggctctgataccaattgcaggatcgtaaagggcctttcccaccccaaaagctagccattgaggtgaggggctcccccacttatatcttaggtcctttgcccttccacaaccaatgtgggactattcaacattatctacgcgtagtcaattattgacactgcttagagatgaatttcttggaacattatgatctcagagtattcttcggaagggaacatttccaaggttactgaaatgtatcaaaggatgagaagagaggtgtctcctagctgccagaccttaaccacagcagttgctgcatttgccaagcgcaagtgtctccgagaaggtgagaaactgcattcttttgcatttaggagtggtgtcagcgatgcaattttggtggcatcctttgtgggttcttatgccaaatgcagcagattggcctcgtcagttcagttgtttgaagaattcagcgaaacagacagctgcatatggccagccttgaattgggggttcatttactgtggacagtttatagaagtaatcaatttgtttgggagaatgttgatttcttcatttgttcccagtgttaacatgctgcaaggattagtcatcagttacagagaacttggtgtgctacggctaggtaaagcaactcatgggtatatgataagaaacagttatgatgcacaatctgagaatagtgccttggagacatccatcgttaaactttatgctagctgtgggagcattaattcggcgcaaaggtgcttcgacagcatccatcagaaagatattgttgcatggagttcgatgattgaagcatacacgatccatggctatggtaaggaggctctggcattgttgcacaggatgctagatgaaggagtaaggccaaacggggagaccttcctgagcttgttgtcagcatgtagtcactccggtcttgttagtgaagctcatgaattgtgacaagaacgtttggcatcacacctgagcttggtcattacacctgcatgatatgagtgttaagccagatggaagaatttggggtgcgctccttgcttcttgcacaacacactcgaacagtaagcttgcttcttatgcggctcagaaacttatggaattggaaccaggtaatgttggctaccatgtggtgttcagcaatgcccgagctggtagtgatcgatgggatgaagttgaaagcattagaagctctatggtagagatggacctgcaaaagctgcctgcatggacctgtcacctgtgtttctaagaccgttagcccttgatttgtattttctatcacttcccaaaactcatgttgatttggtatctatggaagttgctgtgtattgagtatgttggattggccaagatgtctcactgtatcaactgttgatgtttcagtgtgagagtgaagtttctatagatgatcaggcaataaaaggtcctcgactcctcgttgaatgataaaacattccagccttcttggtaacttcagggatacatgtaataagaaaaccattgtaaaatttcagtatcgacagttaccagtgcagtcagcacactacctgttaacctgcttgggagcagtaacagaagccatctagcttgttgaagagctgaagctgtaagtccccgctaaccttccattgattctgcagatgcagcagcttgggtacttcacatttgcaaggcgcagatcgaaaatgaagagctgctgtgaagtggcaggagtgtggtcatggtgtcactctcacaagccaaggtggaggccgcaattacggggcgtcgcagaccaaggccactaggctggcatgatagcagagttgaacaagacctgtatgacaacggtaaaatttgtcgattaccagcccaccgtgccacatatttggagctcgtcatggaaaattttgtggcttataatttacattggttttagacttaaaaccatgtttaagcggcttcttaaccatattattttatggagcaaaggaagaaccattcaaacttctcaagattcagtcaaattctttgaatcgaactgattctgtcccaacagaagactaggaatagcaggtgcagatgatgacactgtatacgagtggcactaatttcatccgtagaagattctatcccaatggaagaccaggaatatcgcacaaattttgtgtgccagcccaagacttaattttttttaggtcagattttttgtagcacagcaaggaaaattttgtggattatgatttacactggtttaggacccaaaacttaagcaggtccttaactgcatcgttctacagggcaaaggaagaaccattccaagttttacagattctatcccaa

SEQ ID NO: 10799 - DNA, 9004 bp, Oryza sativa
atagctattgcctttttctgatctgaatattgatcccatgttcttcagttttgtcagatttcagaatttataagttccaagtggcatacaaatagaaaaatagacagttcaatataattcccgtagatttaaactcccaacaaatggaaatggaatccgtctgttaaaattctatgcatccaaatgggggcaggaaggaatcagaaatcagaaacaggctatggtaaaaaaattatccccagtcatcatcagtaaagtaaaatatgagaaacaaaccgatgtcctaccagatcaaagtgatgcttaaagccatgattaaagtagcttaaatgctcctttcctgacatagcagtgacttcaatgcataaagtgtaaagattggcgagctgtttcaatcatctacatgtccagcaaatataatgtaatcagctacttgttcttcaaataatatctagtctgatgcctgtctccacttgtagatgacattgcagtgacttcaacgcgtgaagtataaacattgctgacctgtttcaatcatctacatttccagcaaataatatcgcccacagtttgtcttacaaatactgtttgtcaaatagtgtatgatcccaaaagtaataccatccacggtttgtcttaaaaatcctgcagctcacaagctctgaaactggttaatagaaggcggaaacacaaacgggctcactagaaggcgctcaatggttcttttgcgcctgttctcattcttaatcccatctggagctgtagaaccatcaggatgtgaagaaacacgatgagcaacagagtgggtatttcagcatcactcctagtaagtagatttcggtgttacagtaaaatttatgtcggatacacttcagagttggtttttgtagccttctgttgacctgctatgatccacttttttcttacctgtctgcacaagattttgattactggaaatgctttggcgatattggttttcctctatttgataagagaccatgatcttgtgcctctagttggtcattctgactctaaagctatttcaccttttggaccaaacagaggattttattttatatttcccctgctattattttttaaaaaaacattaacaataatagtatcacatatattgtaatttaacatgattgaactattatcttgtatttgtgtttttttatgttcttcactaatgaattagttcacagtaccatcaacttttgtttttgtatgctaggactgaagctgatgtgtagctattgctagtgctttgtgttcttaactaaaagcaaacatcatcatcgttgctatctatataataaccagatagaataaatggctgagtccgtgctccttatcgcactcggcaaaatcacggctgcactgggtgcagatgttctgcagcaaattcggaacctcttgccaacagaagtgtcgctatttgggcagctcactgggcgcatgaaccggatcaaaaaagagttgtttgtgattcatgcattcctgtcacaggccgacttgcagggtgttcagaccagaacagttgaagcatgggtggatgctgttaggaaggttgccttggatgttgaagacgtaattgatgagtacgttcatctattaggccagcaaaagtgtggatggttcacttcagtcaaaggaaaatttggaagatctcaacacctttgtttgtggcttcaaattgttgaacggctgaaggagattgagagagacctttggcacatctcggagatgaaagacagatggattcataccagtactgagctattgggcagaggcaatttggatggtgactatcattgtgcccttccatattcacctcagtgtggttacttcattaattcagatgatatgattgggtttggtaactacaaaatgttgttgatcaattggttagcacaaaaagattcgagtacttcggtaatggttattttgggaatggggggaataggcaagaccacacttgcttcaaatgtttatgagactgaaaagagtaggtatgattgtagtgcctggatagctacatcccaggtatataacatttgctctttgttgagaacgacaatcagacattgtttcaagaacacaaaagaaatcccacctaatgttgacataatggatcaacacagcctcattgttgaacttcgagaattcttaaaaggacgaagctgcttggttgttattgatgatgtctgggatcatgtatgtattggtactattctcaaggcgttttctcacaatgagcacagaaacaaaattatcataaccactagggaaattcagatagcaaagtttgtggatcaaagctatatgattcaaatggaaaaattagaggagagtgaagcatgggaccttttctgcagaaaggctttcctaaatgagaaagaaaagtcatgtcctgaagagttagtcggtattgcaaaggatattatgaagtggtgttgtggtctacaattagccctagttactatgggtggactcctgtccctgagagaaaaaaacaatagcgaatggaaacgtgtctacaacaacttgctttgcagttttgacaatgatccaggccttaatcatttgaaacatgtgctcaaccttagctaccgttatctaccagaatatctcaaagattgctttctgttctgcagcatattcctagagaacagtatgatcaagcggaagcacctgataagactttggattgcagaaggctttgtggaggacagggcaggaactacgatggaagagctagcgcatgattacttatcagaactcattcgtcgaggaatgttgcaggtcatgaagaggaacgagaatggcagggtgaagcactgtcggatgcattgcatcgtacgagaggtcacaatctcgctatgcaaatcgaggggtttccacatgatatggggcaacaaagaatcaacatctgcatatgaggcacgtcgttttgctatacatggaattaatcagtccagttccgaaatcctaactgatctaccacatgtacgcacattcctttcgtttgatgtcacaatgtctgacaccttgctgtcaagaatagtatgcagctctagatatttgacagtgttagatgtatcaggggcattatttatcaaggaagttccgaaacaagttgtatctctcttcaacctgcgttacttaggcttacgtaggactaaggtgaagaagcttcctagttctttgggaaggcttgcaaatctacaaacactggatcttcatcacagttgcataagtagactgcccagtggaataaccaaactagaaaagcttcgacatttgtttgtcgagacagtgaaggactccagttttcaaagtctgaatgcttgtagcggtgttggtgctcctagcggtatatgcaagcttaagtctttgcagacattgttcacaatagaggcaagcaagtgttttgtgcaacaggcaaacaaactggttcagctaaaaagcttccggatcacaaaagttagaggatctcattgctcagtgctgtctgagtcaatcaaaagaatgaagcagttggtgtacttagatatcttagctagtgacgaggaggaaatacttgacctggacatcagtccaccgccaagcacccttgagaagctttgcctgaggggaaaactgaatgattctaatctgcactctttcttcaattccttttgcaacaatctcacatgtctttttcttggttggagtagtctaagcagagaccccctcccattgttgtcccagatgacaaatcttgcattcctctggctccaacgggcattcgatggcccgcagttgaggtttgttctgggatggttcccaagattgagaaggctgcatctgaaagacatggaccatcttcattctttggagattgaagaaggttcagtggtcagtttggaggtgctggagatgactggtcttaatgagttgaatgatattcccggaggtattttctttctgaacaatcttcaagaggtgtacctcgattcaatgcacaaggacttcattaaccaccagagcgagggtgaaaatgttgaagatttcccaagattcatctacggccacagccccaacttttggagaggggaagatgtggcatattgtcaccaatacacatagagttcttcatccaaatttccacaaactagttcagacaagaaacaaccggtgagtttttaccgcatgatgatgctattatttttcatattctaacaagggtaacacaatcgggttacaatgatacacagttccacaaacgtacctaaacaactgattcaatcagaacttcagaagaggtaaatggagaaaatatagcagatagaatagaatgagagaaagaaccagccatttccctctctctcagagtatgttagttatacacgacaaagaagctgttctatatacaccagtgcaatacttagaattcgtccagttggtttactcgttttaaatttcaagaacatcccctgaagctgagatatttatttcaatttttagaattattaaaccacttcaaacaattctaaaaaaaatcagttctaaaatggaggatttagaaactacacaagtttgctctgtagtgaaatgaaactaatttatccctcagatttttattttatttttcaaacacagtgtttactggccaatataattatatttcatttcaattgtacaaaatttgtataggttagaaatactacctagcgcaagtgataatttgtttcaacttgtttgaaatcatttattgattttatgaaatttggaaagtagtccagacttttattctggatacgtccaaggttgaaaggtttttttgacttccgtgaggtggaatttcaaggttatgacataattaattttcctatttttccaaatatattgactgtggttttgatgtgacctaagttacagaattttcctagaggcacaaacgagaaaaaaatagtctaaatctacactaattcagtccacacaatggtctaccagactacctttaacggtcaacactgcactacaccagtgacatttgacaatgatacagctagtgcacacagacagctattacaatcgaaccggtgatcgaactgttaggacacttgttcactggctcattggttaaaccgatcaaacaaccggtttaaagcagttcaaatagatgtgtgttacagtagactctgtggaaacaaggaggtttgggttcgactccttcagttcagcagctttttcctatattctctaactccacgtgacgcccatgcacactgcagcttctgctcctccagcggtcgaaccacctccggtccagttcaattggttttcaccagatcggccgatgctgttctaataactaagcacacagactgatgcttcctactttaacaattttatttttcatgtttgtattcttcaaaagttgatgtgaaatgccgtttctttttatgtgatagaagtgaaaacccttgtatataaaatctatttgatatagacaattgagattaaaggcctccataccctaaccccgatcgagggatagtttgagcaccagatagcagaaaggagatgaacctcctctcttcaatagaaatagcaatgctcccactaattctcgtggctttactacagacacctctggcaactgcatctgtgagaaggcaagggtcaatcacagcctcccgtccatggcgatgcttgtgccagctgccccaagagttgcgggaacctgagcatccactacccatttggcatcggagcaggctgttctggcagcccgacttatcttacctgcgaccactgctggagatgcatcggagaaagaggcattagtgttggttggtaaccctttttttagtcctgttgtgtaatcggtatttttagtcctaattatacaatgtagaattaaaaactatctttaataccggttggtgttattaaccggtactaaagataattttttattttttttactgatggttgtttgctgtacatatatgtatgtatgtatgtactccctttgtttcatattataagactttttctagcattgcatatatttatatgatgttaattattctagatatatataaatttattaacatatatataaatgtgaataatgttataaagtattatataatatgaaagtatgtatgtatgtagataggtacatacatatatctgcatccatgttcttcattctctccatgaccgggtggtgttcgtcgactcttcttatcttggtcaacgcctcgccaccggacgggccctcaccctccatgcgcccgtcgctggcggcgtcgctgctcccgccgccgtagcaggaaatccggcgacgtccagaggaggcgccacgattgacgctgctggtcggtcggctgtgtcacagcaagtgcagctagctagctagcgtccgatgattttcctttagagatcaacagaagacacagaggtatgtttgtggttgctctcatcatcgcccgtggcaaacatacgcgcgcgtctgaatacatgagaagctagcatatgcatgccatggcgatcgagctcgcgtcagattgcatcgaggaagaagaggaagccgcggcagcccacactgcctcgtcttctcacccgccactgcgccgcccctccacatgctgaccgccgccgcggccccagcagcgccggcgaggtcgtcgcagcgtcgtcaaaggtttggatatggccatgagcccatgagcttgtcttttttgcccggaatgaccgcaatgtaattaagataggtaatgtaattaagataggaagaaaaatgttataagaaaagttttacatcgataactggctatcgaggaaggatatgcaccagagcacacgccccgaaccatgtgtcaaccgcccaaacacacgctaccgagagggaaaccaatcaccgaatcggccatcgctatgcgagaccgaccgccaccaggccaacaacaccaccacgacacgaagactcaaaaacgacgccctcacgagggttgcgacgccgaaagataccgtcgtcatccgtccaaagaactggactaggttttcacccagagatccttgccaagagaggaggggtatctcaacaatgccctcagtagggttaccacgaccgaaggcgtagtcactgttggcccaaagaaattgggctaagctttcactcggaacccctaccgccgtggtctgttgcccaatccgaatccaccatctaaacatcggtggcacatggcttccgccacacccgaccgacacctctccgccggccaacttctagtcctgccaacaacaagactgccaccacaccacaccgacgccccgccgtcggccaacttcatcgaaccaccatccctgaaagctggcctacgacccctctgttccaccacctgccggcggcctcctcgccaaatatggccaaaggagaacacgggactaggtggcgttgcttcggcagcctgagcttcccccgctgataagctgccgcctcaatccagcctaaaaacttcccacaaagaaggggggaggagctctagggtgagggtgccgatcggcaacgaggaagacgacccaccgccaccagctccctttgcactaccatctaggcctgcaccgacatcggaaacgcggtcgctctggctccggcgccacccgccagcgccccctttgtccgacctccttgccccacctagcgcgccgcgccgcccacctggccgcacctccaggccagccgcacgccttgctcggccaagcctcatgcgcgtgcaagcctctgctgcggctgccaccgcggcctccgcgagcaccggcctccgctgtcaccaccaccgcagccagccgccaccgtgtcctccacgtgcgccggcctccttcgccggctgccgccagctgccagacgccgccacctccacctcccgtcgtcgccacccgagaacggcttactccggcgtggagtcgccagatccacccgcggagaggccggatctggccgcggcggcgccggatccgccacctccatgccacgtcttcaacctccgctccgcgcaccggcctgccttccacgcgcagagacagggcgccgttgaggtttggcctcgccaccgccatcctggctggccgctcggttcttcagcggcgcgctccggtggcagcgaggggagggagaggaggagagagtggcggtggcggcgctatgttttccccagagtcgcccgcgcgtgggcgacgtgggggcaacgcgtgggttcggacttctcagcgatgagcttgtctcagcgccatcgccattttttttcctctatatttttttcaagagctatttggattttcctttgctgcagtttggggagaagataacggaaagtgtgacggcgatgtatggttccaaattgaataataatgatattttttaatttgatatatttgcaatgatatatatatagatcaaattaacccaaagatatatgagggtgattacttctgcaagaagctaccgaggcagaaattagcaatgttggctgtaacaacatgaattttcaaatttaaaaatcggaataaaatttttaaataatcaaaaatcttttttcaaattacctccatgctagaatttcttttcctttttcctgctgtgctagtgccaaaatagaaaaatgggaatccaatttaatttctaaattcaattatggattcagagtaatatttaaaaaagaaccatgattgaaatatataaattaagaaaatatttgcaaataagagcagataataattattttcctaaacaccccttttatgaattaatatccctttaatggtttattttgcaaataaaacaaatattaaatatttgtgaagatcctttttaaagatattaattccataaggaatcactttacatgtaacctcggttaatacttatttatcaaaaccctacttgtaaactaaatctttcagttttctttatctcaaaaggttttacaatagaagtttaaatgag

SEQ ID NO: 10800 - DNA, 587 bp, Oryza sativa
cgtcactgtcatatccattccgtacacccttccagaacaaatgtagtccctccaagcaatggttgcttttcaggcttgctccactggcctcttgctgagttgtaacgttttcaagtcgagacacacccggttctacgggctcgctcatgcattgaagttgtgttatctcaaagccaatagaattctcaaccttgaaatttgttagcttctgaagtgaggccatttctcctatgctagcaatggaagaacacactcccttttgggcaagatgccgcaggctgacaagattatttatgtcatcaggtataaggggacttccatatgaaccaatatctagtacttgaagatggtagcacttgctcagagcatggggcaaagcttcgtgggtcactctttctaagagaagatgaaaagctccatgggactctttgttcttaaatcttagatacctgagatgggtagtgttcgccaaactggaaaggaaggaatcaagatcagcataagctgcagtgatatgcagcagtcgcaaatgctgagcctccctgaaagcatcttggaaggatttaaaaaaatgatggttatattgc

SEQ ID NO: 10801 - DNA, 21210 bp, Oryza sativa
agcccgccgcgcgagcccgcccgcagctgttgcccgcctgccgcccggcgatactgtcagctatggatgagaaactgagagagagagagtagaaactgagagagagaggagaggaagagtcagaagagtagataaggttggggtgaaaaaaaggtggatttttttttcaatgtaaaaatcgactttttttatatgtggctctttaaaatgaattttaaggcattaaaatcaactcgtatgaaaaagttgtcaaaaacaaagttgtataatttattgatatctaccatttttattttggtcatttctccatccgagtttcattaaactatataaaatttgaatttaaaaatctaagaaactcaaataattattcgggtagtaactgatttcaaatgaaaaaattgtcaacaacaaagttgtataacacatcaacatttacaacttttgttttggacatttttcaatatgactttgtttgaaccgtttgaatttgaatttcaaaatatgacaacttcaaacaatattttgaaatactaagtgatttcaattgaaaaagtcatcaacaacaaagttgtataactcatcaagatctataacttttattttggttgtttcttcatccgacaaagtgatagtatcattgtttacaaaatttacatctatctcatctggttctataaactataagagagagatgtaaactttgtgaacaatgttactatcactttatcggatgaataaatgaccaaaataaaagttgtatgtcttgatgagctctacaacttttatgttcatgactttttcatctgaaattaattacagcttcaaaatattatttgaagttttgaaattcaaatttttagttgataaaacaaagtcacaagaaaaaatgaccaaaataatagcagtaataacacaataacatgatagagtatgattttagaaacatttagaaaaaagaatcatccaatttggagttcatatgagtgagataaactagtctcaaattttcaaatttatttttcataccgcttcttaagtcacccgtatggaaaaattgatttttccatgcgggtccttaagtggtccacatacaaacaaataaaaaaaattcaattctgaaaaataaacactcgaatttttaaaaactttcaattgaaatgttcaacccaaaatttaaaatattcatccaattttcagaaattttaatgtgcctgcgaaaatttcagtgatatacattaatttatctgtttcatgataacatgaatttgtatgaaaagtaaacataacattttctatctcccccttgcccttataaatagagataaaatttgaaaatactgatgttttgtttttgaaaactaatggctacatctctttctcgatttaagaaacttattttgaggggtcttgatattttgataattattcgttaccgtattcgtttcgattcgtattcggctccgtatctgtattcgataatattcgattccgttttcgtatccgggtttccgattccgatttcgattccgagaaaaaaatatgaaaacgaatatgatatagctagtttccgaccgtattcgatccgttttcatccctatcttgcactcgtcgtatgcatgtttcagtatacgggggatacaatactgctttcgattttgctatatctcactcaaaagattttttcttatctctcactcgattttctcactcaaatttacagtatattttcttgtaagttacagtgtaatttatgaaacttacactgtaacttttgtaagttacactgtaatttttgaatcttcgcatgtaaattttaaattttgtattggatttggtctttttcttgaggatatggtaatttagtgtccattatggtgtttcttaattgctttttgctttttattatatatatcggattttaatccaaagattaaaaatctgtgtgatacgatcataaaaatctttcgaaagatgtataggtactccctactgcttttgcaatgtggtgggcccccgtagggttggggaaagctgaatgtttcataccccctttaccctcccgaattgttcccaaccacacatctcgccagcgcgttcgacgtcacctttccgtctcgccccccctccccctccccccaccatctagtcgctgttttttctcgcccgcggcgatctcgtcgacgccggcgacgaaggagtcgatgccacactccgttttgtccacaccgcactctgattggacaccggcggcggcggacgttttgtccacggcggcgatggcgtatacgccgcacactgattgtacaccggcggcggcagatggaattgggtggagatcctcatcgccatcatgagtgtggagatcctccacggcaagacggtccagagcttcgtggaggatgagggcgccttcaactcctccatcgacggccgctttgcagcgcttgacactaacagcgagtccgcgacgtcctgctctcctacgtcgagatggccaacgagctgatgagccttcgtatgctggacaagcacttcggcgacgacgaggccgtcatgagcgccgacgagctcgtgaagctgtaccgcggcctgtttgcgtggttcgaccgtgatggcagtggcgccgttgaactggaggagtttcgggctgagatgaaggaagtgttgctcgctgttgctagtgggcttggattcttgctagtgcagatggtggtcgaggatggtcggagtgtggcgaaacacctaggcgggcgtttgtagagattcaaacaattggaaagacaaagggaaaggttccaggctcttcctgcaaactaattgatttttcgaaaaacaaatgtttgcactgtctttttttttttttgctactttttgtcctctgtgagtgataatgtgatatggtgtgattgaaggtaggaagggtgatctgcttctgctcatgatccgctaagagcctcagatagagagagagagagagagagagagagttcttccatagagagaagagagaaagaggaaagaacaaagagagtagatctgagatgttcttttatctatttgtattcggattattgttttgctagaactagatgaacaaaaaagattttgtttaagttcgaatcaattttcgtcatcccaaaaattggctcgcttggtcttaattataatcaataattttgaaacaaaatctcagtaatcagaatgtgcaaaaacaattgtgttgtaggtttctttctttcgcccggcaaagtgtaggggaaaaacaagcaacaatgggcaaatttattcaccactattgctaaaaagaattgaaactttaaaagccctggagttaatgcgtgctcctgcctcgtctcggcgtccgccaatgaacggatggagaaggaccccaagaagctcgtgttgtttcttcgtctcggctcgccggtgtccgctcacagcacatataaaaatcgtagtgtttgggcaggggaaggatgctgcttagcagcttgccgaagagctcatcgggacgggcgcgaagatggcgcgctttgaatccgaccacgaccgagagtcctcgtcggcgaggaacgccgccgcgtcgagcacgaacaccggctactggtcgtcgctgggcgtgaatgcctggatgcttctcaacagcttgcctcagcgctcgagcaggccgcggtcagtccggagctcgtcagggcgggcgtgaagatggtgcgctttgacctcgacgacgacagcgagtcctcgtcggcgaggaatgccgccgcgtcaagcacggacatctggcacggctgctggtcgtcgccagctgtgaacgcctggatgctgctcagcaacttgccgcaacgctcgagcaggccgcggtaagtccggagctcgtcggggcagcgcgctgctgcattgcaaagattttgttagatgattgagtttccgaaatggtggtcgcctttgaaggaggtggagggctcacctcgaagtcccagcgggaggaggcgataagtgtgccgctgctggtgccgtcggggaaggtggtggacgcgtcatcgtcgagagatagcgccgcggtgctgtgaccgctgcggcggactccggcggcgtcgccggtgctcggcttcctgagcggcaattggtaactcggcaactgcgcccacgagacatgtcgctgcgggaattgcgggccgcgtcaagcgggggaagccaaactccgtgcgggtgacgcgacgcggtcgggtgaggcgagcgttgtcggtgtcgacgcggactcggctgtggcgaaacacactctgtgcgacgccgaaggccaccgtccttccaggtcatggccgtggcttccctgcgcgcctcgacgtggtctctgagcttctttccttgctcggactccatggccaacctcaccttcgcctccacctcgttggccatgacaagctcttccagccatccctccatctccacgccgacgcccatgacctccatgagcaccgagttccaaagctgttaccagcaacaagcaaaggaacctggagggtcatggcgagggcgccgacgtcagacgggtagaactccatgacaaggactcccagcttcctcacggcttcaagggcatggccgcacgttgtgttgatgaggacggcgtggaggccctgcacggagcagaggaagtcgtggaggtgttcgttgttccgtcgcacgatgtcgaagtaattcttgaagaacttaggagccgagcgtgggagggtccgggatgcactggagcgtgtggaaggagatgatggagggctttggccggagcgtcggcgagcctcgacggagcaccgcttccggcgaaggagatgcaaaggggatgcggcggcggcggcgatgctgtgtagatggggctgagaccagcgcgagaggatggaaaacgaatgtgtgacgagaatagcgaggcgtcgtatacccaggtgatgaggtgatggtccctctcccagccttcctcccccgcgcatctgctggtgggcccatcattgtatttctcgtgggtaaaaaaaaaaaggaaatacgatgcccacctcttcagatactaattgatacggtagatgtgcgcgcgaatcttgatgccatcctgtggcatgcagcctaggtgctaaaaagactttccggacgtgtggtggcatggcgctgcggtgatgttgtggtaagcttgtcgcgacgccgcaaggctccaactctgctccaggtccggcgcgggtggcggctcctcgtcggcggcgagcaatgtttgaacgccttggaggttggtcggctccgccgagagcacggtgacctcctgatggagacgtgacgacagcgacatccagacatggacgaggcgttcgggctgagggtggccggcgacctgcgcggcgagcctgagcgccggctggaacgccttcgccgacgcagcggaggtgatggagaaggccatcatgccgcgcgacgcgacgacgaggcgcgcggcgacgaggaggtcggcgtcagcaagcagcaggtagcgcacggcatcccagtcggcgaggtaggggaagaagtagagcaggaaggcgacgaggccgtcgagggatcaccgcgcgagctcggcgtcgtccaccacggccgcaacctcgtcggagacagaaaggacggcgttgacgaggatgttggagctcggatcgaggaggacgacgcagcagaagccggcggagtggtcgacggcgaggcgggcgcaggtgtccgtgtacaaggcttggatgttggagaggaggcgcgacctgttgtggagcgcctcttgtggagtgggcatgtatcgttgctgcggcttcaccacgcgccggaggctactgccgccgcccgcagacgacgcatccattggagatcgagttggagaggacacggatcgatcatcattaattatatgtttcggtccaagaccgttgcaccgatcgaatccgcttcgatttgcgatcttcctaatgtccaagatgcctgttcatcaattcaccgaaggcgccctgttggcgaacggcttcgtcagactctcgcggcgcgctccacgcgcacgacgcgcaccccgcgcacgacgcgcagcgctcctcgctccgctcgcaccgctgcacgtccgttagaccaggggattagttaggcccaggcaactcccaagccttgttgtacatgtataaatgtaagctccattgatcaatgaaagttacggttgatccaaatctccttctacatggtatcagtgaccctctgatcctagtcttccgctacctctcccttgctagccatgtcgcacagctccggcgcttccgacgcctcgtccacctctgacgaagagcctgtgccggcgccctccacctctgttcttcaaaccgtcaacatccgctcccacgtcccggtcgccctcgatctcgacgtctccaactacagccagtggcgctgcagcttcgaatcggtcctcggcaagttcggccttgaggcccatgttcaggagccgcccgctctcgacctccgcactgccgagtggcgccgtgcggatcactgcgtggtcaattggctgcacaactccatcgccaagaacatcttcgacgtcgtctacaagccccgcgcctctgccttcaccgtgtggagcgacatcgaaggcgtcttccgcgacaacgccgtccaacggtctgtctaccttgagaccgagttccgctcgatcaatcaaggtgacatgaccatcacgcagtacaccgccaagctgaagcaactcgccgacggcctccgcgacatcaacatgcccgtgtctgagcccagccaggtgctcaacctcctgcgcggcctcaacaccaagttccgctccctccgtgccagcatcgccgaccggaatccgccgcacactttcatgaccgcgcgctcctacctgctgctggcggagcatcccggcaagtgggtcttcaagaccaagcttcatgctgacggctcactcgacaagtacaaggcacgttgggtggttcgcgggtttaaccagtgcccgggcgtcgactttggcgagacattctcgcccgtcgtcaaaccagcgaccattcgcaccgtgctgacgctgatttcctccaagcaatggccggtgcatcaactggacgtttcaaacgcgttcctgcacggccatcttcaggaacgtgtcctgtgccagcagcccacaggctttgaggatgctgctcgcccggcggacgtgtgcctcctctcccgctcgctgtacggtcttcgtcaagccccgcgcgcttggttcaagcgcttcgccgatcatgtgaccagcctcggcttcgtccagtcccgcgccgacccctccctgttcgtgctgcgccgcggctccgacacggcctacctcctcctctacgtcgacgacatgatcctctccgcgtcctcgtcgagcttgctgcagcgcatcatcgatcgccttcaagcggagttcaaggtcaaggacatggggcccctgaagtacttcctcggcatcgaagttcagcgcactgccgacgggttcgtcctcagccagtccaagtacgccaccaatgtcctcgaacgtgcaggcatggcgaactgcaaggccgtggccactccggcggacgctaaacccaagctgtcaagcgacgaggggcctctcttccaggactcctcctggtaccgcagcattaccggcgctctccagtacctgaccttgacgcggcccgacatcgcctacgccgtccagcaggtgtgcttgcacatgcatgctccgcgcgaagctcacgtcaccctgctgaagcggatcctgcgctacatcaagggaacggccgcgtttggcttacaccttcgcgcctcgacgtcgccgacgctcaccgccttcagcgacgcagattgggccggctgccccgacacccggcgttccacgtccggcttttgcatcttcctcggcgactccctcatctcctggtcgtccaagcggcagacgaccgtctcgaggtcaagtgcggaagccgagtacagaggtgtggcgaacgcggtggcggagtgcacttggttgcgccagctgctcggtgaactccactgccgcgttccacaggcgacgatcgcttactgtgacaacatctccagcgtctacatgtccaagaatccggtgcaccacaagcggatcaaacacatcgagctcgacatccacttcgtcagggagaaggtcgcgctcggtgaacttcgcgtcctaccgatatcgagtgcccatcagttcgcggatgtgttcacaaaagggcttccttcaagcatgttcaacgagttccgagccagtctctgcgtcggtgatacgacggctgcgactgcgggggggtgttggcgaacggcttcgtcagactctcgcggcgcgctccacgcgcacgacgcgcaccccgcgcatgacgcgcagcgctcctcgctccgctcgcaccgctgcacgtccgttagaccaggggattagttaggcccaggcaactcccaagccttgttgtacatgtataaatgtaagctccattgatcaatgaaagttacggttgatccaaatctccttctacacgcccagtgcccctggccaggagggaggtagaggggaacacgcctcgtgcttgccttagcagacccagccgtcgccgccgtcaccaacggcgcccgtagccaggggggaggcgcgcggcgacgacggtagcaggcgagagacggaggggattatcggctagccgacgacgccgaggagatcgagacgatccggatagacggggaaggagatcgcggcggtgggggaaagaaaagcggaagaaaaggatgcgagcgagtcgctaagcgacagtcaccacgttcggtgatattagctctggcttagcgacatgtcatctgctgctcaccacgttgggttcagtgacagtgacatggctggggacatggatgataggaaaagcactaccggagtgttgaacaagttgggagaaagcttgatcagttggcagtctcaaaaacaaaaaggtagtggctttctcaaaaacaaaaggtactgctggctgaactgcttggaggagaacctaaccaaactgtgatgaagattgataataagtctgcaatcaatctctgcaagaacccggtactgcacgatcagagcaaacacattgacacccgatatcattttagtagggagtgtgtggagaagaaacaaattgctgtggagtatgtacgttctgaggatcaacttgcagacatgttgactaaacctgttggacgagtttgctttctggagcttcggaagaagatgggtttggagtagacacatcaagattggggggtggggaagagttgattggataatctttgtgccaaggaatttatcttaagtgagttgcgtgttttcattattagttgcactattttgtaacagcatcgtagctttggattcttttgttgcatgttttcattattagttgcactattttagaagagatcgagcgaagatcggatcgtgggatggcacggtcagtcattgatccggtgagatcgcgcatgtaacaacctcctccgtggagaggatatagcccgttttaaatgaaataaccaaaaataagaaacaagcaagtaaaaaaaatcataaatgtagggaaaaaaatgttctaaattattttggtgcacagagtgtaactgtaagttggatgtaaacaaacacgaatcttaatgcgagatagaaacccaaaaatctattgcaggtaaaataacaaaaaccttaaaaaaattaacagcagaacaactaaccccatctagcagcaagtgttggttcaaggctgccttgaccttggcagacgtcttgctctgctcagccatagaccgcatctttccgtgcacgacgagccagaaggacttcttgcggactacttgtggagatggcttctgctctgcgagcaacacgccggcgaggtacccgacatcctccggcgagagatagagtcttgtctccgttctcctgcaccagcagcgacatggcgaccggtgattcctgcagcctcgccttgcatgaggccaggaacgctgcttgcgccgcagggtcgtaggcttcttgcacgctggcgcacaggctttgttgctccgccttgatgatggcatcgtagaggtcgagtgtggttgtcttgcatgggcgacgccggcgttgatggttggcgccatctggcgccgccgtggcttcggtggcgaagaggttggagtcggcgagagacaggttgccgcagtaggcaacgagacactggacgatctcgtgctcggagaggtgatggtaccacgtaaaaatattaatcttaaggagtatcttaagttttcagataatcttcttcctctcaatataagcatgattaattaaagctaagtacatatagctaactgagaattgaccattttgatgaaaattccattttgatgtgtcattttcttctatcaaacgaatatgcacaattaaagtacataggttatgccaattgaccaaattctggcctactaaagctcttataaaagaaacatttagcagaacagaaatcataacatttgcaacgcgaagaatttctccttcgaactataaagttcaaagacaagtatatgtctgaagaatttctccttcgaactataaagttcaaagacaagtatatgtctttaaaggaagcatttcctatccacatgtcctcccagaatcttacttgttcaccattatttactatctaaaaatccatatttaataatttacttttgactttcataagtcctgacaaaaagggaatccccttgtttcctctcaacttgactgcttaattgattcttcaagtattttcttttcaataagtcttccagacaccttgctcatttattaactaaaacaaccatttgcttaataaacattgaaccccaagaccaccctggtcttttggttgacatataatgtcccaacttgtgagtctatacattttttttgtgtttattaccttgccaaaagaaacataatctataataatctattgtttgaagaaccccttttggaatctaaaaaaaatcataaacatgactgttggaggcatgtcacgagggcctttgaccggacctgccgaaactaccaaatccgctggacatcgactaagtccaaagggtgtgcccagggcgaagcgtctggcgaagccgaacgatgaagatcgaagggttcacccccaagctcacaaccccggggagaagccattgggcgaagctgggcgacgaaggccaaagggttcgccaccaagctcaccatctggccaaatcgccactaagggcgaaagccataaagcgaagcaaaaggccttcgcctgaactagaagatgccttcagctaagggctcgggaggccctgcggccatgggggcctttcgccattaatacaaaagatattgtatacccacactaatgtccctatcataagggtatccctgtaaatttctttttactaactaaaccctagagggtaggagtctgtactaagattataaatagccccccagggccatgtaatgggggatcccaaaaaaattttaccaattaatatattgcttttattattccatcaactcattgagtgatccacatctttctacgtgacgcagttatcttttgacaacaatgactagacttcaaagcacataattcatctaaacaaatctcccccaacagcaatatgctgacctttcccactacaaaatctcttttccatcatgtggttacttagtttccagtctttatcactaagctttctaaaatatacatagaaataccaagatatgtcagacaaatgcttataggcgctttcagggaatgacaagttatattcatttaatgattgtaccaaattctcctttcatagtagattgatttcatgaaataagagttattcatactccaacggaaacaaaattttataaatttataacgtattttggttcggttaaattgcctacgtaagataaaaggttcatatagaaaatatgcacattaacaaattaactgaatttctaggtctataaattgaactgacaaatttacatgtttcaaagttgcatctgtctagtggtcatgaaatcacataatttaattccgtgattagtataaatcatcagactatatattctactcaagatattcatgtcattctataggctttatggaacagacacccagctataactcacatttaaataatcatttgccaactgctaggtcctactcaaatcacttctaaattaaaaacacttacggttttcgccttggtcttaaacttcaatctacaaactttttttcttgttcatttatttcctccaagcaaaatttgaagcttccgcaaaactgcaaagaaaaatcgtaatgattatagcaaacaaataatattaatttgaaatcaaaagagaaaaaaaaatcccaaacctttttgtcgcaatcactatcggtgcaattatatgctgtcagcttgaagaataggtgttttgtaggtctactatcattagagctttaaagtcctggcccttcgcttcgccatgattataactatcaatgttaccatgtagtactatattataggtgcaattatatgctgtcagcttgaagaataggtgttttgtaggtctattatcattagagcttcaaagtcccggccccttcgcttcgccatgattataactatcaatgttgttgatgagttataaaactttgttgttgatgaccttttcagttaaaattatttagtatttgaaaatgttgtttgaagttgccatatttttaaattcaaattcaaactgttaaaatatgttatatagaaaaatgaccagaataaaagttatagatattgattagttatataattttattgttgatgactttttcagttgaaattatttagtatttgaaaatgttgtttgaagttgtcatattttgaaattgaaattcaaactgttcaaaaactgttatatagaaaaaagaccaaagtaaaaattatagatattgatgatttatacaactttgttgttgataatttttccatttgaaatcatttaccacccgaaaaaatatttgaatttcttatattttaaaattcaaattttatatagtccaatcaaatccgaatggagaaatgaccaaaataaaatgggtagatctcaatgagttcaacaattttatttttgacagcttttttcatatgaaaaactcaattccaaattcatttttgcctagaaagtctgatgtgcctcctcctgatgataatacttgctaaatatatatttgatccaattaacttggttttggtggtgaaatatgttatcaaaatagatgttatgtgaatgtggttgtgttaaatatattgatggttatgtatgtgaatgaatgtatatgaataggtgatggtagggtgtgacatcctagcccagagcttaataggattaatagtatacttatgctaataagttacagcaactttcttggaagctaatctccaaactgatcgggaaattcttcccaggtgcacacaagtcgggatgcccgattgagatattttctcacatcactgaccaatcacgaatccactacacaaagagatgatgctttaaacccgttaaagataaccgatcccgatcccgttctagtgacacggcaacaagagttttcgtcgtcaaatgcacgaagaaaaagtcttcagtggaactgcagaagctgcatgtccgtgcagcagcaagtcacatgacaattaggaaccgagagggtgtccagctccacgatcgtacctgggcgggcgtttgatcgaactgctctgacaacaggcagcctaggcaatgtcgtcatcgagtccatcgtcgtccgatcaaatgaggcccttcaaagtgcaccacgctggtgcattacttcatgctgttaaaaaaccggccccgaaatctcatcggaaaccaaacgcgaaagaaaacgccataggagatccaaacatgatgacaacaccgagacacgatatttgataacggagttcagccgaggcctacatctccagggcactgattacgggcgctcctccccgatccagcatatacagcgtatcagagttacaacgactcacggccggtcgccgccggcagccgctccctctcactatactaagtcgccattgtcgtcatgcagttacaacaggcacgcccctctatttatgagagaacctaggatagagtccgactcatactctagtcctacacctagtacaactccaagttctaaactgtaaccgactacgtacacatattcgacataaactctaacacatgcctccaactcaaccgcatgatgccatagaggagagagggtgtgggcccttgtgccttcgctgagcttgttgttcctttgctgagacgcgagttccacaccgaaaaaacggaaaaaggcacaaagcgcgaagccgtcagttcagttctgaaatgcatcctttgttgagacgcgagttccacaccgaaaaaatgaaaaaaggcacagagcacgaagccgtcagttcagttctgaaatgcagccagcccgccatgctagtccctcgccacacaccaccgcttcgccgttgggattgccgctgttgtggacgccgctccgagtatatcaccacaagctgccggatatgaagaggcagcgagagaggagaagaactggaacggacaagccagatctgagtagtggatcatgaggaggcctccgtgaccgcccgcggaagagctcgacggcggctgcagcctcccactccacgccgccgtggggagctcgtcgacccaatggaggggagatgctgtctgccgtggaggagatgccgtcgggattgccaagcttgccggagaagcttgattcgccgtcagcggtgaggaatagccatcgaactccatgctgcctcgatctacagctcaatccacgcctgtgagctccggaagaggagggtaagcgcagggacaggaggaagagaggcgcgacggcctgtggctaggagagatcgtcggtctcggactcgcggagtagaggggcggagcgcaatgcgccgatgggggaaggagatcgaagtattacgtgattcggggatcgttaataagtgggtccatggccttatctataagttattttctgtcctaaggggatttattgtaaaatatgtaatacgataaatgtatatggactgaagttaaaaaagggaggggctgatatgcaaaatatagtggggcccatatgttgctatatacgtgtcttcatctcctatttcttaggtgacagttggaaagatggactaggggttcggtgcactgtgaagggcctgatgccccaaatcaatttgctgcggctagccactgtgccatgtccacttgttgccggccactacatgcccccgatcgtattacatgcgtcgtcaccgttctgagtctcgaagggacaactgtagagagtacgtatctttacagttgataaataggtaatcttcagaattcaaaagtttatttggttataatcttcagcaaataatatactggtaccatttatttgtttataatcataaaaaatatttaattgattattacatataaaatacattttgtagagaaaattcagaattgttttatgagaaacacaatcaacaaatataccagtacatgaattttgatcagaggttatggccaaatacaacttcatttgggaattgatgctagcaaattacacgcatatttcatttagaaatagaatgacaaatagacattaggtatttagaagcaagcaacattttattgtagaactagtgtagataaagataaactaacagaccgatatactttatctggatacaagcacatcctccattcgcgcgcgaatcaattaagaaacttccgggatctaataatgccttgcagacgttctgctatatctgtcatctcgggcctttggtccacattattgtctaaacactctttggatatcacaacaagattatggagatgctcaatgtccttttcttcagcctccttaccaaacagcatcttatttgctcttatctcagttaagtatgtgtcaaggtaatttctgacaaagctactttcaccaccataaacagctttcttaccggtgatgatttcaaagagcacaagaccgaaactgtagacatcactcttgttagttagcagaccagtttcacgataaactggatccatatagttgttgtcgccaataacatcgttagtgtgctcggtgacatctcttgcaattaaccttgatattccaaaatcagatatttttgggttgaattgatcgtccaaaagtatattggcaggcttaacgtcaccgtgttgaatgctagttgaggtcttggaatgcatgtaagccaggccttctgcagattcggcagcaatggccaaacgtttgtctaaagtgagaggaactttgttctcaccgtgaaggatgtcttgcaggctaccattcgaaacaaattcatagaccaagatcgggacatctacctcaaggcagcaacctattagcctgacgatgttcttatggattacttgagattggataataacttcatttgcgaattggtccttctgcgtcttgtcaactttcatggacttctttaccgcaacaggatgctgttcatcaaggaaccctttatataccataccaaaggcaccatttccaagaacatgactataagtttttgtaattcgctttagctcctccttcctgaatatctttatgctctttgcattttccagtataggaccaccatttctaatgaaaaattccctcatcttttgtttctccttgcgaagaaggaaaacaaaaaccagagttgcgaggacaaggagacccgctacgactcctatatatatgtgagaaacaagaagtagtttcttagtaactagcatatatttagcaaaataattaatatagtatgtcaaaataaaataaaataataatctactagtttgtactatctctggcataaacgtttgagtttttactatctttgagttaccactttaaccatagattttactacacataagattaaaaataaaattaagacaaatctacgtattggtactaccatttttatgttcccaaattaagtaatccctctgtttcaggttataagatgttttgactttggccaaagtcaaattgctttatgtatgaccaagtttgtagaaaaataataataacatttttaacccaagacaaatttattatgaaaatacattcaattattgatttaatgaaactaacttggtattataaatattactatggccctgtttgggggagcttatagctgctgcagcattttccagaatcagaagctccccaaacagcctagcttttggtccaattctgagaatctgtagttgtagaatccagaaaataaactagaagccggaagctgggaaacccagctttttcagattctcagaagctggctaccaaccagctgtttcttagaatcttaagcttcccaacaggctctatatttgtctataaacttagttaaatttaaagtagtttgactttgatcaaattcaaaacgtcttataacctgaaacggagggagtatttttaaaattattgagaatcaaaattttgaaagtttgacccaaacattaaacgtaatgtaatctcttttaccagaaaacaggagtagcatgataaaataagtaggaaatggatgacgataacctattcggagatgggggctacacatgcgagcttacccacaatcactttggctaccagtggaaatttctcagtgcaagttcctgctttgccatcgcctttcatgccaggtttgcacggacagtcataacctcccggcctgttcttgcagatcccatcactcgagcacgggtacacgtcgcgaagctcaggaaattgtattcggagttggcactcgtcaatgtctgggcatcatgatctgctgttagtctatcaatataatatgtatgtatgtatatggtagtatcaatatttaagagagggaggtacaaatggttcacaatcaaaccttggcaaccatcagcgatgtatgggttgccatcgtaatgatcggagcacttgcagatgtagcctgggctgctggttgcgttgacgcagaagctgttgctgctgcgacaagcgtagttgtccagcggcggctggccttgcgcagggcaggagacgttggcgatggcgaagtcgagcacgaaggggacgccccttgggtgcttcctggacaaggtctggttgccgtagagatcctccttggtgaagttgtaccagttcttctggacaatcatcccgtaggagcaaggattggacgaccaaaagacgttcttcttgtgggcgaacgtgacggaggctatgcggaggccggccgtcacgttcgcctcgcagcaacccatccccgagcacgacccgttctccgccgtctcggggaacatcagccgcgacgcgcagttgagcctgtagcccgtgctggccagcgacgtggtgagctgcgcctccatgtcccagcccacgccggtgagcacgttgcgcgacgccgagaagacgaacggcgagccggagagcaccgtgagctgccgccggaactcgtggtaggtcccgttggtggcggcgcagtcggtggtgacggcgccgtacgcccgagcctcgccgcgcgacagcgtcacgtccacgagctccacggggagggaccagtagtccttcagagtcacgctgtcgttatcgctcaggtagtagccgtcggcgttcccctggaacggagagtccggcgagccccatgcgaggaaagcgcgaggggggtcgaaggtgcggttgcaggtgacctcgaagccgtccaggaagcatccgggcgccatgccgaatgggtacggtatgctaacgtcgccgcacctgtcggggcagccggcgagcgtgatcggctgcccatcgccgatggctcttgctgccaggatcagcgcttgctgcacgactactgctactgctattaatatcatcgcagccatttctctgccaaagttaagagccatataccattagttttgtgtacacttccccaaactcgccggacaagcgctagctaaatggagtatatagggttcatgatcgaggttcgtgaactttgagccagctattatcttggcttaatgtatcatttgagatataaatatacaggtgacgcagctcagaccatggtggcgtgaagttaacatttagagatttatgatcgtttctgatcattggatctaacaatgtccatcctgctcagctaaatccaacgatgagaaacgatttagtatcgtgagataccgatacctcgagatactttttgttggacggaagcaaatctctagcatttaagcccttccgatatatatggtatagtacgtataccacaaatctactcccaccactcctaaatcttctgctggtgcatgacttaaactatgaatttttttttcacgaataaactacgaatttctagatgctgagaaatgcactttttattgatttggggtacatgtccaatatcatcataattaatcaaggtctgagatattagtgaggttccccaaaaagtaagctagttgatctaagcatgactaaacatttcctaaaccaacatttaatcatatcaattcccaagttatcagttagatagggtaaacaagctatggctaagtacgtaggaaccatcccacttaacattgtaaaataatgcaatttaggtagaaatcgggatatttgcaaagtaggaataatatgctcaatgaggaatgcatgacttgccttgctctggtgctgctggaacctctaaacaacttcaaagtaaaccagagtgtcggaactactggattctacgcgacatacaaagtacacaagtaaaataggatacaagactaccgaaacatgaaacaaaaccattttttaatggagtctagttaattttatgaattttctacaatttgaacggacataaacagagatcggatgagttagttatgaattttagaagaatctctgtgtttttactagtaacagaaaacaccttaatattgatttgttgcgtattaaagcccgaggactgacgtcattggggagggaagccggtgccaataggcaggtcccactggttggtggcgcacggtgtacggtccactggtccggggagtccggggacaggtgcacctagggctggatatcgagccagctcggctcgactcggctcggctcgctccagctcgttaggataacgagctagctcggctcggctcgttatcctaacgagctaaaaggctagctcggctcggctcgtttgaaagctcgagctagctcgtttagctcgcgagctatacgctgccctcctgctcgtgtgcacattcgtggagttggagttgcaaatcaagcaaatggagcaaaaggatttggattttagatgcacatacacaccttgtctacacatatacagcagaagtggttgtcgaccaagtcaacaaagcttgtcgatttgcagatcctcgacttcacccgtcgtgtggaggccgacggcggcgaggacgccaggcttgtggtcctgaagctgtactccttgattcaaaacttggagtcttggaagcggtggatccagttgctccatgaccgagcgaagagagccgagcgacggccgacgaaggcgattgagacgacgaggcaaaggtggagtgggatggctggcactcggcggcgggctggggacctagagcggcgccacgagggcgtgggtttgccggcggcggaggggatcgggagagttttttttcttttgttttttacggaaagggatcgagagagttcggtattgatttggatggtcactggtatagggttgcttggttagtgttggatggagatgggctatgggctttttgcatctttttcttggtggattttattgcgttactaggcttgttgggccaggtgggctacactgtgctgagctcgtttggctcgcgagctgctctcgagccagctcgagctggctcgttatagataacgagctgaaaccttagctcggctcggtaacaaatccaaacgagccgagccgagccagacacgagccgagcgagctaacgagtcacagagcttttcatccagccctaggtgcaccacatgcacatgtggtgcc

SEQ ID NO: 10802 - DNA, 2960 bp, Oryza sativa
gccgcctgcaaatttcgttgacggccgtcgcccgagagcgaacggccgtctgccacgtcattttcgccgccctctgggagggcgatttttaaatatgcctcccagagggcggtaggagaccacttccgtcaattttcaaaatggaaaattatttttgtaaaacttttcataaaaaaaattataaataaaaaaaattccttgcatctccaccaagcatctaggccctgtttggctactgggatagggaaatgattcccacccaccaaaagtcatttttaaatcctaaccatttcattctctttgttacatttaatcatagcccttcattcgtttcccaatcctaatcccactcctcatttgtcattatccaaacacacccctattgcatgagttgtcaacccacagcgtctctttgatcaatagaaggatttgcgtgatggtccaagcccatgtcaatatgaaaagtgtacaagattggtagagatcaatagctagtatggtaggagaagattttaatccttaaggagatgttctctagtgtaacttgttatctcaaggttaatagaaatggttataaaaatctttaaaaaaatttacaatgtagattataaacatctaccatttcaccaaaaaatcatattcaaatttgatctatagaaatgaaaacgacaaattaagacgtaaatagtatcaatactattcatatgttggatttatctctttttttatgtcaatttgtgacttgagtttggacttgatttttatgtagtagtttatgtatatggcatgaatgttgataatttgtttttttttaatttttaacaaccatttgaatggcgtttgaagcgcgcactttcttccctgtatggtggtttgtcaaatataatgcatggctgatcatgcctttaggccatcgttgtgagaaacatgggcaaatgtcacaccatatcagtgatgatcatcactaaaagaagggcattcggacgctacgcgacatcaacatacatgaaatcctcgtcatgtgcatacaagcgctggacagcgtattcgttaaggcaaataatccgactatttgtgagagaatgttttccacggatcacctcctcaaactctttgtctccaccatgaaatttctccagagctggatgtacaatctttgctcttcaacttcgcagtacaggcaccggacatgttctgttggtaataaaatgaaatgaaatcagaaacttcaacaaagatgatgaataagaaaaaaaatactcgaatattagggaaggacctaatatcaaataattagaaggggtgaggctttaaacctaggtcatttagcccaccaccttgtggagctagccggaagacccctgggcatttctcaacaaaggtgatgaattaataagtaaatcaatatatatcataggattgaccatctaaaaaagtaaaattttgacagtgaaaacgtagttgcaatttcaccatttctaatgtgtatgaaaaaggaacaaaaatccatttataacctacactcaagcgtaagattgaaatcaatcttggactacaatttgggacataataattacgtatgcatctggttgtattctcaaaataattcactctaactatatgtggcaggtctggttatagcaagttcttccatcgtatttttttagttttatccatatacattgtaattgaaaatagttatgaatgctgcatttttcaacatatataacagatcaagcagcttaccagcaaatggcaatggcatgtccaccttgcaacacatgatagccggttcaccctcagccttcttattgtcaaactcggcgaaaaagagcaccggggaagatggtgagcaatccgtcttctccgtggccaagaagttgacatgcgtgtatttatactcgcaaggtgcaaaggaaaggtaatcttcctgcttggagcaataatactctggaccgcacaccgaatcgttcgcgccacaaatcacaagaaggctgtacgtaggtttctacaaaataaagttacgataatgagcaaattgcattggcagtatatcataaattgtgtatatatgatgaatagaagcaaaacgaaccccatctcgcagaaagtgttggttcagggtagctttgacattcctagagatcctcctttgtgtggccatggagcgcatcttgccatcggacaccggccatgtggatttcttgcggagatggcttctgctcagctagcaacacgccggcgaggtaccggacatcctccggcgagagaacgcggtctccaccctgctgcagcaacaacatggcagccggtgattcctgcagcttcgctttgcaggaggtgaggaacgccgcttgcgccgtagggttggggtgccacgccgcagtcgccgccgcctcgtaggcttcttgcaagccggcgcacgggctctgttgccccgccttgatcaccatggcttcgtcggcggcgaggggcaggtcgccgcggcaggcaaccaggcactgcacgatctcgtgctcggagaggtgatggtaccggctctgcaggaaggagatgaggccgtacatggatcgactctcaatgcgggtgaggatgtgcgggccgatcatgtcgagcactggtggcggggctgccgccgggaacgcggcgtcgtaccagacagtgttgaggatgatgttggagactgggtccatgggcccgtagcagtgaccggccttgacgatcacttggtggtagcggttgcgcagctcgccggcgggcagccgggccagcgaccgaaggtagaagccgcggaacgcgtggaggagcaccctcatcagagacgacgtgtggtggaggcggtttttctacactaggtgctgcggcacctaggctgcatgccgtccgatggatttagtgattcgtgcggtatgtaaagtgcttttggcagacatattctgtatcttgcactaggatgaaat

SEQ ID NO: 10803 - DNA, 1854 bp, Oryza sativa
gcaaagcataggtaaaacctggttgttcccatcacacccaattgctgtcaatatctgacctcggtatttacctgtcataaaagttccatctatgcatagaacaggtcgacaatgcacaaaagcattgatgcaagcacccaatgagaaaaaggctctttgcagcacactctttgttcgatcatcaaccgatgtaaatgtatgtaggtcatagtacgtattattattcctctgggcaatggtggctaacaaacgaggcaaattatcataagaagcttcaaatgtgccatacctcatctcaatgatcttttgtttggctctccaggcctttgcatagcttatggtgtacttgaatttgttctcgatgtgcctaataattgattttggttcaaagccaatgttaccaacaacactgctgtacatctcacttgccacaaaagctgaagtgatgtttcggtgatacttctccaccccttgtaagtagcacttgtgctcggtcacaatgctaactttccaataatcattccatttacccttatatgcatggacacgccacggacaatcttccttcatgcacctcacttcatacacataatttgttgacttgaccaccctaaactctctctgcaaggaaactgcccaatgcttcaccgcctccttcatctcatccttatgagcataccttgcaccctcaattacctcgttctccttatactcccagggtacatgatcaccctctgatataacaagtccagagaagtcctcatttgcccaatcagtggccattacatcaccttcctcatcggatgatgcgtcgtcgtccacttcctcattatccgaatcttccctctccatttcatcaacaattataccgactctctccccctcatccgccatgcccatagcctgctcctcccttggttgattttcctcattttgcatcgatggtccaacaacatcccctgcattgataggaccctctacatcttcggtttgcattgaaacatttatatctttctcttctaccgacacaaatataacgaggggccatgaccgttcaaaagccatttccacataccgtctccaagcatcagtgctgtccatcggcattagttcccaaaaataaccttctgttgcacgactcactacaactgacactgacattgtgtatacttcttggtctattctaaatcctctcaacaaccaactataaattgactgaaatgttctctccgcaggcctatcgatgcccttagatgtcattacaaaatctgacagatcaacaccatctggaccaaatctaatatttccttcaccgtgaactatctgaaatgtgaccttacttgacattgtgcctgatgaaaacaataactgcgttaacctcgcatttctgtactacgccctaagttacattctctacaatattgttctctaaatttctaaaattacgttacattctccagatcaaactaaactacatcttacaattaacactactgtctatgtctcaattcatactattatattctatgctctggatctacacatatgtgctgtgtgctacagatgtgctaaaatatatggaactaaaactaaaacgcaacatatatactcaaacataacatattagtacaaatgcaaaagatgtatgggagcatacttgtgatgaattgagcgaaccagcagggcttcgccgctccccttctgctgccctcccctctctctctttcgttttttttggatttttagtgaatataatgaaatttcacagaggagggactgggctttatagagggagaggcaaaaatcgccctcccccagggcggcaagggggccgcctgcaaaattccatgcccc

SEQ ID NO: 10804 - DNA, 5107 bp, Oryza sativa
ctcccccaatcgggagggccagttattaaccgccgcctcccaatcatccgatctgcccaaagatggatcggggctgtccaactagccgcctgcgttgcagccgcatcggcaccacatgcacatgtggtgccgatgcggctgccacgcaggtggcaagttggacagccccgatctgcctttgggcagatcggatgatagggaggcggcggtgactaactggccatcccaattgggggagagagagaggggggtgggtccaggtgaatcgggggagagagtcaagggagagagatagggtcaccacccacaacgacagtgcgctgcatgtaaccctcacgagcaagctgggttcacgcggtccgccagattttagacgatcagctcatcctagatatcataggaatattcgtttttggatccaacccaaacccacctagtcctccaaccaaaaacatataaaaataggatggaccctcccaacccaccaaattcctccaaccaaacacatgccaagtgttagtaggtgggatggtaaagagatcttggatggagagaaaggccttgagttcaaatgttgcttgagacatatctatgaatatcagttgaaaaaaatcatatgacttggggaagtgaagtgtaaccatataggtgcctaataaactatcaaatatattttttcggtttttttttttggcttttgggtttttctggagtagttctttacgaccggggggcggggggcaaactgaagatgacttgactttccgtgataccgacaaatgacgaagaacagagaagtgctatatatcagacactatcggtaagtttatatatatgattatattcacggcacgcatcaacgacgagtacgtacgtcagttacgtatatataggtttttaacgaaatgtgccctactcggctgtgtcgcctagctggtttcacactgaggtgagctcagatgctttctgtctctactgataatatatgcatgactcgttagtcagtcctgtatagtagtagtatttggagttcacatacactgactgcattcttaattatttttctaataaaataaatcgtgtttctgccataaaagttaaattacaaaactgcatacattgtttaatttggttcctaccctatcttctagtcatgcgtcagggctaaactttttttcaattaaaagaaaagactttgcccggcgaataaagaaaagacttgcccgacaaataaagatattaatggacttgtttgaaagatcgacaaaatttccccgcttgcattgcgttggttcacaccttgtgtttcagttaatacgactcgccaagtcttcaaatatatatgttcgacaggtcaattactcccctccgttgttttatcatgcccgtgcactgggtaatggtagagcggatgaagtttaatctcaatgatttatcagagcactccagcatgatcatgagcatacatgacatagacagtgacgacagaggcatatttctgtattagatttcgctctatgagtaatgtatatggacgacgcccttaatatgtgagcccgatgattatagcatgagaggaattgaagtgaggaacatatgagtaaatattgctatcgcctctgcacaagagacgtctgatggaatattatgcgacaaatttatatctatatctatatctatacctaattaaaaaataagcaagacttctgggtaagaaaactttttcgtccgtccttttctttttcaccgctttcctttttcttttctttcggtttgttttttcgttgtttttccctttctttccgtccacttttttcccccttttttctcgccctttttccatttttatctctgtccgctttttttttcccgtttctctccatccgtctattttttccttcatctttttttcaccttttttcctttttcggttttttcgtcaggccaaaccctagcgatgtcgtcacgttgttctgtcttcccatgtgtttcctactcctattaattacaaaaatcgattcctcactactctctcgtcattttccccatgattttcaattccgctttaattcactgaatttaatctacatttgaaagtcaccttttttatccgagttttgcgaattcactccgatggtgaaacgaaaagaggagatcgagtgtatgaaaactcctcaaccaattttagaagatcaagaaaagattcgatcggatctatttgaaagtcactttttttatccgagttttgcggattaacttcgattttgataaaaacaaaaagaggagatcaggtgtataaaagttctcaactaattttagaagatcgagacaaaactcctcaaccaattttagaagatcgagaaagattcgactagatttgatggagaggatcggttttggcatcgtatgaagagattatcttttggaggttgaagactgtaagttggctatgtgagccggaacactacagctccacttgtgggttaggtctaaaagaggcaagccaaacagagggagatagcgggctgggctaggactgaaaatgaaggaaggaatgagtttttgtccaaaaccaagagtaaaatgtatagcgatccaaaaatattctcacccgttgcaacgcatgggtattttttctagtaaaaaataaagtcaatattaacttaaatagaaaactctctatgtacccctaaatttatccaaaccgttatatgcccataagttttcctcatttccttgtatactctcaaatttaatttggatatcttctataccctttccgtcaattgaccgttaaattcatgtaaaatagtctattttaccctttgatacaaagaaacatacaaattcatagagtatattgttggtgtgtaaaaattttttgtatgagactattatatttatgagtttgttatatgagattatttttaaaatttatgggtttttaagataggagcgctccctgccgtccaatcttcattacacttccccaaaccgttatcttggaagcccagccgttcgttacctgaacttcacttctccccaactactgcttatctctgaacattcgtcaggtcctcacactctgcaccaacgccaagctggccgacagccactggcgctgcccggacctgcacacatgcaaaaatcgataccacatgtatgtatgcatgtaatgcatgctacgctacagtacgtcgagtactgtagtaacgatgcactccaacgtgcacgaatatctgattccttcacgaacacgaacaccttatgaagttcattgcgaagatctcctcacatgtatgccaattggtatccaactatatcacccgatatctttgatcgttttgctttgcttcttcctgagtttagtcccgatcacaccattgaccgaagttgatcttcaagtatcctgactctagtcacattcttacattttttttctcgattgtaccagatctctgctcacccctaaacacaatcccagtcttcaccattatttaccaagactgacctcaataactcacgtgtacacaatcagacaaaacaaccgtttatagatacagatattataacctgaccaacattaatcacacacactcacaccctgggctgttcctagggcccatgaaatcagggggccccaaaccatgtacacatgtatatacctgtaaaaagaatgggccaaaataaaaatactgggcccatcagcccaggagggccggatcgcaggagtgaaggagcgtagttgtcctcagatcgctctgtaattcgcgatttcttcttttcacgaaacgcagccccaaacgtcggcgccgacgccaataatggagggggagagctcagttttgtggattcccaagaaatttgtctttaatttcatcgatatgcaacagatcctctcaaaattccctcataacaaagttgtatatatggtacttcctcaacttttccccatccttcctcctttcttatctcatcgttcctgaatcaggggcttgttgtagcttggctttcgtttgttcgcaagattcccattagctgttgtcaaaagaaggtgttcagcaattctttatgaacagtgttgaatagaataggaggagaggaatactgcgtaacgcggattcattgtattgaacctcaggggccggtatatataggttacatggattggatcttaagtaaactcagagagatagagatggaaactaatcctatcctaccataacaaaccggatacaatacgatcctatcaatatactctaacatccccctacggtccaagcgtgaacagcgcgggcacttggactggagaagaaaccagcaagatgctcaaaacggatgatagccctttgtgccgtagtcgacgtagccaaaacaaagggtgcgagaggacaacacagctgcagctccatgctgatgcagcggcaagaagtccatcaatgatgtagccacgctgaggagggtgcctgcaacaaccagtgaaggtgtggaccacaggcagcggcactgcggctcgaggggggcaacgcagcggcaacccgaagcttgatggcgtagtagatgtgctcacagacgatcaattgcagaaatcatcatgtttgtgtgcttgatcgggtgatcaggccgaagttgcacacagcggaatgacgaaatcgaagccggatgccgatgtcggagacgcatagatgtcgacgaggcggtgggcgacgcagttttcacgttacgcagtatttctctcctcctattctattcaacaaacagattagcttggttctcggctcaacccctcacggcccgtttggttggagggagtttttaggagggattgggagtttagagggatgaggctattaagtgttttgtttggttgggaaacataggaattttggtgggatggggatggggaattgaggaaggaactccctccttttcaatacctgggtaggggcaggtaattgggagggaattcctcctttactttttctaagcaaatctcagccatccgtttttattaatgacctaatctccaactaaactccctatcaatttccatcacctctaccaaacaagatattagaattaaaaatcaaattctcatcttaatttc

SEQ ID NO: 10805 - DNA, 551 bp, Oryza sativa
gattattgactttggttcatatgtcagattattgatgacatgcgcatacatctcagatgcaacaaatgcacatgtaatgttcctgtggtatttctgaaatgctcatgcttggtaatgactgacactgtccagtaatccttccattttcccttataagcgtgcactctccagggacacccatctttttccttaacacaccgaacttcatattgcgaccgattggacttggcaacccaaaactctctatgaagtgacactacaaaatgctttaccgcctccttcatttcttctgctctagtataaatcgctccctgaataacctcattttctttgtattcccatctcacactatcctcttcagagacgaccagaccagaaaaatcctcactagcccattcggctggattaatatccgtctcatcatctgacgaaccaccttcctctacacgctcgttgtcaaaatcctctctctccatttcatccacaatggtaccgacagtctccccctcgttggctactcaaccaggttgaatgcctactggagctactac

SEQ ID NO: 10806 - DNA, 518 bp, Oryza sativa
acttggcttcctcgtctctggcagaggaatagaaccaaatcccgagaagatcaaggcaatcgagaacatgaagtcgcctacaagactcaaggaagtacagaagctaaccggatgcatggcagcactaagcaggttcgtcgctaggatgggagagcgaggacaacctttcttcgctctgctgaaaaagcaagacaaatttgtatggacacaggaggccgaagaggcattcattgcattcaagcgctacctatccaatccacctgtacttgttgccccccaacctaatgaagaattatttctctatattgccgccacgccatattctgttagtactgtcattgttgtcgagagagagaaggtgcaacgactagtctactatgtcagcgaagctctccacgacgcaaagacaagatatccacagatccaaaactgctctacgcagtaatcatgacatcaagaaagctacgccactactttcaagcccacagggttacagttgtctcctccttccctctcgg

SEQ ID NO: 10807 - DNA, 5108 bp, Oryza sativa
ggaggagtacacagggggtgtcctcaaaggaagggtgcctgatcacatcctcaaacaaatcccggctggcgatcatcttgttgcagggttctcctgagctctgcacccatgtttggtcgtagtccgcaagcgagatgcagaagattatggcacggatgtcctccagcatcccgaggcacttgaagcctccagttagccccttggagttcatgcggatcagttgatacctgcagaagtgcagagatgtaacagaaatgcggttcacatccatgaactaccattcagatttgctggacttggttaatgcaatgatcgatcgatcagatagtctgaaaaatcttactttgtttgtatggctggattgccagctttgtcagcgtatgagtcagagaggggacctcggtcatcaagcgagaattcaagtgtagagaggccattccattggtttacaccctctgcatacaagatatctgtctcggttggttcatattcattgctggatatttcaaccacctgcaaacatatgcaaaaaatccagtcagggcagttgactacaatctcctgccttgataaatttgcaactaaagaaataatattgaattgtgagttgcgacagaagagcgttggttagagccgattacagaagcaacaaagaaaattgtgcatgtttattataggaccaaagcatttcttattacaaggctggatgcaacttaagcaattgctccctaatcactaacgataagctcaaaagcagagagaactccattcaagcttatctagcaagaccaaagtcagatgatctgtaatagttagacaccatttacaatcaagaaacatccatataatcataatctgtatgcacatcataaattggagggacgctagatatcttctctttttccttcaatacattaagccaacatgtaatttatatattttagagagcagctagattgtagttaagtaaaaaaagataatgttttatcaggaattatgaataattcagcagaaaatacgttattgttactcaggtcaacaaaacagtttaaacaacatgaatggttaggtggtcaatgaagaaaaagaaaatcagggctatagtttagttggaaaactaaaactaatctggctcttgtgttaggagcacatctatttgtgatagttacaagtagtcgagtgcttacgcaatgaagaatggcatgtgttaaagagacagaaatgtaaattcacacaaagaagatagtaacaaactgttgatatgaacaatgtcagttataaaatgttgagcaccgaaaaagtggacaacagtagcatatcataaaatcaatcttaccctatcaagaaaataactggcgacatcaggaagaaagtgcaactcatttttccttttatatgtggcttgaatagctggatctttccaaacctcttcaacgataggtgcatactcgcgagttgcagcaggaaaaaaggcatcaaggttacccagggcaactatctccagcaaccaattagcaaagtgcatcaatctttgatttagtgaatacaaagatgacgtgctctgcactgccttcggttcccctgttggaagttcacattctgtaacattttctgaatttcaaaaaacatttggcaacatgcacaggaatagaagaacaataatgttgtcactgtttattttattaagtaataaatagccagtacaactaacatggcccactgtttcataaaacaagagcaagttttcatggcctcaaaatctctaacccagtccagcatcagtttacagaaattgatgtgtctagacaatttggtggtccaatatatctaacagggcattacatactagtcaataagtaatgaaaagtttgctgcagtttttcaggtaaatatgccttgaaaagctaataacaatttgaatatcgtgttttttctatagaaatcaaagagtaccctttgtggtaaccggtaaaaacagaaaagtcaaagaaaatggcacttcatagtatattccctgaaaagtcggttcagcatttctgatgtctttcgaattttattaagtgaagaagaattttatgcatgtgatatctgttgcataactaaagaaatgaacatatggcaaaatgaattcacagcaaaactgagccaaatcgttaccatctcccttgtgattactcatgccaagctctttttcttcctccaaagcctcgtcctcaaagcactcccgccattcaagcaatgtgctgaggtatttgtaaacattgctttgtatcatgagcttcaaattaagtatttcttctggggagaattcagttccatacaagaattttgcctacaaaaggaagtacatacacaaagccacatataggattagcccgttcttcatctaagacaagataagacatatttactgtaaatattagttggacgtagaacttgaccactatccattgagaaatttagagatatgcttttggggaagcttacaagtaattctggaattcaaacaatttcattcagatgatggtctcagtactagaaagtcaaacctaaagaaagattgtccattactactaaaagtcccttaaaacttgaggattaatacttctgagcatatgtaaaatccaaaactaccaataacataatgtacttgacaaccaaagctctcacatttgcacattagcaagggaatagacattatcatcatcccatcttaatgctttttgaataaaatttcacataaaaatgctttgttctaagctatgttctctgagcaataatatggcaaaactaatacaattggcaatagacatggtaaatataggcaagtaaaaacaaacacctgcttaaagattgtgctggatccagagccttctagtccaaccaataaaagtttctgaacttttttctgctcaaggtattctggaacaaacctacttgagtacaaagtagtatcttctttcaaaccacgggggattggcagtgagaaaagggtagcaataagacgggttgatgcctggctgaccaaagtaaatgcaacatattactcagctgatttacatacatatctccaaccagaaaatttttcagaaaacagatataccttttgccaaatatttccttttattatgttctggccctcctcctcgtacgagccatcatcatacaaccagaaatgagtatttcgtgggcactgtacattggccaactgaaggaaaagccagtaaaaactctgatcaagatcttgaagaggtgatgaatgatcccctaaaaagttaagttgcccttttagattcaacagcaggaaaaggattaatccgctaagcatacatactaatgtgagatcaaactttaaaactctgtccagtagaagagtagaacataacaatgaaatagatgggtttgtatgcagtacaatttaaaatggaaacaaagtccaatagaaagctgtacgttattttagattcacaatccttatcccaaatgctatatatagtagcatcaatcacccaccaaggcaacaataaaaaatatgctaatatatcaccaagagaaatgtgttatcaggctcctgtatcaacctctcaggggaattcctgagataaaccaaatgcatacagacaaaacttaccaaggaaaatcaaagattaaactattggccaaaaaaaattttgtcgggctaccttcctagtttaaataaaagagtggagcaacctctatgttctcatcaaagctaccgtgtagaatggatcagagagcacatgggcttgactctacccaaatattaccttaagcatcctaagttcggtctttgtgatctcccgcccatttatgaacacctgtgtagtgccattgctagcatctgtttgtagtttcccaccaatgctcagctttgaactaacaatcctatctggcctctcgccttcctgataccagatgttccgttaaatatataaccagatactgctaagttgaacatgaggaagttgcaggacaatgtaaccattcacggagatatgaaggataacaccatatgctagtgaaacattattgctcttaggagcaaacgttgattatttgcttctccattaatggaaacacttgaagacgtcgaacacacctgtctaataaaagaattactaaacaaaacatacatccgttctttcattcttttaaaaaaaagcacagttgagtttctgaattagaataatggctaaagattctgtagtaatgcttggtgtccataacaattatagttgtgactccagattaaaaaaatgtcattgttagatattgtcgtttgacttagtcaaatgtggcagaagaagaaaaccaatataatgcagctaggtagcaagcctccaaagactatctgattatgaacaaaaacaaaccatatacaggagacttttctaaaagagaacaaaaataaacactactttttctattcacaccacattcctacgcttcagcattttccctaaaaattcatgtattcaacatctgattctactaatagattagaatgagaaatgcaaaatgtagctgtagactagagaatgccattgcagccagctcttaccttgccccagagcccagagtccttgtcgtaccagtagcggccggcagcgaggcgctccggcggcacggcgcagccgagcagcagatccagctccccctgcgagaggccgcggccgttgacgaggatctcgcccggccgcacctggttcgcggcgcacccgcgctcggcgcgcatcacctggcgcacctccgccggcgcgagcagccgcgcgagaagccgcgaccccttccccagcctcgcccgccgccgcgcgtccgccacggggcggccgatgcagccgacgcacttgcggccctccggcatggaccccatcgcccggagcacgcacccggcgcagtaccgcgccccgcatgccaggcactcctccctctccccgagtatccccaccccgattccccccttcccgcacctcgcgcacgccccccgccgcttgcttccctggttcaatggcgcctccggcggcggcggaggaggaggaggagcagggggtgacgaggaggagcaacgcggaggggaggacgccggg

SEQ ID NO: 10808 - DNA, 18915 bp, Oryza sativa
gtggaactagacatctatactaccatgggacctaaattatatagtttttacaatttagggctgaagatttctactattagagataatggatgttaaacaaaactcaacataaagttcaaggacggcaactggatttattccttttgatattcccgttgctgcccaagctatagactactccatatctttatcatatcttatctcatcttataaaccaatttcagggatggaaatgtggtatatgattgggccacatggctcattgagaatttagggttagctcctccaaatatcagcaacgtgcccatgcaatctctgattccattagagtgtcagtcatgcattgttccttgcaatcgccattgaactttcagataaatctatgagtaaaaccatcgactaaaagaaaatacgaagcagtaaatatagaaaaacaccagtatgcgtagtagattatagaggtttctgaaaaattcttcttccttcgtcatcaaaatcaaggaaaaaaaattaagcaagagattccagaggttgaaaaagaacattggatctgtccctttgctactaaagaaattccttctctcaatcatgaacaaaaaacaataaaggtcaaagtggaaaaatagaaaaaaagccataattaagttacttcgcctacaaaggcacctagcacaatcgccatcttccgcttcctgttggttgttacccccatagccatgtcgacgagccacgtgacattttgagtaccgccggcatcttccaaattatttttatatatgcaattttgtaaaataaaatggcagttgaataaggtgaaaagtattaggccaagtttggttgtttgccaactttatgcccaggtgggcaaactaggttgttgctaacgtcgcccatgttgctttaccgagctgtttaggctgagttcgttcgaaactaatatctcgcgcacattaaaaaaaatagaaaaatagagtaaattattagcgcatgattaattaagtattagttattttttaaaaataaattaatagaattttctaaagcaacttccgtaaaaaaaaataaattgcaaaaagtacatcgtttagcaatttgaaaaatgtgagtgtggaaaccaaagaaagtgagttgggaaagtgaacaaatgaactcaacattaggctccgttttatacagagtctaggatgaagattaaagtgtgcatgtaaaacgagacaagcaattagcttatgattaatgaatttgaattattaaaaacttgatatatatagatttatttgatatttttaaaacaacttttatatggaacgatttcgcacaaaacacaatatttagccgtttgaaaagcgtgctaacaaaaaataaggtaaaatctatatcttaattaattgtttagtttttgacgggcaatttgtgcaaaggaaagcttgttgttaaaggagatccgggatctctactgcgatcgagcttgttctcacccggttgagctagcttgcccccagaagttacaattactttacggtttcaaacggtgggcctcgccaagccaggcctcaagctcaacctgggcgttcggtttaaaccgacaattcggttcggtttattcggttgctataaaattcggtttacaggcttcaccacccgatcggttctccaaaaaactgaaaaccgcaaaattcggtttcggttttttaattttggttttcggttttagccgaattaaccaaaagttactaccaccagccacaacaatacagaattacataaaaatgaacacaagcaacagcatatatgatattatagatatatcaaatccttaagcaagcaataaccagcagcacagctgcatagaattacacaaagtagtcacacagtacacaaatcaacatgtctcaagagtacagttacatagattcaagagttcttcattattcaaatagagaaatataaagtcccaggtagcaccgtagcaggcacccaacaggcaacaacagcattgcatacaccaaaccaagtgtccaagactccaaatgatcactgatcaggactgaattactgagttgcagctggagtatcttccttggaaatagataggtcaccaagttctaaaataatagatgatctcagttagaacagtcaatagtgtatgaatcatgaagcacattagaatttggaaggaaataaaaattttctatgttaccttcctcaagcaaagccatttgttcgctgtcctcttcaacactaacatagtttcctccacgaagccaatcattagcacaaacaagacgctcaaccattcttggggttagtgaggtcctaaagtcatctagagttcgcccaccagcactgaaggctgattcagaggcaactgaggtgataggaattgccaaaagatcacaggccaaatgagataatattgggaatcttgttgaattggccttccaccactttagaatgtcaaattttggtgtgtccggctcattatcttctgatagatacttgtctacctcagatttgatagttccacttccaccctcactgttaagttgctgagtaattactgacatccacctacaactcactcttttgctggtttcagctgtagattcagattcagtaggttgtggtgccttatcttttggggtatacatttccttgtactcttcaaacaaagcacgaaaataggtattcactgtttcccatactttttctcctactgtatccccaaacatcaccttaattcccattctaatgcaatttgatagtttgtatctaggatcaatagcaacacagaagaagacagtgaagttgagtagttgatcccccttatctttctctcctctcttctctctgtccccttgcctctcaccatacttctctccccaatacttgtagtacttcattagcattcttgtacccatttccttgctcaacttgtcttcactatgagaccattctctcaacagaagtaatacatcagcaatctcatggaaataagtgtgagatgttgtacgactttgtacagaaacacggagagtgaggtcataaaagtgttcaagaaaatcagccatcttcctagccttctcccaatctgctcttgttggtacccctggaccattctctccttctaattctaatttgtagtatgggtcttcatcactatatctttcaaatgctttttggtacttctctgcagcatttaacataagataggttgagttccatctagtgcaaatatctaagtttagaaatgctttgctctgtaccttggctaactcagcacatttcttaaattttaccaacctagatgttccacatctgataaacttaacagcagcacggacacgttgaattgatgtaccaatttccttcaagccatcacctactattaggttgataatatgagcagcacagcgcatatgaatgtactctccttcagcaacacaaccttttgactcattcaagacccttctcatatacttaattgcattattgtttgcactagcattgtctactgttattgtaaaaaccttgtcaatgccccactcagccaagcagttctctaatgattttccaatgtcctcccctctatgtcccttaaccaaaaaaaaaccaataattttcttctgtaggttccactcattgtcaatgaaatgggctgtaacacacatgaagttttggctgttcttagcagtccatgtatcagttgtgaggcaaactcttacacaattgtccttaaaaaatttcttaagcttttctttctcatcttcatatactttaacacaagctctagtgattgttcttctagatggcagaacaaatcgtggacatgctaaagtcataaatttcctaagaccagaacgctcagataggacaaatggttgttcatcttcaattatcatctcagcaaaacaccttctaagtttatctggatcaaatttccaagtggtcacagtaccaagagtactattgccatcacatggtgtcagttgcaaagttccttgattatcaactactggtttgttaggattctttttgcaaatctttagatgagctttcaaggatgacgtaccatttgttcttgagccgcaatgaaatagcttggtacaccacttgcacttggccctctcgtccccattagcaagtttgaccttgctgaaactttcccatacatcagatcttagagccattggttttctttttctggattcttcatcagctttctcttcatccttggactgctgctgctcctccttgtccttgcttgcatctaccactccagtagttgacactccggttttagtgtcttgagattgagtgtgattaatctcacaagcaacagtttcatctgtgtcccccatctagatcaaatgtttcaaatcactaaatcagaacttaccaacatagaacagcaatacaacactcattcactcaacatggactcaactagaacaaacgaacaagaagtgaagaacttacataggaggactgctcggtccgcgccgccgttgtcttggtcggagaactccacgagggtgttgccggcccgccgccagcagcccgtttgccggccgccgagttagggtttgggtctttgggcgcagggggcggtgtgctcgcgggcggctcgccggggcctacagctgctgctcaggggaggggagtgtggcgctgcggccgtgcggcgtgccgcctcgagcccgcgacggcgaggtagggcagcggcagcgctgcggcggcaccctgcgcggctggcggccgggctagcggctgcgccgagtgacgagtcgggggcgtgacgactgacgagtcgggggcgtggcgtagggttggccttgcccttgatggcctgatgggctgcgaactggtgggccgtgggctgcgctgccgcgggatatgtcggtttaatcggttgttcggttcggtttctctataaaaccgccgccgcgggatatgtcggtttaatcggttgttcggttcggtttctctataaaaccgaagctgaagccgtacaccgaatagcacaaaaacagaaaccgaactgacaaccgaaaaccgaaaaaaccaacaattcggtttggttcggtgcggttcggtttgcggtttgcggctaaaaaatgcccaggctgacctcaagctaccttagatccaaacgtcttcttactgtttcttttttttttttaccatacaacaattttgcaaactctaaatattcttccctctaaatattcttcccccaccatttcctttatccttgaccgctatctgtttgaaataaaatataaatatcaaaaaatgatgcaccatcaaaatactttgcatggtaaatataacaatacttatcaaaacatcattaaaaattcttactgctcaactagaaaatctcattggattaaaaaaaaagctaacgaataaagcatcagccattttgaatatatatatctttcgtttcaaatacgaactaaataattcctataaaaaacctgataatatttgtatgctatagaggatcgatgaatagtactaatgggatataaaatatccagcgtgccacgcgccattttctaatcataatgttagaacaagctcgaaattgttacaactcacatgcaaattaaatgccatcgactagtgaactttggtttagtgatcgtgctagtctgcaaattaagctgcatttttgttaatatctcgatggaaggatggcagccacgacgacagcaacgccgaacatgaggatggcgagaccggtgaagttgacgacgaacgcttcgctcggatagccgtggaaggggaagatgaagcgtgctaggccggtctcggcggtgcagatggccatgaggaagatgacgatgcccaacaaaatgtgccatggcgcgtagtcagccctcatcgtcatcaccgcccccgggaatacaaagtagacaaaacccaccagccactgcaaataattttagtcaccggatttagtgaaatacaaccgcctcaccatttcgcttaatacttattataagcggaaacagcttatcaacggtcaaaaaaattgtgaatttagtttaaaaaaattgtgaataaatcttttatatacgtgttattagtattttaaaaacagatgctgaaaaaaaaataaaccaatatgaaaaaaaacccttaaaatcaactctgaaaattgagtcataaaattcattgcctcaatcaatttgaaagtcctctggctcacctgaaaggcatagagtgctgcagtggttatcccaagccaagcatggagggagcggatgtcaggggcgcggagatcatggtggaacttgaaggcggcgtacaggccgacggcggcgaaggcgagggcgaccagatgcagcagcaggtgcaccgccttcttcacctcccttgaccccagcatgatcctgtacgccattatcgctgcgagcaaccatcatgaagtacttccatcactgcacagctaatcagtactactaaagctatttcttcacatatctcctctcgatcaatcacagccattttctttcatttactttgtcttctcaacgaatcacacacttcatctaattattctcatctactacctccgtcccaaaataattgcaattctatgttatttagcatatattaaggtttgaaagaaagactacggtgcccctcattaaatggtgtttatgtgagagtgggaagatggttgagggtaaaatagggagaaatttgaatgagatatgattgatggggcaattagtactctagaattacaattattttgggacgaattttgaatcctagaaatacaattattttgggatggaggtagtatttttttaattcccgtgccaacctcaaaaatactccctccttccaaaaggctaagtcctatttcttttttcaccaaaaccaagaagcaattaatttgtttctatgtgacaaaaccaatgagcatgcaatcaataagcactaaaatagcttcttgggtttctatcaacaatttaatttagcacataataactacaaataggacttagacttttggaaaaaatcaaataatgaaataggttttatacttttgacaaggagatagtaatgtatactcctactccctatgcccgtggattactagttcattagctgataataattaatttaccttctcccgtgcagatgacaaggccaatcaccatgaagagaggatgtgcctgaaaaaaagcacagcaacatataacgttggttgcttgtaattgattataattaattaagtaagctcaaggtttggtacaaacacaactacacaggtagattagacaatttgatttgacatcaccgtgtaaacgagctgaggggtagagctcctatgccaggaccaggagacgccaccccggaagtgcagcacccagacgagcgtgagcgtcagcacggcggcggccagcagctgcgcgaccaccaccaccggcagcgcggtgagccggaagctggcgctgctcttcaccggcatgactatgcctctctactcttcttccccgacccgccgcccgccggctgacacccacgtcgagctcgccgccggcaccaccaccaatcaccaccagcaaccacggagagatggcaatggcatacaaatgatacaatgctgcagtacacgggttataagggctttgttctggtgatgcaaccaaggagtgctcaagtaaataagaaccgggtcaatgcaatcgtaaatttatttgatagttttcaatcctgctaagctagctattggaggagatgaattagggtgcgacaaagccaaggaaaggatgataaaaccggaggaaaggtctaagttttggactgtttcggatttgtccggacggcagaggaaacagcttagattgaaatcatcccagctgggacagatttagctggagttactacaaattgcccattcatcagggatgctggagtaaaaaacaagggacgttattatgattttatattcgtatcaacctgcgcgtcgccggcttgcttcaagcacatactaatagcttgtccgttcctgctggtccatatgttgtgttgttgtgttgtcggtccccctcgcaagcttgaaaagtacaccacaccgggaaggcaaatcaatccatcagctcaaatgcggccgtccgtctggactactttgcttgtcattgcaagaatttctgcttgtttgcgccgagcaggttcttctcatctccagccaaactgaaactgaaattggtccacaaccacctcaagccccacttctcttcttgtagtatgtacgtccaagacctgatgattataatccatgcttctggtgagaacagaaaatggataatgtaccaaaaccggttgcatttttttttgtttcaacattcaagtatatacagtataccaaaaggatataaacgcagccaagaatatgtatgaacataccaacatagccgtcctatcttgtcctatgtcctggcatcgaccttggtaaccactgcattcaccaatagacagttagacaccacaggccctgcacataccacatcatcatgtacaggggaagggacagcaacaaacaacaccggcaagcaaaacctaagagcccaggaaaaatgctaaggtgagggctagtacaaaaaatgctgacctgggatctcagatgacaaccatagaaaccagcatccaggctgcttgcaaaatggaagagagaaccagcatcctcccaaacagcaggaattcagatatagaccaagcctgtaacagaatcacgaccgttcatcacagtttcacagcaactacacaagtaacaaacaaaaccagtactatatggctgacatacagcagacagaaacatcatgggcttaactctgcttcactggaaaggatcaaaactataacacagaccatcacacaagcactattaataccaagagaacacaaaatcacgaaaaacaaatacagcttaaaatatgctggggacatcttttgtgagcttacaatatatacacaagacagcattcgggaacccatgggcaacagaaccagaggcaaacatgacagctgaatcaaataatcaacttttctagatgcggattttgtatacagagggagcttatgtcatatgttacaaaagccctgcctatgttagcatactaatcctacaggacatatcaagcatgaatgttcgctgcagcagcaatcttgcaacaaaagcttgaaacctaacctgctctagagccagtgagagttgtttttctcccggcatgttttcaaaatgaaaatgcccatgcatgtatatctatgagatgataggttctgttaaagcatgctaaaaagcaagcattgcaatgtcaggcataatctgtccagctgacaccttgctcaattctggtcactagatatggaaatcctgtgatgtttcgaaacactgacgacatgaagcaactttgttccatgaggcacccatccaacaaaatgccatctctaggtacaggcacctgaggcttacaacccattgtcactagaggcttggtttcataatcaatcgtctggtgttgtgaataccaacaccttcccatcaccatcccatccaccggtagagccaagtgcacatcttctgaatagacgccaccttgtccatccaagactgtccagggctgcacagaccaagcaaatgtacagttacagcagtgcattctttacacttctcttcttgaaccattcgacgaattcggcctcctaggcattccaaaaggcaaattatctctagacctatcaccaggacgtcccagatcatccaaatttctgtaactgccatttctcggaacagagttagaacgttcatcctcatcaggcctcatgctaaccctggaatctggaagcatttccaaatgcctcggtcttggtccaccagtcctcatgttccttatgttatttgaagtgttccttcctggagtgttagagatcttcatggcaaggaagtccttgggaatggtatcaagatccataaaacatttcctggcctttgcatctgctatcagtaaagcccagtcctcagactgcataagagcaccggcattaccaacaacctggaacagcaaagattatcatcagtacccaaatcatagatctaaggtcatacaacatttttttgaacgaattttgaataaggggaagagacgtacccatagagctctcctagctctagtaagagcaacattcatacggcgtatatctgccacgaaacccacaccatgatttgaggcacggacacatgacataataatcacatcacgctcctgtccttgaaaagcatcaactgtgtttatgtaaatgtccttcccatcctcagtactcataacctcctcgaattcccgctgaagacatttcaactgcaacttatatggtgtgattataccaacagaagctttcttgccaccattagctctcaagaacttctgaagattctcatacaaacgcaaaacaaactgtgcttcatgaacattctggtacgaagatgacccacctctatgagattcacgaccatgtgagatgtcatagaatatgtaaggtgccattaatgcatctctataatatgcctcgtcaggcaatttgacaacactttcactatctgtaaggcgcccttgatagaagtgtcttgatggaaattcacggatctggggatgcatccgatactgcaccgataacaaaatggtagggcaaccagacaactggaacctctcaaagagactcctgctgtacattaaagtcccagctgctttgctgataacagttgcagggagctgttgtggatcaccaaccaagacacacctagctgcaccgagcgaaagtggagggaggactgctacttcactagcctgagcagcttcatcaattaccaccatatcaaagccatgactaaggcgggaaaataacttgcgaccactgcttgaaactgttgtaaaaacaatttctgcttcattggcgaaacttgcttctagactagccctagcatcttccatattgaagttgctgccaacacggaacctgctttctaatatcagcaggcgtgacatctccaccaatactttatccctgctttctactgaagcagcaagtttctgaagtagaaaatcacgactacgatctctttgagcgagcacatcagggtctactccaactgaaccctgcgatctgccagccgctgcaaccatagtaagttccctttgtagaagggctatctcctgtgataattgctgctcacggcattttagctgttgcagccacccaatcacttcatcacggcccttcattaaaagctggtcagtccttcgctcaactgaaacagcttgagcagcacgagattgcgaatcaactccaacacgggcaacatcaggacgatagaccttcatttcaccatctataaaaccacgatcaagaacgcgagcaagcagctcatctgtggcggcgtttgatggagcacatacaagcatccgtggtttggggcaaagcttgggaagagtgcggaaaaggttctgatccatactctgtaaaacttcatcaatggaccctgcagcaacagtctccgagctgttgcttgtgttaccgctaacttgcttgtaactttcaggagcaagcttcttgagcagagcagcatagtaatgttgatactgaacaagatggataacatttagcatcccccataccgtatgggtttttcctgtcccaggcggcccttgcactaatgtgaaaggccagggttcttgtttcttcacagctccgttgcttgtgccagcagctgtatgcattgcagcccaatgaatcgctgatagctgaggcccgttgaaagtacgatgcagatgatcagcaaaatttggagtgaaacaatcaggcatagcaggtggctgctcttcatacttggggaagtgctctggacttggctgaagaatagcattttgcatctgatggaaagatttttgttaaaacaactggaaaagaatattaacaaagaaagcaaaatatataaaatgcattacctgaacattgagtctgcggaatgcatgcaaggcaacatattccctttgtgttgttgctagggaaccaagactagtcagataccaggtgctccgaggttggagtttcctcaaaacattggtctcactgcttcacattcaacacaatagagtgataagataattggaagtcaagtattcagaacaaaagcgtagacaatagaaaaaacattataatattatttgtccatcaagcaggaaatcctacaggtcataagcacatgaataataacaggtctttttgctacaggctaacaaatgtagtctagcaaatgtatagttaatctgagcatgttatgcatacatgggcaactgtttaatgcaactgtgagtgtaccagtgtagtgctcaccggctcacaaatgaagagttacttaagtgctggactgaactcactaattatctttacttttgggaatttggaaggaatgcatcatagaacatttcaacatagaaggcaatgacacaagttgtggctatgatcaaggatgacacgcatgcttggaccctggcaggagtctactggatacacaacaagcctcccatcgtttgccctacaacttataagccgcttttggagttgatttttgtggtttctttgttatagtttatattccagcattggctttcaaattgctaagggcacatacataaaagttttaccctcaaatttccttttgttgctgataagccataaagcttataatcagcattagcccaaccaatggcagatctatactcatttaaagaactccgatggtggtggtggatggtgagtctgccaccacacaccaccactgccatataggacccctaaatactgagtaggtggactactctatagacagatgtacaaatacatattaaaaggcaacaacgtagcttgaaataattaatattgattacaatgggaattttttattatgacttttggggctttagagcgcatggtggggttctctagctaaattatgatgcaaagcacaggcatttacctagttttggtagatagacctgcttgtgtaggacttgcttgcttgtagtttgttccatctaatttcctacttcctccattatcaagtataaacatactttcctaagttgtttggcagagactaaaactaagtgttttacggtcgtacataacctagaacctgttgccttcaatcccgcttaaagaaagaaatggcaggccttctgctatcccccccccccaaacccccaaaaaaaaaggactcgacagtgcatgcatgtaagcgttgcttattgtatcaaccaaaacaatctgtatgtcaagcaatgttatatattgagcattgcatgctctaggaatgccatgtctaccagaattgaacaaatcctaatcagcagataccagatatatgagcattcaagggacaacacaactctaaagagtacacattcagaataataaataggtttgcaatgaaaaaaaaggtagtagaattacaattttgccaaatactagcgtacctgctagaatcaaatgaatccccaagatagaagtgaatgattgccccaatgggatcgcgtgtatcaataggcgtatggcgtctgactgtaccaacaagccgtccacactctgactcagtgtcttcatttgaaccaacattccgcctattagatctacttgattgggaagctgacaacaaagaatagataaataacggttattaaaatatttccttttcagataaaaggaccatcagggcttaatacaaatgagaaaaatcaagcatagctacctgaaccaggcctaggaaaggacaaaactgcaacttcaccttctttgaaagtccatttatactcgtgcattggtagaacaacaacatcataccatcctgaaagcattgcacaagcattgacaggtgattgcattgcaaccaagacatgtttgtataatagcttcatggaaaatgacatcaacaaaacatgctggagatcagaacatacctctttcacgcctctccactgttttcacccgcaccataacatgtgcatcccttgatacagactcaagactctcctcataggaactatataactgagctcgacattcctcaaagagcaaaggctcgaaaactctaatgtactcctcagcggattcaaaacttttaggaacacattgaagttctgcctcctctgttcaggtaaaaaattacaaaacatgaaacacgcaattagaacatagacaatgtgattaagaacatatacagcttgttggaattttagaatgaaaacagaaacaggaaagattcatcagtcatgtataagattcgtatgagcccaacaaaaatatcagagaagaaagagttctactttgagcaaacttcgaacagccttaataacaaagcacaagtgctgagcattaccctattatttaaaaatttaaaacatgtatttatagaatttcccagtccttgtggcacatggtggcacttctagttaatagaagtcactaaaaacagggtaaaagcattcatcactagacagttccacaatttcaagcaattgtatgcattttcccatagaacatcttattgtttttcaaattgagaaatggacaacaaagaacaaacctggattgtgccagaacttgtcacttgtcacctcccgtataagtcgttcaacagaagtgtcttggtattgcatgttatttgctggagtttgttttttggaaacaagagacctcttgttgactggtttctgatctacagtattctgtcctgttacaaccgatctctgagaagaaatttgtctgccctttaactgtcttggcattggttgttgataaccatctgcaggggcttcttcagcattcattttctttggccggccttgagatcccgtctcagcatcaccattggattcagaaatttgatcgattggatctgcagaattacttcgttccgaaccaagcatttcagattgcctctgatccctgatggttggctgactttgtctttctgcagctctttcagcaataccaccaccactgcgaaaagcttccttcacagtacgtgtgacaattggtgctggaaaggatgactgtcttctgggtgttgatgtcttcattgtgccagcttgctttgcatcctcaacattaatgaacacagtttgcctggctctctttttacctagcattgcctctttgtgttcatccaacttaggtctctttgaagggttacttgcaaacttcaacgcataattggcttctacacctctaacatcctttgacttgttggacagatctgaatcatccccaagctgatttcctttgttttctaaatttttcgtgctctcaagtcctgtgggaccacgtaccactggatccttaggcacatccatcatttcggtgtcactgggctcagcggcggcctcatctttaatcatgttaccagatttgacagcagtaggttcactttcttgggaatcccttttcacttgtgtagttgcagtaccagccaactcttctttgttgctaacactactccctgcagtgtcagaagcaacatctgcatcagaccactctccttcctctctttccactgcctgagaaacctgattggaggacccaatcattttagcaacaccatcagagctatggttgattaacatagatgtagaggctatgctagcattcaaattatcttctgccttgattggctcctttgtaatttgtgaatctttgctcctcacaaaaggctgaaaacctgaaccggacggtgcgtgcttaaaggcattattgtttaatatcccctgcgactgtgttacttcctgttgcggaaataaagagggccctgctgtgggaacaggaagggtcttctgaggttgtgacacaacaactgcggcttcttcttcttcagcttctgttgggagctcattaaggtcaaataacatccttccacgagaccccatgtcatgggtaaatgcatatagtttgaacctttggaaactattggactcgataacaatcttctggggtaacagaacctactttttgaaagctataattgaccttttgtagaaaatatctgcaaaaacaaccagcacaagataagtaatatacagaacgaacagggttctcaagggatgcttggatgcttcggtccgctagtgagatggctggcccacagaaggccaggagaactgaacaagtgaacaattagagcagagtccacatcgcatgatactgcaggaaaggaacatttcaatcaggtgaagtgacctgaaaatcattcttcgctggattccttttgtgctgtgaccctgcccactccgtcctcttgttgtccacttcctacccatctcaagaatttgggttctagcaatacaggatctcagcatccaggcagacccttttacagataaagtaaataagtatgcagaacatagctaagaacaaaagaatgatgacacattggtggaaatgtttgacatagctacttaagagtgcaagctaggctctagattcttcgttgtttctaaaggaaagcaatgtaaacaatagcaccagtactatagtgtccaacattaaggtttagaaaaggaagaagtaaattaaaataagaatgatgttggactttaacatgagctgcagcaatgtcaggcttgccgatattaacagagtactaaataaaagaaaaacacaattaaagcttgcataaaacagaggctacctaaataacaggaggagaaagagtgctcaactagtctagaaactttcactagcccaacccaatcctagatctaatccggcactagcaatctcctttgcaatcccttagtccaaccgtaactgtgttatgattgtgcatgcgacatttgccgaagaaataccctgccaaaaggactcatgacagaaaattatcaatgccatcaccaccaaactacaaaaccgtaactgtgttatgattgtgcatgcgacatttgccgaagaaataccctgccaaaaggacccatgacagaaaattatcaatgccatcaccaccaaactacaaaagagagtataaacctaaaagaccatcgagatctttgccaaatctaaacaactttgtcccacatgaacaaaaatacacactaaaaccgacaaataatcccttctacggaatttgccaaaacatcaaccgtgagtgacagcctactcccaatcaaaagataaataacccatagctactccaaactatagtcggaactaaaaaagaccacttatctacaaatgctctcccaatcagtgcaaatgctacattctacagctgcatcacaactattgagtttaaaattagaaacaaaagcagatattactgatctacttaactctgattggaagatattgagttctagctaccccaaattaaaagctaattacaacagaagaaacagcttctgctaaacatgccccataaccaaaggctacatctttttcagcagcaatgcaactcttgaaaaagagaaaaacagctacggaatctatgtgacaaataatcccattatgcaacttcacaagatatagcaacaatctacagctgctcccataaagagctacctatgacatgagtaccttcgggtaaacacaaaccaacccctacacgatttcagacactaagacatttactaagtaacaaaaaaaacagggcagccagcatagcggcagataaagcaatagctttaaccttctagtggttgtgacctctccacaaaacctagcatgatgaatactacaacataccaggactattgaaacttggaaaatacaccactgtagtaataacttaaaatgcttgtttgatcaacctaagcagagaaactaagaaactctagacagcaatagcagcagcagctgatgacagcaaaagcaatgcagtgactaactctagtcaattgtcaagcactagaatttattacgaaaatttataacagagcattcaacagacgcgcagaacagcagcacatggaccattcgaactgaatcatcactcggcatttcattccactcgcaaaaacaaaaaggagaaaacgtactaccatccctttattaccacaactccatgacgcaattccccccgttgctctgctcgatctaccaagcacccccgtgtatttaaacccacccccagtcttaaatcagcaatctggtggaaatttttcgtaaagcgagggggatcgttaccaccccgcaaacagttactagattcggcaaccaccccctgagccccctgatccccatttcgtttctagattcggcaaaatctcctcgagagaagtttctcctcaataaaagccccaattcggcagggcaaaaatattaaaaaaaatcccccgccgcgtccagtccaatcaaatcaaaccaccaccacacatcacgcgctatctatctactatcaatcaataatctattagggttctatccgttcgccgttggtcgtcctagggttggttgggagcaggggaggcgtgaggggaagggggggatctccgtaccaggcgatcggcggcggcgcggccagatccggccctgtgcctcgtctcctcctcctcctcctcccgcggcggcgtcggcggctttgactagggtttcccaccgcgcgctcctcctcctcctcgtgtgatgcggtgcggtgcgatgcgatgcgtttgattttttttttctcaagttttttttcttgccccccttttttggtctgggtggtggtgtgtgtctcctcctcgcctcctcccacgagcgagcgagcggtcggtgagcgtgacgactgcttccttcttcgagaaatcgagagaggaggagagggggggtgggggtgggtgtgaggcgaggaaggggggggtggggggc

SEQ ID NO: 10809 - DNA, 8633 bp, Oryza sativa
ttaccgggcgattgattttagatttacggatgacggggacgtctcgctgcgttgcgtgtgggacccgatttagtcgctggctggtggggccaagccgtcggggaggagcagagggtgtctcagtcactggcgtgtggggcctgtcttaggtggggcctggttgtccgtgagtaggcatgtggggacacgcacgcatggggtggcagggaggaggggagtaaaactatgggatggatggggttgggaatttaggaggaatggatggggaatccaacgttgtttggtaccacagcagttgcagcagccaaatggtgggccccactgcctttataacaccgtaaaaaaaatctacacaactttatgtaatttctcttttttgcacatataggcatatagccattggtaagtttgttggttaattcgatactatgtgccattataaggcagtgttcaagtgggaaagataaagtgagaaaattccacgttttttgaactaatacatgatgtgtttttaataaaaagttataagaatgttactttcaaaagttatactcccccgtcgcataatataagggattttgagtttttacttgtaacgattgaccactcgtcttattcaaaattttttgaaattattttttattttatttgtgacttgctttattatctacagtattttaagcagaactttacgttttttatatttgcaaaaaaaatttgaataagacgagtggtcaaacattgcaataaaaaacttaaaatcccttatattgtgggacggagggagtattaatttatttttcaaatttaaaataatcaatacttaattaatcatacgctaatggcttatctcgagttatgtatcttctcaatcttttccatcctcttctctcaaacataatcttagtttatctgttttgaaaaatatcattactatttaactatatgtgattataatttagcaggaatttaagatgtacctctacttatcctcctttgatacatttttctagatttgttgttgattgcgactttattgtatgagcgaaatcagaagctgacttcatgttaataagactaatggtgacatgttaacttgttagtgcttttcccgatttcgtaagaatgaaaattacgaagggatcactatcaaatgggccttgaatcttgatttcaacaaagccggacgcgcccatatcatcggaggcaactaactaaagtagggaagatcagcccatagtagacaaaactgatgcgttgttgtgaaagtttagtaatccctccgtattttaatgtatgacgccgttgactttttgataaacgtttgacctttcgtcttattcaaaaaacttatataattattatttattttattgtaacttcatttatcatcaaatattctttaagtatgacataagtatttttatatttatataaaaaaataaataagacgaatggtcaaacgttgattaaaaagtcaacggcgtcatatattaaaatacggagggagtatatattaaccagctttgcatccctaagcctaactaagcaacatggacatgtcattatccttctctcgtctctgtacggagagactaggtgattttgtcaaggtagtgatatagcgcctattgattgacgtataatatacccgacttgtaccgactattatcttgtacaattgccgccaatttgttcggagcctcaaatatgatgcctatatacccctccgtactcgtaaaggaagtcgtttaagaccatgcttaaatcaaaccttaggaatataaatcatgaataactctcaagttgttgagtttgaaaatgtaaaaattatatgaatggatctgtcttgaaaaatactttcataaaagtatgcatatatcactttgcaataaatatttttatagaaataagaagtcaaagttgtgttttggagaccgtatcgctgtccaaaacgacttcctttataagtacggagggagtatatggtaagttactgcaattattatgttccattaatatctctcatagtttgtttgatgttttatcagccacaactaaaatttaaaatttaaagttaatcttagttgttttgggtttttttatcgtaatctactttgcagcattggtttttttataccatgaacaatgcaaaaaaaattgtcattgcttattagccatagcttaaccaatcacaacctaagcgaggatagttttgtatgaatttttgtgttggctagattctagagattaggtacaaaattcactactataaaaagttatttttatgcggtcaaaatccattttttccgtgcggtttggtcacccatctacccaaaagtgtctgaaaaattactattttttccatgcggatgcttatattgtccgcacacgaaaataaaaatcacgaaaagaattccaaaaatcccatcgtcgtcgccgccttcactatcgctatcaccgaggccaccatcgcccttccgtccgccggatctgccaccgctgctgtcggtgacatgggaccgggagtatcatgactagaggcttgggcagccgcggtcacccacgtggcctgaccccctcgggggggtcgggcccgagggagacgtggccaccccctcctctgtctccccgaggggtcgggccgctcctgtttcggccccgagggctggggcaccccgaccccctgtggtattggcgccacgtgtgtgggttaggtgggcacagcggtgctcaccaaaccacatttattgcggaatggacaagtgcgccacgccgcatttaatgcagcacggcgtacgcatatccggtccgtgaccggtcgcagtgtgtgaccggtcacagactggtcagatcgcgggttaggtggcagcaggcggcctgtcacacgcctcgccccgtcccgtcggaatgatgagagcctcttggcactcgtccctagctggagccggcgtggtaactcctggagttagcacgtcagtcccggctcgattcatgccaggcttcatcgcaaccattgcaaggaagtcactgtatgaagaagggcagatgtgcggcatgctaaactgaagcgtggtggagaagaatgaccggtctgtgactggactgacgccagtcacgtcatcggcagacagccgtgctcccacgttgcatctgtttccggcggagtggaggaaggtatgacccatcccatcggagggtcattcagacagcggccattgcagatttccgtccattaatgaagaaatgacagggtgatcccctgtgtccgacgagtgacggcgctgggcatcactcaaggacaagcggtgatttagcttccaggcggaggcgcgagtcgagatttggtcaagatagggtgggtccccacccaaaagaagagtaggtagaagtggtgcatgtggtatccccttgagatataaaaggaggaccttgcccacaaagaaagggggacgactctaagaagacttgagcttggggaggagatcgagagaaaaaagaaccagaagagaaggaaaaagaggggttctagagcttgaactctcttgctctccggctctctgtaactctttctcacacatatccaccagaacacaggagtagggtattacgcttctcagcggcccgaacctgtctacatcacccgtgtctcgtgcgtttgctctctcgcgtatattccacagatcgagggtgaagaacctcactcagcgcccccggccgaaccggcaaaggggggcctgcgcggtctcccggtgaggagccccacgctccgtcagctgccgtccctacttactcaaatataataaaccaatggatagtaggaaccaatggatagtagggtagcgtggataaagatttttgtctcaaatataataacttagtaggggtagtattttataaaagattgtttttactgctaaattatacacgctacccctactatccattggtttattatagtcctaattagtccgggtttatacaccacccatccatagaagataactaagtttatttaaccatgtcctgtctaaccatgttgaaggataaagcttggctatattttagaatagagagaataggtaaaatcattatttatatatttatttggctgataaattttgattgaacattaaaaaaactttaaaattaataaatatgatttttaaagcaattttcttataattcgttttttcacaaaacacgttgtttagtggcttcgaaatcttgcacgggaaaaacaatgaaggtaaagttaggatcgttgacttaaggaaacagtctaatgatagaactaagggaaaagtgcaccgaaggtccctcaacttgtcatcgaattacaaaatcgttctctaaccacaaaaccagatatataacatcccttaacttacaaaactgttcgctttacatattttgatggttttgactctacttttgtctgacatggcaggtgagtcagcgtgagacccacgtgggccccaaatgtcagtacgccacgtcgtcgggttctttccttcccctcctctccctttctcacactcatctccctggccggcagcaggccagctgtggggaggaggtcgcgggacgaggaggtccgacggccggccggcgatgcggcggcgggagcacgggggagatcgagcacggcggcgggcagagtggggcgacggcgaggcggagcggcaccgcacgaagccggctcatgtctgccatagcgtcgacgaacgacgccgtcgtcgcgaggaaggaggaggcggggggaagcgggcggcggtggaggagctccggcgtcgctttgaccgcgggcgctacgagctgcgtcggcggcggtcggaggtcgctgcggcaatggaggagctgcgcgcgtcctcctcctcctcgaacctgtcgccgccgtcgtcgtcgtcgtccgcgggcgccccaccccgctccgtgccgcgggtttcgtgcgccaccgccttgccggccctctccgcctgccgccgcctcggtgtcggttcccaaatcatggcgcaactgaggttcgcggtactggctgttccgtcgtcaatagcgagcctaacaaggtggcggcgtggccggttggaggacgaactctggttggagggcgccatcagatgcgggccgcttcggctcgatgaggcgctctggagcagattatctatcttgtcggtaatctagtggctgcatctgattgcatcgactgttcaatctgattacttcgtgtatttcccctaactctctcttaattatttttctttcgtcagagcagatagtagtgccaagccatgaaaattactagatcaacatacaaaattgtgcttcaatagaattttaactaggatgatttcttgattttgttgtagacacagcccttctcatatggatcaataggcaacatgactacatgaatcaaccatccctttaaaaaagtactgcatgagtgaagtcacatatcgctgctttcgagttggagaacaaatctcgccgtcgccgacgcgtacacctcccggctcatgatcacccatgacgtcgacggcggcggaggaggaggaggcgccattcgagctcgctcagacgacgccgtacggctgcttggtgcgtcgccatcgccagcccgcgcaccgccgacttctacggtctctacacctcgcgcacagcctccaggacgagtccggcggcgctgtgccacgacggggcaacgaggatgcggacggcggtgtttcctccgccggccgccgtacctcctcctctccccacggcggcctcctccccacagcgccgcccgtcgccggcctgagtaaagagagagcgcgagaaagatcgaagaggggaaataagagagaggtgatgaggtggcatcttacacgtgggtactacgatcagccgtcatgtcagacaaaaccggggtgaaaaccgagcatgttgtgattgagggacgattttgtaacttgatgataagttgagggaccttcggtgtactttttcctagaactaaaggatagaacctgcatacatgatcgttgtgggccaaaaggcccaatatgttggggttctccatcgtatatatggcccaatgaagagagtgcaatgaatgctgctcgatctggccttccggcctgtcagtagtcagtacctgcactccttaattttcatcaggtttcaatgcactaaagaaaatggtacacgtaattaagatttcttacaaacctttttatcaacagtcactcaaacatgctactcctaactaggagtagttaattagatagatcccaatttattactcccctcgccttcgcagtacatatcacttagtgtatcttattcacctccatcggtagcccacattatgtaataagtccaaacggtttattagagcaagaaaaataatttgcatgtaagatttttatatatactccctccctcgtatagaaaaaaaacgtcgttctagccacaacctcgtttgcgatttaaccgacgttctgaaccgcagcaggctatgtggccggaatgaccctcgtctattcgatacccgctcccgcaattaatccgcagcacgcccgcgctcgcctcatttaattccttaagcgtcgcatgcaggcatgcagcacgccgctcaacctcgccgccgccgcttgcgtcaagctcgccggccctgctctcgtcgctctcgccgccgctgccacttgcgtcgcgctcgccggccgcactctcgtcacgctcgccgccgctgctctcgtcgcactcgccaccaccgccgcttgcatcgtgctcgccggccccgctctcgtcgcggtcgccgccgccgtcgcgccgctcgttgcgcccgctcacctcgtttctattcttaagccacacgacgctcgccgctcacactcacgctcgccgccgccgctctcgtcgcgctcaccgctcacgctcgcaaagccatggaggtggtgccagactcgaagatggaggtagcgctggtcttgtcggaggtgttgccggactcggagatgttgcttccaccggacttcgcctcgtcggagttggcactgccagacgcagagatggcgccggactcggagatggtgccggactctttgccgccggactcggagatggtgccggattccttgccgccgggcgcttttctatgcgctcgctgccatctcgtccatgaggaccgccaagcatggaatcgtgcgcactcgtcactgtggccgtgctctcgctgcggtctcgtccacgcggaatacataatcggtgccatgatttacggcctcgacgagttcgactgcgagcttttcattcccgatctagacaatgttgtgatgcacggcaatagtatcgagttacctacacacgtgctcaagatgctcgacgagaagcgcgaacatgagctcgctgctggaaaggatgatgccaaagcaacggtaagataacacaactaatcgcattacaatgatgtctctattaattgagtgcataagctaactagctagcttcattctaaatgtttgatgcagcaagagtagcctcggcttcatctagcaaagatggttgacaatggatagaagttggtagccgatcttctctttctaatgttccttttttcatgtgaggaatcttgaagttgttgcttcctttcaccttcatagcttccttcaaaacactttgaagtgttagaaacattcggtttgctttgtgtggagaatactccatgaatgcctacaaaacaagtgtgcaagaaatgaatcaatgagaatattgcatgttaaagaagatgaaaaatgtgtgaacatttcgatcaatttacctcttgaaccgttggaattagtgcctctactgtttttgcattcttcttgtattgaattgcttgaatggcttaaaaaaaacccaagtcaagaatgttgaaatccgtagaattgggtggttgacaaattaggcgaatatcaaatccttcttgcttaccagcctcacaaaacaacagatcatccaattttaaatgggaaggtgcattatcctgttgaatgaagattggtttgcccgcatcttctcttggccgtttggctctaatggcaggcaacactttgttgatcatgaaatctctaatcacgtctcttgtgatcgaagttatgggcttcataaccaagtctccacggacacggccggttctctcattacctcttctagccggttcataagtaacaagtggaaaacaaccaatcttaccatcaaaaatgcaattcccatccctaaaccttggccgagcacaaacacacaagaacatgagcctagggatgtaattcttgttcttacaagtccgatggggatcatcttctttgggcaacaaataatatttttcagattttttatggaggtagaaccatttttcatcgatgaacacaaagtcaaaaaaaatccttaaaccttggatcaacaagcaaacccctcctaatcatgtcaacacaccactttaacctagacttcttgttagcttcggtgaaatatggtttgatgctactagagtggcgcctaagcaaaccttttttcaaatacctttgtatcctccatttgctcatgtttaatttactacacacatcttctatggtcattctatccttgataggaatgttacgcaattg

SEQ ID NO: 10810 - DNA, 3734 bp, Oryza sativa
gaacacaggagtagggtattacgcttctcagcggcccaaacctgtatacatcgcccgtgtcttgtgctttttccattctcgcgaactttccacagactaggagtttagaatctcacccagggcccccggccgaaccggcaaaggggggcctgcgcggtctcccggtgaggagccccacgctccgtcaactatccacatattgtgagaagtaaaaacaactataacatagttttgtaggtcccatcttgctacccacttgataaacatacattgatgatgcccaagtaagcaatgtgattggagaacttgaaggtagaggatttaaaataaaccaaatttaaatgactataaaagaggtgataattaatatatcatgcatacatgtcttatactatgaaacatggaaaaaaatggttgttccaagttatagtaataatccactcattaatcgttgtatgggcttatgacgatgctactggctcagtcatcgatctcatgactccttgttcgtcggatatatcttcctttagaggatggataatggattgattgttattatatgaaagttctccagaaatcaaactttactaagttttttaccatgcttagagaaaaatatagcaacattaataacaccaaattagtttccttaaatttaacattgaatatattttgatattatatttatcgtatgttaaaaatactggaaagaaattaaagtcaatatttattttatgtaaaaatattgctacgttttttacggaaagaaattaaagtcaaagcgaattatagtacgaaacggagggaatactctattttggaatcggaatctcttactaattccatttgaccgctagaagtaaacaataaaattatatgagaaacaatgcaacagaaaaaccatcacttgcaagggatacatccaaaggatatgtgcaaacaaacggtgcaaataaattgtgaaaaatctgttggagtctaatttactttggttggtcttaccctaacataatcacctatatgctttaacatggaaattaatctactgagctgcttgtgaagctacggaggccggattcgttgatttatgctacgtacttacggtttttcttcttgtttctcttactgttttccttgtgatgttatctgtttgacatagcgaaaaccttcttaatgccagcggcactagctggagatagccacacgaaggtcttccagcgtttaaccgataggacgattaattaaggtttagagttttaatttgacgcaagaattaggcgtcacttttactctacattttctcccatttataaacaataaacacactggtgaggtgaagtgagtgtagcttagacaatctcaagatatatcggccccggtgcttatactggtaggatacgtgtgtataggtgagcgtgttgcaggcgcctatgtttgtacagtgtttcaagaaaaaataaacacactggtgaggatcagggcttaattattgcctattatatttagactcaaaatctgtttctaccaaccacccaaacaaaatttacccctccgttctcttattgatcagaaagaaaaccggtggtttttagctcctgaaaatccgcaacaacagtgggccgatacaatggaccaacaaaatcatcgcttcttccatatagctccgttcaacatcgagaggcactgtgccacatttttttcatgatgtaagtaggaccacatttttttcatgattgatttgacatcactgctgcaatgctatatcatgagttagcctaacgctgattataagccatacaaacatataaaaaaatgtattttatagataaaacttttatatatgtatctttagagatttaaaactgaatattagaaaaaaaaaccacgatgaaaaaaaactaaatatcaatttcaaaatcaagttttaaaatttaattttggtggcttataagctagctatatggtaaatgatgggagcagatgattagtaatgttaattatgaataaacttgcacgcctactgatcctatttaagagccttagctctcgccttaagattgcacatgtagtacttaattgcacgaagaacaccatggcacaacgtgtccaagaagaagatgagcagatgacgagcaccgatgatttgatccaagctgagatcgagctctaccaccactgcttcgccttcatcaagtccacggcacttagggccgccactgacctgtgcatttccgatgccatccaccgcaatggcggcgctgccaccttgtctgacctcgccctcaatatcgggctgcacccgacgaagctctcccacctccggcggctcatgcgcgtgcccactgtctctggcgtattcgccgtcgaagaccacaatggtgaggccatgtacacactcacccgagtatctcgcctcctcctcaacggtgatggcgagagaacacatgccctgtcccatttggtgcgtgtgttagtcaacccgctcactgtggcctctcatttcagcattcatgagtggttcaccatcgagcaagcagccgccatgacacccttcgaggtggcgcacggttgcacgcggtgggagattatagcaaatgatgccaaggatggtagcgtgttcaacaccgccatggttgaggacagccgtgtcgccatggatatcatcttgaaggagagctgtggcgttttccagggcatcagctctctggttgatgttggcggtggccatggtgctgcagctgcagctatagcgacggcattcccaaacatcaagtgtacggttttggatctccctcatatcgtcgccgaggctcccaccacccatagcaacatccagttcgtcggtggtgactttttcgagtttattccagcagctgatgttgtgctacttaaggtatgtacaataattcaagtgacctttgatatgctgtacttttagctgttgagtagcttcttcaataattatgaatattaatatgtgtcagatttgcatgtgatttcagtatattttgcatgcttggcaagatgatgattgtgtcaagattctgcggcggtgcaaagaggcaatcctggcaagggatgctgggggaaaggtgataattattgaggtggttgttgggattggacccaaggaaattgttcccaaggagatgcaaattttgtttgatgttttcatgatgtacgttgatggcatcgagcgagaggagcatgaatggaagaagattttcttagaggctggattcagtgactacaaaatcacaccagtgctaggtgcccgatcgatcatcgaggtttacccttgatgcttctgaaggtgtagatgtgcatctctgcgtggaacctattctagttcagtagccttgaggcatgcgcgtgttcacgtcgaggccatcattttttgtttttctgttgtcatatgtgctatagtatattgtgcgttgtgggatggcacaactcatgcatgtcgtggcttaagtctcgggcatattggtagcctcgatttccatttctatattcatcacaataagaggaagagaaaaccaaaagctacaaggcagtttgtagcgcccaattaatctttatcgctcatactttgttttgtctactcaccaagtgttcatgtgcgttcatctgttctagcgataacaagtggtatcagagtgagcatcgaagatcggtcatggtgatgtctggataggagaaccatttcttgacagggtcgaggtgttgctccc

SEQ ID NO: 10811 - DNA, 26584 bp, Oryza sativa
ggctgggtcgtcatcatgcggtcgtcatccccccaccaaccgcctcaccgccgctgccgcctcgcttgcctcccctgccgccgcgctgacctcctccgccacaccccgccgccgctcgcctcctcctccaccgccgcctcgcctcgcctcgagcagtgtgagctcccgccgctgctcgcatcctcctcctccttcaccgccgccgcctcgcctcgcctcctccgccgccttctcgtctcacgccctcgtcctccccgcgtgcacgccaccgagagggaggggggggtgaaagccacgccgagctcctcatcccccgccgccgccgcctctgcgtcaggcggcagcgccgccgccgctctgtgtccccggccatcgccaccgccgagagggaggggggaagccgcgccgagctcctcatcccctgccgccgcagcctccacgtcacgcgctgctgctgccgccgacccgttcgacggtgagagagagaagagagagtagtgtgtgataagtgggtcccacaatttttttttataaagagaatgcttactggactgccacgtgtacgccacgtagaccaaaaccaccgcggattagttcgagggggtaattcgtactttttcctactagaaatgacacatttagatattatagaaggtaattgtcccggtaatatatgattgatgatttgttgttacgataatattcttaatgataaatcaagatatataaatccattaatgttatatatacaattctgaaaaaatatgttaaaacatatttattcataattgttattaaacatttacgcctattaaaataaataacatataaatatatttaatagatagagaggtcgtagtcgcgaacacacgacttaagatgctagttgtcaatgaaatagttgtactaaaacaaattaatcgcattggtacaattatcatctgtcatccaccaaatatcaatcatgaatttggtacacaaattgagaaagaaaggaacaattaaactctgagtagtaacagcacgtagctctgttagttctaatcaattttttactttttgtttgaacttgtgtgtgtgtatatattgaacttagacttgcatgccgatggagtgattgcatataggttttgagttaaatttagtaagaggtccaatcaaataatcatttctatatttttgctatgttttgcaatcctctattttacacttagaccctgtttagttcacgagacgaaaagttttggtgtgtcacatcggatatacggacacacatttaaagcattaaacatagactaataacaaaataaattacagatgccgcttgtaaactgcgagacaaatttattaagcccacttaatccgtcattagcgaatatttactgtggcaccactttgtcaaattatggagcaattaggcttagaagattcggctcgcaatttacacgcaatctgtgtaattagtttttttttctgtatttaatacttcatatatatatatatatatatatatatatatccaaacattcgatgtgataggcaaaaagtttttgtttggaaattaagggcctattcgcttaatttcaaatcatagcaataggaaaaacgaaggaataatataggaatgcatatgcaaaactaaggataggaaaagtataggaatgactcttatagatagttggtagtaggaaaaatacaggaatctttgtattaagttaccacaatcaagatttgaatactctaataatttgtgtaacttaggttcagatacataatgaaacaagtgatttgcctcgatcctacgcgtaggaatagaaaaatgagatccaagtggatgttaattttcctaccaaaatccataggaatcacatacaaaggaattcttcctttgccataatcctacaaaacgaatggatgaacagtaattattcctataagaatggtttttcctccatatttcctatgaaacgaacaagccctaaacagagccttacattactgttaaaatcatatgtttttcctattcctctattttttttatttctactattcaaacgggcccaaacttatatttgaaagcagcaaaatagaattaaacaaaaaattgaagtattaacgcgttaattgatttgtattaaagatgtactagtataatatattaccagtaacgctaaacaccaagcatcatgctacgcattacgtagagtacctcactgtggccacctttctctctctgtttttttttcctagtttccccctcccatccctaattccctatgggtccgtatcagcaaagtttggcttaggttgaggggtgcatacgatttttcagcagcacgtaaaatgtggtaagctattaaatactatgttaattgagtattaattattacaatcttaaaaatcaggtctatttgacttttttaaagaaaaacttttatatacaaagtatttaaaaacataacgttgggaaacgagttcacggtaaatgaaggaatattttggtcgagttgtagaatcaaacttagtctaaatctaaaccatccataggtgaatgttttttttttaagactgatcaccggagaggatagttccctcctgaattttcattaagaaggggttaagtacatagtacaaagagcacatcaggttacattaattagatcctaaggaggagagaagatctctgtactatgtacttagattaagaggagaaaccaggcatctgaaaatgcttagcaggcacctgcgctggagcaaccagccttgccaggtctttggcacttatggtattgagctgaatttccatggagcaccagaatgaggccgcgaacgaacactgaataaggtcctgttcgagaacccaactgaggctgtgtgtttagatccaaacttccaattttttccatcacatcaacatgtcatacacacacaacttttcagtcacatcgtatcaatttcaacccaaacttctaagtttggaaggaactaaacacaacctgaggtgagattaagttttaaattttcgtggcacgcttttttcaagctgttaaacggtgcgtttcgtgcgaaaattttctatatgaaagttattctaaaatatcagagattaatccatttttttaagtttgtaataattaaaacttaattaattgcaagttattaccatctcgttttatgtaaaatacttaatccttatcttcatctttacctttaggagattcaaacagagccttaaatatgtgtgatgatgtttcatcagtagcattgccgagctcacattgaggcaactgtacaatcttcttcttgtggacgtttgtggggaggcgctctttagcaagaagccatgcgaaaaactgaatcttttggtggagctcggttcttctagacaaacacccaattgctacatacctctacgagtaaacaagagggcaaatgcagaaaaagtaagcatttaccccttttcggtttaaagaaaaatcagaaaactcacagtaccctctccttaaaaataagaagagacaaagattgagagttcgggaaaataacatgagatatatatagattggaaatattacacagtaaacaaattattttgacaaataaattattttctcaatggaagctaccaaagcaggaaaaaagaatagctaaaataacccctctctaaaacaaggagaaaaataaaaacacaattttttttctggctaaaagaagaacaccaagcagtgctccatctctatcaacaacggagctagctccgaggacagttaggcgggcaccgggctttatatcgctgtcattgcacgtttgtagaaatgacatcagtgacagggaaatattagcctgtttctttctcggactattcattgtactattaaaatgaattatttgctacatgcttcaaaaaatatttatctcgaaaaacttttagaaaatttatttcttaagctacttgttaagctatttattaaatatatttattcattttatctctataatagatacttcctccgtttcacaatgtaagactttctgtcattgctcacattcatttagatgttaatgaatctagacatatgtatgtatttagattcattaacatatatatgtatgtagacaatgctagaaagtcttacattgtgaaacggagggagtaacttatactactaatccactcgataatcgtcgtatgggcttatgaagatgctactggctcagtcatccgtctcatgactccatgttcgacgcatatatcttcatttagaggatgaataatggattgattgttgttatatgaaagttctccataactttactccctccgtttcattcattttacaagacatgtcttactttattttgaagttaaactttattaagtttcttttaccatgtttagagaaaaatatagtaatatctataacaccaaattagtttcattaaatttaacattaaatatattttaaaattatatttattttatataaaaatattgctacatttttcatagaaagaaattaaagtcaaagtgaattataatacgaaacggagggaatactctatttttgaatcggaatctctacgttagcctctaagaataaaaatatatgagaaacgttgcaacagaaaaatcatcacttgcaagggatacttccaaaggatacatgcaaacaaatggtgcaaataaattgtgaaaaatctgttggattctaatttactttggttggtcttagcctaatataatcacctatgcttaacatggaaattaatctactgagctgcttgtgaagctattgaggccggtttctttgatttatatcctacttgcggtttttcttcttgtctctcttacagttttccttcttatattctctgtttgacatagtgaaaaagcttcttaatgccagctacactaccccaagataaccacataaaagccttccagcgtttaaccgatcgggcgattaaggtttagagttttgacgcaagaattagacatcacctctactctacattttctcctatatataaacccactggtgaggctcaaggcttaattattgcctactccctccgtcccaaaatataagtatttttagcatagtgccaagtcaatcatttttaactttgactattaatagcaaaaaaaataataaaaaatcatgtaaaattgatgttactaaatttatcattaatcaaactatcataatatgcaactctttctatttaaaatattttatttttatagatattgttggtcaaagtagtatttcgaagactgtatcgagatcttaaaaatacttatattttaggacggagggagtattatatttaaactcaatctgtttctaccgaccacacaaacaaaatttatgtccccgatcacttcttgatcgggatgaaatctggtggtttttaactcctgccaatctgtaacgacagtggccgatacaatcgtccgacaaaatcatcccttcttccattgctccattccctgaaaattattttaaactgtgccacggtgtcttccgtgtggcattcaagcatgtgatgtgaatgggcagtcgacgtggacggctacggattccatggagtttgtgtgcaaatccgccactatcttgaagattgatactattacaacaaaggacacaaaatgattcgaaggataggaccacattttttttatgattgatttggcaccactgctacaataatgcatccttggttagcctaatatatgctgattataaaccatatgatttatcagaaaaaatatattttgtagataaaacttttatacatgtgtgtttagagatttaaaaccgaatattagaaaacaaactattcaaaactactaagttttcaaattaaattttggcagcggcttaattataagctagtataggtaaatggtgggaggagatcattagtaattttaattatgaatataaacttgcacgtctactgatcctatttaagagccttagctcttcgccataagattgcacttgtagtactttactgcacgaagaacaccatggcacaacgtgtccaagaagaagatgagcagatgatgagcaccgatgacttgatccaagctcagatcaagctctaccaccactgcttcgccttcatcaagtccacagcactttgggccgccatcgacctgcgcattgcggatgtcatccaccgcaatggcggagccgccaccttatccgacctcgcgctcaacgtcgggctgcacccgaccaagctctcccacctccggcggctcatgcgcgtgctcaccgtcactggcatattcgctgtcgaagaccgcaatggtgaggccatgtacacactcacccgagtctctcgccttctcctcaacagcgatggggagggaacgcacgccttgtcccaaatggcgcgtgtgttagccaacccactcgccgtgatctctcatttcagcattcacgagtggttcaccaccgagaaggcaaccaccatgacacccttcgaggtggcgcatggttgcacgcggtgggagatgatagcgaacgatgccaaggatggcagcgtgttcaacgccggcatggttgaggacagccgtgtcgccatggatatcatcttgaaggagagctgtggcattttccagggcatcagctctcttattgatgttggtggtggccatggcgctgcagctgcagccatagcaacggcattcccaaacatcaagtgcactgtgctggatctgcctcatattgttgctgaggctcccgccactcatagcaacatccagtttataggtggtgaccttttcaagttcattccagcagccgatgttgttctacttaaggtacatacttaagtgacctttgatatgctgtgctttcagctgttgagtagcttctttaatttgtgttagttttgcatgtgatttcagtgtcttttgcactgttggcaagatgatgattgtgtcaagattctgcgactatgcaaagaggcaatcccggcaagagatgctgggggaaaggtgataattattgaggtggttgtcgggattggatccgaggaaattgttcctaaggagatgcaacttttgtttgatgttttcatgatgtacatcgatggcatcgagcgagaggagtatgaatggaagaagattttcttagaggctggattcagtgactacaaaatcaccccggtgctaggtgcccgatcaatcatcgaggtttacccttgatgcttctgaaggtgtacatgtgcatctctccgtggaacctattctagttcagacaattgaactaaatacataacatgttggttataaacatgtttatgttagtcttttgatttcctttcgttcatgagtcagtagccttgaggcgtgtgcatgttcacactgaggccatcgttttttcgtttttctgttgtcgtatgagctacagtatgtgctctgtgggatggtacaacttatgtacgtcgtggcttgagtcttgggcatattggtagcccgtgatttccatttttattttcatcacaataagaggaagagaaaactgaaaagctgcaatgcagttcgcagcgccaaatctctctcgctttgtctgcacaccaaatgttcatgtgtgttcatctgttctggcgataacaagtggtattagagcaagcatcgaagatcggtcatggctctatgcctggataggagaaccatttcttgacagggtcgaggagttgctcccgctcaccactgccacatgcatgcctcaacgatggccgaatgaggggtaacgttggcaaagaggtcatggtgcagtgggtggtatcccaagctaacgaggaaaaactacaccgaatggacaaccgtgacgaggatgagcttgcaggcgcaggtcttgtgggaagcctgaacaagcttaactaaacaatactacccatattctcatatattggcatcaaaattaacaaccaaatttttttctttaaacatggctaaaatgcacgtaaatatttgccacaacgtgtagtcaaaataaggtgcttaattcgatactactgacacctcaatgatttgctaacacattcgtaatcctaaaatataattatttcctagttacaaaggaaatagctaaattttaaaacaggggactgtatatttatattttgagaaaatatatataccgctaatacactaatcgtgtctacgtggtaaatttattttggttttgctaaaaaactgtttttatttagggaactttcgatttttttcatgtctgatgctctttaagattcatgcgcctttttagttaggaacttttttgattttgttttgtcatcagatgtgctttaagattcgtgcatgggaacctgaagaggatcaaaccagttacctcgcgtgagtggcatggctacattttgtttagttatattctatgaatgtattgtagttacagtataattgcactccaattacagtatagttactttgaaagttttccaataaaaaactgtcgaatgctatatagatactcctatttattttccacatgtggtggtgaacctcgatcgtttatcatatatagcaacaactaaatattatggcttgtccctaaaccctaaactctagcaccaataattcatcaagtctaaccattaaagaagatgtttaagaaatgaaattttgctggttgctcgatgcttttttaggccattctaagaggataataaaaaatgatgtgcctaagtataggtcagtgaggctggcggcaggccaaaggcagcccatcagtcgacgcccaggccaactatccaatgccaaactcttctcccacgcaaacgttgcccaggaactactgcagtgcagggattctcatggtggcaatctggttcatcttcaattcgttgtcaacgattgtgtcatcttcctgcaaacaaaagttagttaatttaaatcttaattagttatcaaaactgattctctggataggcgtgcttcccggccgcttgcagtttggttcagaccaatgtaattacaaattcatcacaatttatttcgaatccaagagaaagatgagcacagcacatcacaatttattttactagcttcagcaggtgaacttcagcagtatccatccatttccccagttgatgagtgcataatatttctctttgatgtaaaaatgatctcagcgtaaacatcgcacattgttgaacgatcctttggtgatggctctgtgcactttagcccaagcttagccaattctatggatgtttgcatttcaaccacagcatgatttgggtcttcaccttcatgataataggtgagagtaggggctctaaaatttcattgatttgatgtggaaatatgctgactccacaaagctgtgaagttagggcgctttcctatgattatctctggaacaataattccataactatatacatcatcctctattgaaattttgcaccccaagccatactctgcgatcaatattaattatgcaagttgataatctttcttagtcagtcaaaatatgatacagttttgcatcacttccatgaaagataaaatagagacaatagaaatggacaaaataagaatgaagcaggtgatcacctggtgcaatgtatccgattgaccctctcagtctggtagtgcttgatgcatcacccaggcttataatgttgttctgaagaaactttgcaagtccaaagtcactaaaggattcatcattcaaaaggatattgcttggtttcagatcgcagtgaaccaagggaggaatcggttatgaagatagtccaatgtagtggcaatgtcttcagctactcttaacagttttggggggttttgactgcgcacttttggattgatccagacttcaaggttgccatttgatctaaactcaagaacaagtgctttgaattcatccccgcaaaaaaagtgctttgaattcaaaccctgatgtatcaaaggttgaacataggccaaccccgatggcgaatacttttcaatgcctcacattcaacatagaaactacttgggtgctccattttggtcaagtctaaatacgttaattgcaacattgcgtgcgccaaacttcaattgacctttatatacaaacccaaatgttcctgaaccaacgagacttcttgaagagaaaccatatgttgctttgtacaaatcattgtatgataatttactaaaacacttgaatgaatggttgacaataattctcttaggcccatttctcctcctcaggcaacacatgccatggtgactataagaatggtagtgattgcatccattacactgtgaatataggatgtcttcttcctgttggatgacagttccttgcaaggtggtaattgtatcactagagaacttacacacacctctttatttccttggatgaacacatcgcttgaatttgcaaacacacctccttcagggactggcccctcaaggttatttaaggatagattgagagtgcataaagattcaaaagtcccaaaatatactgggatgtcaccagacaagttgttttgggaaagatccatttcatcaatgcctcttaaactcataggagataaagtttagtgagccgctccaggttgccaattgattgagggatttctccagaaagcttgttgttatataagcttaagatcgataagttttgaagatttccaagtgtgctgggaattttgccggaaagtaaattataatccatttgcaagacagtgagactagtgagtttttttttatctctgaaggtatgctggcggttaattggttttgtattagagtctttagaaggatttggttttgctcatatttctgaaaggttggcaatagaacttggtattattccttttagattgttttcatccaaccacaaattttgtaagtgggtgcagtttgttagcgaggacatgaaagtccaatctccagcctcaagcttattgccacctagatctaagtttgtaaacgtggacaaggatcccaatgagggataacatcagtgaaagagtttatgcaaaaaaatctctctgagattcaaagcattggctaaagaaacatgaattggtccttcaaatttgttccctcctagtatcaaatttgtgagtctgggaagggtatagccaatgttagtgggtgttgtcccaacaaattggttggcaccaaagttaacataggtaagatttgaaattgtttaaagtccttgtggaacgacgcctaataagttgttataactcaggtatagtatttttttttctaatcaccatgttgcacgttttgcttggctatgtgtcttctttgcctttaatgtcctccctccccgcaatgcaaaagatattttggataattggctaaggggagcgccttggcccaccaaaatattgattttatttggagttagtgcgctttattggtcaatttggaattaccgtaatgatagagtttttaacataagaaattgtctaacattatgcaggttatcatcatgtgttccaatcagctccactcttagtatttgatgctttcataggaacaacaggatattatgcgcattggttctacatgcttggaattggtagtcaagagcttttattatactttggatagcgtagtacctacaaaatttcatgctagaatctatgtgattttaaaaacattatttcagttgatccttttattggcgaaagttgggaatttgtccaatcacatctattattaattccttcctttttttattacttctaaaacttgttggctgtgtgccaatgggcagaagctggagatttaatccatttctatcatctaaataaaaaaaatgtagttctatgagaaatttaatattaaatatatactattgtgatacatcacgttaaatctagggttctatgataatttagttttatgaaatctatacctaataaaaaaattcattaggtttccgggatttttactcgtccgtatcaaatttccgttcatctcctgattcgaccgtctgcgagatcgcatcacctcgtttctgtcccgtacgcacgtacagatcaaacatgtccccttgaactagagatcaaatctaatccattcaactttgtacaatctatcacaaaactgcatatttaagaatttattttacaaaactatagatttagtgtatttgtttatcacagaactatacgtttagtgtcttcatttatcacaaaactacagatttagtgtctccgttattaagaaactacaggttttaacaatgctaaaacttgtagttttgttataatgaagatactaaacatgtaataattttgtgataaatgaagatattaaatctgtagttttgtgaaataagttcttaaatatgtagttttgtgatatattgtgcaaagtacccgtagttttttgtgataaacgaagacactgaatctgtagttttgtgaaacaaattcttaaatctgtagttttgtgatagatcatgtaaagtatttgcagttttatgaaatttacttgtttttaaaattttattatgttttagctctcaacaacttaggtaaaagaaaagaacagatggtgcgtttacatgcttgagtggtgagcagattaccggattggtcattttatatgtcagctgtgatttttattttccaatctgtatttttttgtttttatattttttatttcgatcctttttgggatggatcgtacttaatcttggctaataggccgggctggtcatcattttatctcttagttgtgaatttttcttttcaatctgtaattttttttgtttttatcttctttatttcaatcttttttcggatggatagtacttactacgtattttctctcgtatagaaacggtagattagaagtgagagattatattttcatagatctaataatctaatggtccaaaacaatgaatccgcggtttaagggaaaattatgggttagatgttttacttttttttcttagaaatctctaatttattatagcgccatttggcgatgtatgagcatttgtagatagtcacatgatgacttaaccgtgtttataggaagttaaataaaattttagtatataatagatatactgatatacatgatgtttaatttaatagatatttattattaatggagtagaaattaaggaggccaatgtgagcaaggagagaggacgtaaaattatttgtcatgacatcacagtatatgttattaatttttgctatttgcaggagctttgtcaagcgatgtatttcttatatatcagaacacattaccaatatagataaatagaatatgtttaaaaaatataattatttagttatctattttttatattataatttttttatctagaaaattagaagatggaaggaacaaagaagagagaggatgtgaggggaaggaacgtacgtaacgctgaggagatgaggcccatgagggaggggagccggacaggatttttggcagatgggattttgctttattttgtttaattaaaatagatctaatggtgtaaaataatgggcccgctatattaagtgaaaattgagggtcagatattttgcttttttaaaaaaatttcttggatttctctaatttattagagcgccaagtggcggtttgagagcgtttgtagaaagtttaatggacttttagtatataatagatagatagatagatgttaattgagtattaattattacaaacttaaaaattagatctattttatttttgaaaaagaacttttatatacaaattaattaataaaattattgtttagtagttcgagaaacatgttcatggtaaatgaaggaatatttcaggtgagtattgtacaatctaactcaacctaaatctaaaccatccataagtaaatacttagatacttatgggtccgtctccactaccactagtaaacaagagggtaaatgtgaaaagtgagcatttaccccttttcagttaaaagaaaaatcacagtactctctccttaatgataagaagagccatgcattgagagttcatgaaaataaaacgagatatagattggaaaattatcacagtaaacaattttgttgacaaataaattatgttctcaatggaaggctggaagctaaaataccaaagcaggaaaaaagaatagctaaaataatctctctaaaacaaggagaaaattaaaaacaaaatttttttctggctaaaagaagaaaacaccaagcaatgttccatctccatcaacaactgagcttactccaaggcgagttaggcggctgccgggctttctcgctgtcgtttgtcgaagaaaatgagtagatgatgaggaccgaagacttgctccagctcatatcaagctctaccaccacactgttttgcctatatcaagtacgtggcgctttgtactaggcgaagctttcccttgcacatcccatggctcttgcgtgtgctcactgtctatgtaccatcgaatgtgattatttatccaaattgtatggacactatttttttctgaaggatataattggggatctagcacattcattctcaaggtctataaaacattggacgaaaaaaaaaagaaggacatgccccattgatcctaatgggccaaatgataataatgtagattgattgctacaagactctttataattgtaattgtatatttataaaaaatacaagaaagatatttatagtaaatataattattctttggaataaattttttctaccctttgtgcatgaaattcagctagttctgctcaatgtagggttacatataagactgattaacttagacgcatactaattattaaaataaattatggaggagttgcatcaatcaaagctgcagtaccggttctgatgccgtgcatgctgcccacacatgatgaataaaaattgcgaaaggatttaactgatctcctgataattgttccttattaaatcacaccatgcatgcagcatgtattatgtattgtttagtagttcgacaaacgtgtttacagtaaatgaaggaatatttcagccaggttgtagaatcgaactcagtctaaatctaaaccatccatagttgaatacttatgggtccccctccactaccactagcaaacaagagggcaaacatgttaggtgagcatttacccctttttagtttaaagagaaaaatcacagtactctctccttaaagataaagaaaagacatagattgagagttcatgaaaataaaacgagatatagattggaaaaattgtcgtagtaaacaatttttttgacaaatacattattttcacaatggaagctaaaataccaaagaagaaaaaaacaatagctaaaataatctctctctaaaacaaggagaaaaataaaaacaatttttctttgggctaaacgacaaacaccaagcaatgttccatctccatcaacaaatgagctagctccaaggctagttaggcggctgccgggctttatcgctgtcattcaccaaacattcctagaaatgacgtcagcgacagggaaatagcctgtcttttttggactactcattgtactactagaatgaattatttcctacacgcttgaaaaaaatagttatctcgaaaaacttcctaaaatataaggctcaataactcataacataaagaccaagaaataatttaatcacaatcttgatttgatcacatccggcatgcacagtgtggaagaaaagtgggtagtaatatgccttactaccttctttgccattataaaagtgggtaacataggaggtagtaactaatactatactagacaatagtactactacccggtaataagcataaaaaaatactaaaaatctctcgtctatcttttttgctcaactattgttttacaagtacgtcatatattactattgtcggtgacatgggaccgggagtatcatgacttagagacttgaggcagacacgatcacccacgtgacctaaccccctcgggggggtcgggcccgagggtgatacggccgcccttctctttgtctccccgaggggtcggaccgctcccgtctcggccccgagggccgaggcgccccgaccccttgtgggttttgcgccgcgtatatggggtaggtgagcatagcggggctcacctaaccgcatttattgcggtttggacgagcgcgtcacgccacatgtagcgcagtatggcacgctcgtttatccggtctgtgaccggtcacagatcggtcagattgcgggttaggtggcaacaggcgatctgacacacgcctcgccccgtcccgtcaggatgagagtctctaggcactcgtccctagccggagccagcgtgctagctcctggagatggcacgttggtcctggtcagatatatgccaggctttatcccaaccattataagcaagacgttgtatgaagaagggcgaacatgcagattgctaaactgacacgtggtggacaaaggtgaccggtctgtgactggtctgacactggttatgtcgccggaagacaaccgtgttcccacgttgcacctgcttccggcggaatggaggtaggtatgggccgtcccatcagaagggtcactcgggcagcagccgttgcaaatctccgcccatttatgaagagatgacagggtgatccccgaggtcagacgaacgaggacgcgtgtccacactcaaaaacaggcagtgtttcagcttccaagagaaggcaagccaagttttactatagataggatgggcccccacccaaaaagagagagagggagaagtggtgcatgtggtatccccttgagatataaaaggaggaccttgcccacttaagagagggggctggaaggggggaggatctggagagtagatcccacgagaggaaaaaagggagaagagggtttctagagtaagagctctctggctctccatctctttgtagcttcttcatacacagatccaccataacacaggagtagggtattacgcttctcagcggcccgaacctgtatacatcgcccgtgtcttgtgctttttccattctcgcgaactttccacagactaggagtttagaatctcacccagggcccccggccgaaccggcaaaggggggcctgcgcggtctcccggtgaggagccccacgctccgtcatctggcgcgccaggtaggggactctgcgtgtgtttttctaagctctcgcattctttcgtgtgcgccaagcttttcctgttcagcccaatggccgaacaagcaaaggcgcacaacctctctccgagtgttagcggtgacgacggggaaccgaacccacgccgtcgagctcgtactccaccgccccctccacgccaaagtcctaggcgggaggaggcgctcgagagggtcgaaggatccgcgacttcgacatccacgggtgatggagaagggcggcgagatggggagcgtcgcctcctcgtctacggcgacggcagcacgccccagggcgcgctccaaactgcgggcgcgctcctacgtcacccgcccattgtccctgacccggagtctccagcccaacgttggctggacgacgtggccaacttggtcatgacggcgcggcagcgcctagatgctggtgggcggtcctccgccaccaagacctctggtactgctaccaccggctccgcgtcgtcaagacggagggcgcggcgagcggcggccgctgttcgccattcggccgccactccttcgtcagcgcctccgacccgagaagatctgcgtggggggccggattcccgcatcagtatcgagcgccggcgtaatggccgacgtactgcccacgcaacggagggcgcctcctcgtccggagtgtcacctcaacacggacgcggggatcagccctccgtgcccccggttggtggtgtcggctgtagagcctttgtggcgagccttcggaacgtccgttggccccccaaggttccggcccaccatcgccgaaaaatatgacgggagcgtcaaccccgccgagtttctccaggtctacatgaccgggatcgaggccgccgggggtgacgacagggtcatggcgaatttctttcccatggccctgaagggacaggcgaggggttggctaatgaacttgccacccgcgtccgtccactcttgggaggacttgtgccaatagttcaccatgaactttcaaggcacatatccgcgcccaggtgaggaagcggacttgcacgcagtacagcgaagggatgatgagtcacttcgctcatacattcagcggttctgtcaagtccgcaacaccataccatgcatccctacacacgcggtgatctacgcgttcagggggggtgtgcggcacaaccgcatgctcgaaaagatcgcctccaaggagccccagactaccgcggagctttttcagctcgcggaccgagtggctcgtaaggaggagtcatggacctggaacccctccggttccggtgtggcagcttcggccgcccccggatccgctgctcggacagggcggcgtgacaggaggaggaagaaaaggtcagcccattccgacaacgagggtcatgtcctcgccgtcgagggtgcttcgcgggccacccgaaaggggaggcctgcgagcgacaaaaaggaggccagcgctcccagcagggagcgcccaaccggcaagtggtgcaccgtccacaacacctcccttcacgacctcgcggactgccgcgcagtcaaaagtttggctgagcagacgaggaagtgggaggaggagaggaggcaggagcgccgagagggcaagtccccggcggttccttccggcaatcggcgaagtgaggccaaacagaaggcccccgccgaggacatcgatgacggcgatgatgacctaggtttccaagagcctggggccaccattgccactgtcgatgggggagcgtgtgctcacgtttctcgccggagcctcaaggccatgaagcgagagcttctggccgcggcccctactcatgaggcgacgcgccgggcgcggtggtcggaggttgccctcaccttcgaccagaccgaccacccaccgtgtgttgcccggggaggacaggtcgcaatggtggtttcccccactgtttgcaacgtgaagctggggcgtgtcctcattgatgggggagcagccctcaacatcctttcccccgcagcttttgacgccatcaaggccccggggatggtgctccggccgtcccagccgattatcggtgtgacgccggggcacacttggccgctaggtcatatcaacctcccggtcaccttcggtggatccgccaacttccgcacggaacgggtcaactttgatgtggcggacctcagtctgccctacaacgcggtcctagggaggcccacgttggtgaagttcatggcggcggtccattacgcctacctccagatgaagatgccgggccccggtggccccatctctgtccatggcgacctcaaagtcgcgctcgcttgtatggagcagcgcgcggaccacctcgccgctgcgtccaagcccgagggtggcgacgagaggcttggcacctccgtccccgtcgccccgaggcagcggatagtcacgtgcgacgaggtcccggtcaaggaggttgccctgggcgacggcccgtccaagaccacacgaatcggtggtcttctggatggcaaataggaagacgcgctcgtctccttcctgcgggcaaacgctgacgtcttcgcatggagaccggcggatatgcccggggtccccagggaggtgattgagcaccgtctcgccgtgcggccggacgcaaagccggtccggcagaaagtgcgccgacaggccccggaacgtcaagctttcatccgcgaggaggtggcgcgacttctggaggccggattcatccgcgaggtcatccatctggagtggctggcgaacccggtggtcgttcccaaggcgaacggcaagcttcggatgtgcatcgactacaccgaccttaacaaggcatgtcctaaggacccttacccccttcctcgcatagatcagattgtcgactccacagcggggtgcgaccttttgtgttttctagatgcatactctggttaccatcagattcgcatggctagggaggatgaagaaaggcttgcccagccgtcggcgcgacctgaccccttaggggagacggacgcgcctgaccggcccccgaggcccgtcggagtccaggcctcgggacccgaggggagcgctcccagctcccttagattgattgcttggatcgttgagatccaagcatacctcacagataagactctacccgaggaccgcgaaggaagtgaacgcgtccagcgcatctccaaacgctacgtgttgatagaagggaccctctatcggcacgcggctaacggaatcctcctgaagtgcattcctcgggaacaaggcgtcgagcttcttgctgatatccatgaaggcgaatgcggagcccactccgcctcgcgcaccttggttggcaaagcctttcgtcaaggtttctattggccgacagctctcaatgatgcggtcgacctggtccggcgatgcagagcgtgtcagttccacgccaagcaaatccatcagccggcctaggcactgcagatcataccactttcatggccgtttgctgtctgggggctcgatatcctgggaccgtttaggcgggccccgggcgggtttgagtatctgtatgtcgcgatcgacaagttcactaagtggcccgaggcttatccggtcgtcaagatcgataagcactccgcacttaaattcattaagggcatcacagcccggtttggggtgcctaaccgtattattacggataatggcacccaattcactagtgagcttttcggtgactactgcgaagacatgggcattaaactctgcttcgcctcacccgcccaccccagaagcaatggccaagtggagcgcgccaatgcggaaatcctcaaaggccttaaaaccaagaccttcaacatcctcaagaagcacggcgattcgtggatcgaggagttgccagcagtgctctgggcaaaccgaaccacaccaagccgagcaaccggggaaacgcctttcttcctcgtctacggcgcggaggcggttctcccatccgagctcaccctgaagtcccctcgggccaccatgtactgcgaggctgatcaagatcagcttcgcagagatgacctcgactacttggaagagcgaaggcggcgcgcggccctccgagccgcacactaccagcagagcctgcggcgctaccatcagcgccacgtccgggctcgatcactctgcgtcgacgacctcgtcctacgccgcgtccaaacgcgtgctggattgagcaagctctcaccaatgtgggagggtccgtatcgagtgatcggcgtcccccggccgggctccgttcggctggccacgggcgacggcacagagctgcctaacccgtggaacatcgaacaccttcgtcgcttctacccttaatggagttcgggtgtcaggtttcgggctcgggccaaccccgcacccccttcaggcgtgcagggttggccgggggctaccacatatgcatattttttcttctatctgtatttcaataaaagcattttcgatttcctaaaggctgtatctgtgctgttgtttccttttgaagaatcttgacttgaaataggtcacttgtgctcaatcctgccctcgggggctcgggtcggctaaaatcgccaaaaggggcccagaaccgagccgtgccccggggtgtggtgaactccgggggggaatcggcaaaaacccacaatcgggtcacccataaccctcggtcaccacgctctcggcctggccagtctcgacacgtggatctccccaggcactagccccgacccgcgccttttgaggactgggacctgggcacgagcccttaatcaagttaagacacaaaaggaccacggcacagatcatcctcatctcatacacatagcaaaatgaaattgacacagaaatttctttattttgattgcagattaagttaatctatacaaaaaggaggcccgaaggccttggaagaaagaaaagaagaaaaaactaaggattggcgggggcctgggggctcactccgatgcacccgggtcgccagcctcgtcgccactgtcgcccacaccgccgtcatcgccctcctcgtcggagttgaaggcgaacgcgagccgaggggccgaaccctcgaagctgtggacgatatggtcggcggcatcccggacctgcgcgcgcgcgccgtcctcggtcccgggagggaactcgtccagcgccgtccatggggagaagtcggggtccctggcctggtaactcgccagtacgagctccaccgctcctcgggcgaggtccctcgaggatgacttaatcgtcccctcgagctcctcggggagccgctggagagtcccggccatcttcgagaggcgctgggcgaggcccccctggttggcggcgtacttcacagtccgcccgccccagagacccgcctgccgcccggcgcggtctaaacgggacacggcgtcgcgaagcatgctgggccctatctcgcctgccaggcgaagggcctcgacctccccggtggacgaatccagcgcgccctgcagatccgcgatggtgtgttcggtagctgccaggcgagcggctaagtcgctgtcgcccgtagccgccccgccgctacgcgcccttgcatccagctcccttgcctgcgcctcgagttcagcggcccgctggttcagtgcggccctctcggcgcgggcactttccagattgcgacgcgcttgttcctcttgcgcagcttcgcggagggacgcgctctccgctagcctctgcgctgtggcctcggcctcctcgagggctcgctcccgctcggtgagcgtatcctcgcggaggcggagtgcggactcttcttcggcacaggcggcttcgtgcgccgccagtgtgacctcccgaatagcaacggcggcctcgcggtccgccaggtccctctccacgacgcgggcacgctcttccagcgccatgtcacgggcctcaagggtttcttcgcgccgccgggatgccacctcggtctccgccgcccgccgttctcgggcagcggcagcgtcaaggaccccacgggcggcgtcgagcttcttccctagctccgcctcccagctcccgtattgaaggcggaggtcgtcctgcgcctcgttcatcacggtagtggcgatgagggcagcccccctctcctcctccacctccctggcgatctcccccagcatcttccgacgggcttcgagctctgagacgtgccggtggtgtgccttgcggcccacctccaccatggcctccactgagcgtcgcccctcttcaacacgcgcccatgcggcgtcgagctccgcccgctctgcttgcagggcctctatctgggcacttaacccgtccaacacagtggtgttagcgacggccaaggcctgcagaagaggctctgcgctcagtggggcaacggaaggcgtgggggagagccgcctcggtgaggatgccgcgcggctcggcccgctgatggacgtgccggactcagggatgttccccggacctggcttgtcctgagcgtcgcccgagggagtgggcccaagcgatgcagccgcggcctcgtcgcgagctgcctcggaagtcgtcgccgcctcggcctggcgaagtctggcctcctcccgagcggcttcttcagcttggcgagctcggacggccacctgggcagcttcctcggcttcccgaaggcgatccgcagcttcttgccgatcagtctcgcgggttgcctcggaggatgtcgtcgcctcggcctggcggagtctggcctcctcccgagcggcttcctcagcctggcgagcccgggcggccccccgggcggcctcctcggcttcccgaaggcgatccgcggcttctcgccggtcagattcccgcctccgagcctccgtggtcgccgcgttctcggcctcagattggccggacttggattggcaagaaggacgcgacgggatctcgctgaagcagaagaaaagccagaagacaaacaagatgggtgaatgaaaacttgtgttgggagaatgaatatagccacaatgggcgtgggacgaacctgcgagggggtcggttaaacgaccaccttggaggggaaataaggtttccccgggatggttctgtcccccccatcttgcggagccgtttcttctttcgctccccctcgggctgcggcgtcggcgcggccccctccgggcgcctgctgctgacacgcgccgccccgccccctcgggggggagatggggaggaagtaccctcttgcttcctcttccctcgggcgtcggcagggcggctgccccccgagcccccatcacggggcccggaagcacaaccccctcctggggtagattgatctcccttgcggctcccgctcacaccgtcatggccctcaggagctcgctcctctgaggccccgaccgccatcatgatggacaggatgttggcgcgatctggatcgctgcagagggggaggactccttgggggatgagggatgcctctgcggagctgagattcagcacccgttggatcattaccttgaagtcttcggggacccagtcccatttgaccccccggtgagtcctcatacagtcctcggacccggtgtactcccaggcgccccgggcgcgccgctggagtggcgcgatccggcgacgaaggtagtcactgtacaccatggcccctgtgagcccctgggatcgcaggcccgccaggcggtcgaggatggcatcgtagccatctcccaggtctactggcgcccgccagctggaggcctgtgctgggggctggctcggaagtcggaggcgcgcttcgtcggcgaggggggtgtagaaccagtcgctcttccagtcatcccacttcttgcggtggacgcagggaatgtagcggttcagcaccggcccccgcggctggaagtagcagccaccaaccaccgacggcggcgacaccggctgtacggtgaagaaccaccggaacagccgaagggatgggcgcaccccgatgaacatctcgcacaggtgcgcgaagatggccaatgtcattaccacgttagggatgaggtgcgccatctggagatcgtaaaactccagaacatccatgaagaaagaagaaaatggcggaaccagccctaccattgcgaaagggaggaagaagacggaccgccccgggtagtgtggcgccgggcgtccctcacccagtgcgaccacctcccggccggtggcagattccggcatgaagcggcgcgcaagccggcctgcctctcgctcacgatgcgggaaggcggcaacacgctaccgtcaagcggaacggaaccccgtgccataacgccggaagaagagatgtttgagagcgagcgcgtgtggcgagggtagggcgcaggaaagaaggagttagggcgcaagcggcgaagacaaggggaataatggcgagaggaaggaagcaaatctcttcctcggcgactttatacccttgccaacgctctgcccggctcctcgtttctcgcgcccactatctcgccccctcgtttctcgcgcccacgttttcactaatcccattcgcccgtttgcggtgcatgaggtggatatgcggctgtggcagtcgagatggaacatatcgtgcgcgcgttaattacactcgccgaccgaagcgccatcaccatatctccaggaaaaacgaaccggcttgtcccgatttttgtgagtaatgtggcagtcttgaagagaccgctcattattgacagtcgagttaccaatgccgatatgcgtgatttgcgaccgattggttttctttccaactgtagagaccggccccacctgtcaccaggccttaggaagaggcgtcacgcccgaccgcttccctcgaggagggcgatcgccctggcataacgccgggggctactgtcggtgacatgggaccgggagtatcatgacttagagacttgaggcagacacgatcacccacgtggcctaaccccctcgggggggtcgggcccgagggtgatacggccgcccttctctttgtctccccgaggagtcggaccgctcccgtctcggccccgagggccgaggcgccccgaccccttgtgggttttgcgccgcgtatatggggtaggtgagcatagcggggctcacctaaccgcatttattgcggtttggacgagcgcgtcacgccacatgtagcgcagtatggcacgctcgtttatccggtctgtgaccggtcacagatcggtcagattgcgggttaggtggcaacaggcgatctgacacacgcctcgccccgtcccgtcaggatgagagtctctaggcactcgtccctagccggagccagcgtgctagctcctggagatggcacgttggtcctggtcagatatatgccaggctttatcccaaccattataagcaagacgttgtatgaagaaaggcgaacacgcagattgctaaactaacacgtggtggacaaaggtgaccggtctgtgactggtctgacactggttatgtccccggaagacaaccgtgttcccacgttgcacctgcttccggcggaatg

SEQ ID NO: 10812 - DNA, 1063 bp, Oryza sativa
attcctgcagcccttcagaattttctctgatgaagtccgatccaccaactgctcagtgctgttctcctcgccgacaacctggtgaagctagcgggggtccaaaaatctagccgactgctcaatccagcagccaaaagccaaccgagcaaccaggacccaggaagaggaaaatggtcctgagtgatgatgaggacgatgatattgagaagaccggcaacaaggagacagctgggaagcggccaagacaagctaacccatcgaagaagaaaacatccagccgggcagtacccacgatcagaaagtcatcaaggtatgaatccgttgtgatttctccttcattcttcaaaatgatgtcaatagcatttttgcaacttataggaaatcatccgacatcgatccatttggaaaaaatcctgaaccgactaacaaggaggctgtttcttctgctgctagtgaggccgaaccgactacaaaagaccgtatgactggcgatcagtcggcaactggcaatgtagaagctgataaggagccccgactggaaaccagtcagcgaatgctgaagcccgcgctaaccaggagcctccgactagaaaccagccgagtggtgagcaaaacgaagatatccctgagtcggaggggcaagccagtagttctcccttaaatgatactaacgctgatccggaagttggtgcttttgataaggtagaaggacccgctcgaccaccaccgaaaataataacaggtaacaatcctctaagtaaacttgtatttagaaaaatcttccccaattgcttgacttctcttgtgcctgtataaaggtccgacgattggcgatgaagaagaaattcttcgaatccaatcggctgaagactcccgaccacctatcctagtcaagtggtggaatgacgagatgcagccacatggcattgtaataaacaagcagaaagaagacgagaaggtgtcattgttaaccaggacacttaatcaggccactcgtcttgtgaatgtaagtactctatccgtagtcctttatatcaaattgatagacttaatgaaatgaccg

SEQ ID NO: 10813 - DNA, 756 bp, Oryza sativa
catcgggatcaatcaaagcacttcaagggcattgccacggaaggattggagtccaggaaagggcatttgaatctattaattaggatatttttagagatattttcggtaagagtccgcctaagggactcgttcgtattttaaattgtaatagagatagagtcgtgtccagcaaggacatgttattacttcgggtataaatatggcccgacaccttgtaaacaagggacggcagttcaataatacttcggcgcattgccacccttttctttttttcattgattcgacgagtttttgctttcgagttgggctgcatcgagtttgatctccgacgaagaggtaaagcttgttatggccgtggtttgcattctcagaattagtgcttacatctctatgacactctaatcctgaccgtgtgaattgccgagttatcatatacgatgtacaatctagatcgatctcgtcatctaacctcatcggctagcttctatcatcgaaaacggccgatagatttagataacgacattgagttagattatacagtgtatctaccatcttgaatgagttttcatcgttttgtttagattttacgtttctcttcatacttaatgctgcaccggttaggttcgatctgttaagtaatgtcttgaaccgtattatctagctctttctatgaatactaatagagatagcatcggagtttcagccgatcttacctggtttatttgtcttgttcattatatggtccttgatcttcta

SEQ ID NO: 10814 - DNA, 734 bp, Oryza sativa
tcctgcagccctttcgtgaggagtgctgttgttgcactttgtaaacacagagagaagtaataaagtcgtcatctactttgagagatcttcaatttgtgtttgctcgggttcggcggtccaaccggtgagacaccaccggtcagaccgacggggtaacggcggttagaccaaagcgactacggcggttagaccgacagtttccaggcggttagaccggcgcatctacttcggtcagactgcgattcatcgatttgtgggtaacttttaattccgctaaaagttttggtttttgggtacaccaaccatttaccctctctggttggcttagttcttgctattcgatcctacatctctctcacaaaaaacaaactttgtccaattttctacctcttatcattgggatacaagctgcagattttcaagcaaataaggcttacatacaataatttaatttcaaagcaaatgtctgcctgcaaaaatcgtgtattttcgcaagccttgaagtgcaggcggagtggatggctgcctgaaaaaatcgttttggtccgcttgtaaaatttttttttttctagcagtgcatcaaatcctcctggatcaccttccccagagggctatcctgcaatctgcttggtccctgcaccgtgctcgcttgcggttgattttttatttttctcttcgctgctgctgctactgttcaaagtaagcgaagtggctggagaggtgacgaattctaa

SEQ ID NO: 10815 - DNA, 11833 bp, Oryza sativa
ccctttgcaccctaacgctgatataattattccacgcagatcgcaagattaaatctcatgctcagtttgaagtcttggtcaacaagattaaaaaacttgaaggggctagaagcgaagtcgccaatgctgctactccactgatttaagccatgttctacaataacaacggtccgagcacaatcgatgatgttgaaatttttgataaattgagagctgctccggacatgtacttcaagaatattaaagaggctagaagcatgggagcaagcatggctctagcgatgactaagtccttgtatccgaagatcgacattgatgccgttgatggctttgcagacggaacaagtgaagaagatgcccttgatcttatcgatgatgcctagaaagccgccgacaagatcgctactgatgttgttgagagatttcaagataacaatcttggtccgactgggtctcatgaatccgatgatgaaaaaactgagtctgactgatttcaaatgatgtaatctttgacgatggagcctcaatttgtacaatactgatgtatttatgctgtgcttgataaattaaacttagcttttgatttcttaaaagtttttgtcaaaccttattgagcctagaacccgctaaagttgttagaaaactctcagtcctgattaactaagccaaaaaatcagacaaggcaatgataaatcgagtaagcaaattgaattgataaaaatcacactctattattattatgatagcccccgactagtaacttcaagaaatagcttgatgttggcagtcaaggaggagaaagtatatacaaataattcttaagcataaaaacgacgaaggtgctcgatattccacgaattgtcgacgttagaaccatcttcacgcttgagtcgataagatcccagccgagtaacttcagagattataaacggtccttcccaaaaagaggataatttgtgccgatctcgtgtagattgaatcttcctcaagaccatgtctccaaccaaaaatgcgcgtgatcgaacattgcgattgtggtaacatcgcaatccttgtaaataccgagccgactggatcagggctgcctcgcgagcttcctctagtcagttaagatcatccactcggtcttctccgtagcgctcctctttgaaattgcgaaaccttagggactcaaattccaccttgctcggcaacattgcttctgcaccataaactaaaaagaatggtgattgcctgttgacggtccttaaatcataatatctgaccgtcaatacctgcatataatgaaataaaacatggtatccaacttagtggtaggtattattactaatcatttccactagtgttggtgaaatatgtttatgcaggtaatttaaggagaaaacacatccgtcatgtgacaaaatgcacatccgcgcaattcaggacgcgtttacatggattagagtcccaataagtcaataaaaaccatttagaattgggccaaaacatagcccaggttgttgggggcccaataagcaacctcccggccgaaggagaggccgggaggagagattttgggttcggccgaacccaccagttcggccgaataaatcctggcgcttcctgccatctgctttcacctggacggctcgaatttctccccgaaggtggttgcagggtgttttggtcatttcccatacccctaaccgtcatttggagcctatataaggagatcaccttctcatttccaagacaaacaactttgagctgaattacaagaggctctattatatatttttgtacactagaataaggtagagagtgaggagaagctctggaggagtgcccggaagtttggcgctcattcgacttctacctcaacgagtgtagctttctatgaggaattttggaggagtaccggagctgtaggtacacactactccgggttcggagaaccttcttctataaagtaagcattcgtgttcctttcttatgttatttaattacttagtctgagtaagatatatttccatctttgcgggttcattgtctagtattcgtactaagtgctatagtactaggactctgcataaaaaggaaagttcctgtacaagtattagagtagtaattaataacttagacgtggtgtctaggttagagattacctgatgcggacatcactacctcggatgtacacaacaatcctccaacggtcattcaaggaccgataacaggagctcgtgcgcgacaattgaatttagagttgagctcgttcctatgttcttctttgtatgtattcgagaatagattgctacctaataattatattgggattaggaacaatggaggggacaaggagacacttggagaaggacttagagccatggaggatcatcgaggacgtccaagtcaaggtggaggcccaaaccaagtcgatctcgggtgcaattcgaagtccaggatcagtctgcactaaaacgggcacggcccaggtcgtatatgtgctcggattggggcgttctttatatggatggaaagctaagaagataacatttccaatggttttggtcccacgtccaaattctttccgagtcaatgggaatcgaccgaacaagttgacgtccagaatctgtcccggtgctgcgtcaccatatttgggcctttgggccgtgtatcgtgttggaacccattagggttgtgtcgagagggggttgcacgaccctaaactatatatatcagtacccgccgtcatctttaggtttttgggttttgcttagattattctgtcaagaacagtttcgctgctagatcggtttgtggaaccctaaattcgagtgcttaatccttcatatgcaatttggttgcaatctatcttgttcttgcttgtgttcttcgattcgcatgcagggattagccttctcggcgaggtcaaccgggtttcggcacggctgataaccagaggagacgtggtgctccgattgtggggctcaagagcgtgcgcgttcaagaagccggatcgatttgtgtcgtgactctttgtgtcgtgactccgcccaaatcgttgtttatcataacctttcggaagatcgggaaccctagtgcacatcattacctttgtttgttatgtatcccacggatttgtcagaggcaggcggcaggtggtgacagccctgaatcccgtccgagtaatcctccacgtttggatacatcatagagctatagcagaaaccacgctagcagaccagcaggggtcggtgcccgaagcaacagatatgaaattaccttgcttagcatagaaaattaaaacacatacatatagttgttgtccttggatcgtcttagccttaggtagattacacacgttccctgagtacgatatccttttggggtcacccgaaggtgaagtgctacaacggtattccatgcgcttgcggatttatctgtggtcgtaagaaataccaacaagcatttctggcgccgttgccggggaacggttgctaatttatccgagtctaggtcatcctcgtatctttattcttatttcttcttcttttattccttcccttgatgaagcaacccacaattcaaaatctttctgctcctcgggctgatctttgtgagccgtcctgttcttcaaaaccaatcctttccgatggctacgaaatcggtcctagctttatagccattgttcgagagcaaaccttctatggtggtattggtgaaaatccatacgtccatctttgggactttgagctagtgtgttcatgtttatcgatcgtaggcatgacacatgaggctctaaagtggaagttgtttcttttttctcttagagatgaagcgaagcaatggcacactctgtctgtcaagaaattccacggtgaatgggaagtgcttaagtgcaaattctgccttgctttctttccattaacccgtgtaattaatcttcgattagacatcctctctttccgacagaacgagaaggaatctctcggtgcaacctgggccaggttctcactgttaactaagtctggcccagacttgtctttacccaaccatatgttgcttcaacattttcgatacgggttagacaaggagtctgccgtaaatctcgatatttccgccagaggatcgttcgcacagaagacaaccgacgagggaagagaactcttagatctgatcttagagaacgattcttttggccgaagcggagccatctcggaggtcgagattatccatgaggatcctctgcatgtggagtcggaacccgactcaactgctgaatcctcattcgagttgctgcagccggaagaagaagaaattcatcctcaggaaattccattccgattcaggggtgatctttatgaagactatggaaacaccctgaataattccagcaccaaagaggctcatcccaagcatgaggcgtacaaggaggtgatgtttgtatcttcgttcatttcttctgaacccattgtccatcttcatgaaactgaacgaccctcatcacccttgatcaagcctaagccttgtctctctggccctcataacattgttcttgtttatcatcaagaaacaacccggttcttgcacgatgcatctcttgagaaagagaaccttcaggccacggacaagcttgagacatcgactctagaggacgagagaaagcattccacttatgagcatgaaagtttctctttcaaaatcccccaggattcatgctcacagaaggaatccccagagtcctgttcgattagtaccacttccctgtgcgaggaccacaaccaccttccggtcctcatttctaacatgtttagaaggatggttgtggatgcttatatttatcataaatactgcaaatctcgtatttgtttgtggcactaatcttgcagaacgatgtcccgttggtcaagcttgtgactataaacaaagcactaccgggagataccccggattatcatggtaagttttctttctaataaaagcaagaaccaatttttaggatagtatgcaccttcaggtattcttggtcgctaaccattgcaggttgagattaagaacgagggtcatgcgatgcctaagaacatggtagctacatcaactgtacgctttggtgatccttggtattggaacacactcgataggagaatccgacatcacacacttggtttttgatgtcttgcgacacaaaagtcgaagtgtgggggaggtcgacaagcttttcatgacgagttccatcaaccaaggtcatcttggtttgaagttggtgttagtcctagcttgcctgaaaaaaaaagaaaaaaaaagaagataatgaaaacaaaaagaggacaaaagagagacagaagaaaagaaaaaaatgggagaagaagaaaagagcaagagagctgatgagatacatttggatcaaagaccgcattatgtgcgtgtctttgaaatatggttatacatctcactagtagcaatcatgttgccaggctacacctagtccctctatcgagctcatgtgtcgccttggctcaagctttatccactcctagctgtgcacaacttctcactcccgcagcactttcgcgcatacaagcaagaggagttgccctcttcttttctaggcatttgctgctccactccagttggcagttctacatttgcccaaaaaagagagatatcctacgtctctacagcattgtgccaacggatcacgccttcaaggcacaaggttcttgcacctgaggtgtgtgcatgaccaacttgcttgcttgagttggcatggtcaaggtgccttcctccgctacaatttgcattgtgatggaggagaaaacgacaatgatatgtgaccatgccactgccctagagatttcaaattatccatcattctggcagtaagtacaatcaggtatgcgaaaaataaaccaaggttcaccaaacctttacttaatagtaccactatgtgaatatggcttgatcatacatggttatgtttcttatgtctatttgcatatgctctggtttgggtgttttcgtgagacatctataggatttttaaattaagcatggtgcttaggtgaaaatagtctactttaatcaaattggacatggagtttagtttgactaatgaatttcagagttaatatgttcatagacattggatatatatcttctgtggactaacccctgcaggaaagttttcaaattgacgggtgagtcctcaagttcaattcacaatggaggtaggtcagagccgggaacaaatcaattgctaacatacaaaggagacagatatcacctatcaaggtgcacggtgcgtatattactaatcgctcctttagcatgttcatgcaaatttacctcagccctgtatgagttgtgcttaaacgaaaatttggtgaataataaaattttgaaaaaaaaggtgttttcagaataaaaaaaagagtgtctctcggaaaaaataaaataaaatattggcaaacttgtgggatccacgcttcttaagttttgaatccaatttcattttagtgtggatgtgaacaattaatcttgaggctacgataaaatcttttcaaatcattgtagtgcttcgagtatttgttgtccactaaccttttgcaggaaataaaaagacaatcaaggagcagtgtacaataacttcaaacacttatatcatgctccttatccatgagaaaagatatgcacagggaaccaagtagaacaaatgcaaaacttgttgcattcttacattcggttcaaatcttggtaagacctatctggtaagaatctcatacaccatgtgcatcctcatctcatgtctccatcctgccaggatacccatcatatccattgttgccataaaaaaagagaaaaaagaaataaaataaaataaaataaaataaagttggctccttggtcttccaaccaagtgagtcctttgtgcttcactcatgtctttgtttttctttttgtgtccaataaagaacccccatacaaagatgtcacatcctgattttcgtcttaggatttataaattatttaataaattattattagaatttatattatatgttcattaatttacaagtgaagttaaatgtgggaaataaaatttcctaaatataaagcatggatggatttaatttttattaaattctccatggttaattatactctctggaattttctcggatttttcggagctcaattcctaattttaatcatacaaagagcagttcagcaattatttaaataataaattaatccttaaatggtctgattataatcttgttacgtactttgagtgtccaattagtttcaggattcatgaaattatttgagcattggaagtatttttaacaatttaaagatcattttggtgattgatttatttggaaaagtaataaaaatcctcctcctcagcttgggcccttttcggcccattccttcctcccttctctctgttcctcagcccagcgtaaagtctaatctcctccctctcgctacagtgcttctcctacctccagccggctggacagaggccgtgttcatcccgataccggcgccaatctccgccgaatccggtcgcttcgttgcttcccttccaaaattgattgcaaaaacggattcctctctatctcctctatcttatccacaagaaacccccatcaaattcgttatctatctcacgaattttggccgtttttattcgggtgaactcgagataaatcctaatttccttcaccaaatccatctgttcccgaggcgatctctccctcttccgactataaatagaatcccctcggcctcctcttcggtttccccctgtttcccgaagttttccctaaccctagccgcctccccacgctcgtcttctctctccgtcgccggcagtcgctccagccgccgtttgccgtcgccctcctacgccgccacctccctcggctccgcaaggtcgagctctaccccgtccactggtttccctctgccaaatcccgccggaagccgctgtcaccgtgaaggccgagttcgccacccctgtttgatctccggccgagcctcctcgctgttgcggtcgtcacccgttcaccccgaggccgtcgtcggcatcgcagcaccaagccttagcccgtccacccctccgttgccgccgctcatcgccggaaagccgtcgccatcgtcaacccaaggtcgccgtccttcggagctcgtcgccggccatctccctcgccgtctgtcgtcgcgtaagtggtggtaagggtcgccttgatatcctctctctctcccggtgccctccgtttgcatcattgtaccgtggttcgctggtaaccgccgttcttgtgctcgccggcgtcgatctggcgtggtagccatgtcatcgctgacatcagcgctatcttggccatcaaaatcaatataaatcctgttatcccttttcaatagcatattagttttttttactatatgtcgtctactaaattcattccaataatttccggaggatgttttagtcttttatctcagatataaattatttgtaaattgtttaattaatttggaatagtcttttctttaataggctttaattggaattaatcttgtaaaattcataactaatccatatgaaatcggaatgaggtcgttcaagtctctaaattcatctaaaatcatgatctacatgtttgtttactttttatgtactgtttatttggtttttattaatctttttctttgttttgcgtgttagcttgtcgtttccgttgttgcgaaggttcatgagtgcgtcggaagtgttcaagaagactaattgaagaccgattattgcaaggcaagtcacacagatcctaaacaaccctttgagcattctgaacccgtttaaagctaatgttttatttcaatttatgcattattttagaatagcatcgggtggtgagcctttcccaattaattaatggccgaagatgactttattttcctatgggttataatttgattagctagaaccttatatattggtttggttcagctaaatgctatatatatataattgcttagccatgcttagaaacattaactcattaatgggatgaatcatattacattatttcttatggttatatttaatggtagctcacgatggtcaatcgtgctatgataattaattaataactaaaacctgattaatggtgggttgtgagcatatggttttgaaggtcgtggtcatgacaattaaggatcggttcacaagctactgttgtgagacattaaccgtgccaaccacaagccagcgtgggcaatggctttaccttttgtatagcatggttcattacggggcaccagactgagaagcggcgagaagtccgtgggggtcgctggggagtccatgcctctgttttttttttttgagggggtgattatgatccaggaatggtgcactatggtgagttgtgttgtgcgaggggtactgtcacagttcctttccgagataccgtggtggtattgaggcgcatggtaacatgtcgtggagctgtgtcttgtgggtacagtggtacacctctggccagagtaaaactattcgaatagccgtgcccgcggttatgggcgggttaagcagtctttttcgtgattagtctcatacctctcacaataattattaatgctataattggtaataatttgtttacctcctggtttggagttagatctgtgcagccgggtttggttgttcagaatggttgggcctgagcagcatgggtgtgctgttcagtgttgattaaaattgatgattactctactgttttactattcttaaatatttgctaaatgctgcttttgcaaatgagcctatattatgccatcctttggtatccttgtgcatttgcatatttgttgtgtggcttgttgagtatgtcatatgctcaccttgcaataatcaatcaacctcagttgaagaaaaaggatccagaaggagaagacatttggcttataccccagttgagctgcctgtgggagtggagctgaagccatcgctagactgttattccgctgttgtttttcttttggtttgtaagtatgtaacgttattattatgatagatttgtatattaaattatcagtttgtgtacctcggctgattcctggacgaggaatctatgcacaaattagttcggaaattactagtgaatttctgagcgtgacaaaagacaagtgtgggggtgatcttgcacatcaacgctataaccaaagcaagatcaccctagaagtgatgagccatgacaaaccacacaaggggaattgatgtagtcaaacccaatgaggggtcagttgaacctccagttcggctgaaccacctctatcgtgaatcgtcctctgttttatacagagcgcaggtttgcacaatttttcctttggaaatccattctatcttgagtttaatttgattatcaattctaaaatatcgaagataattaaactcaagctagagatggtacaattagagtttatggtctccctgaaaataacatgcatgcctattattctttgctcattacttgttgcttgtggtgacatatccaatagggaccccatgttatctaggtaattaatgaatgaaatatagtctgatgatagaaatcctgctcttcatgtggcacacttgggaattttataaaaagaaaaaaaaacatataatgatgctaaactcctcattgatatttttattcccactagagccataggttgatcattcatgattagcttgctacatacgctgcttgtcattacattgagcgttgtcaagttttgtgaccctagtgaaatgcttttcatactttcatggtcaagatcacatacactccaaatacacccaccaatgcttgacttctacactggaagttagcattgctcatttgtcattcatttcatccatagtccacaaaataaatactccatgtcatttatgcatcttcctccaaagttctttcaaaaagagagatagagagagaggcatggctatgaaaaagaaagaaaaaaatgctcatacaagtatggagcatgatgatgaaaaaaaaaagaaagaaagaaaagaaaaaaaagagatagccatgcattctcccaaatttcaaaagagaataaatggaggaggaggtatacaaaaaggagttatttttattttcctttttccactcacaaatttaccacacacatatacatgcacattcttgactagaaagtatgactagtatttccatggatcctttatttgactttgcaatatatgtgatgcaagtaatgctcttctcttttccatactctgagctccacataagccttattagatggtaggaaaagaaaaggcacaatcatatgcctttgtggggaatcatacaccttgagtgatcaagagaataaattgaggagcaaaccgaagttataattttgtgttacttgagaaaaaaccccaagttgttcttcatgaaaagttagggtgacttaagtcaagattgttccatttctcaattgttcaagattgcatagtagacactacaaagatcctcaagtacaggtatgactttgaataatttgtttgcatgattgttagtaaggaagtcataactctattgtagagtccatagccttcactctagacgagcaaaggttaagtgtgggggtgttgttgacggtccttaaatcataatatctaaccgtcaatacctacatataatgaaataaaacatggtatccaacttagtggtaggtattattactaatcatttccactagtgttggtgaaatatgtgtatgcaggtaatttgaggagaaaacacatccgtcatatgacaaaatgcacctacgcgcattcagg

SEQ ID NO: 10816 - DNA, 11831 bp, Oryza sativa
caatggggagtcatctttatggtttatttagactgattttgctaggactacttcatgtcaacaaattgagtgaatgatttttggttggatgattgctatatctcttaaattagattgaatgttagaaaatataaatattgtttcctaattttgttaggtgcttatagaccatttgcaaaagcagaactaattagttgggcatatagttttgtcgatctcttagaatgggcaacatcttgcatgagcatgtactggataactggtcaatgtttctaaattctaaattcataaatgcgagctagcataggcacaatttgagcgctcaccataacacatgtcccacaggtggtgtcgaggcactttattttcccctggataatttgatttcttgatctaagtgctaaattgaagtcttccacagcccatttccagctgagtctcttcctaaaattttaagttcaaatgaacccattagtgtttgtctcgtggtaccttacttagaaatactggatgcttgttctaagttgtactgacagattaccatcaattacacactccgtgcacaccaactaggccaatgtcacagaaaattctagaaaaatttgacacatacttccaatagtattacatctacgtgtaaaatcttatcttcaaattcattatattttagctgtaacaaaaaagacaaaatcctgacagatttttacccttaaaactgttagatttttcacttttttgttacggctaaaatatactccctccgtcccacaatataagggattttgaggttttgcttgcaacatttgaccactcgtcttattcaatttttttttgcaaatataaaaaacgaaaagttgtgcttaaagtaatgtagataataaagtaagtcaaataaaataaataataattttaaaaaattttaaataagacgagtggtcaaacattgcaaacaaaaactcaaaatcccttatattatgggatggagggagtaatgaatttgaatatgagactttgcagatatgtgtaatactattaggagtaaatgtccaatttcttatacttcctccgttttacaatgtaagttgttctagcatttcccatattcatattgatgttaatgaatctagatagatatatatgtctagattcattaacatcattatgaatgtaggaaatgctagaatgacttgcattgtgaaacggagggagtagaatttttcgtgacatttgctagttggtgtgcacggagtgtgctgaagcttgtgtgcaaatgatatgttctccattctatatcatattctatcagttgagtaatcatttctcttttttcctgttactaggtaccagaagaaggtttcgaacataattgatgatgttcttgagtggtctccaaagttagctttgtctgggatgatggaaaaacatactgggactaatgcatcagaaactagcaatcacaccagtggaactgggagtagtcctgtccctcccactaatgaagggaataccgcaaaagcagacccagatatggatcgtcagacgaactcagataaagtccaagatggtgatgagtatggtgatgacatgagaacaagatttagtgaagtttagaatcgacttataaactctaaagctctggtaatttggagtacttaccctcggggatttatctgcagaatcatatagataggttactgacaagttcaaattcagggtgctcatgttttgaccatgtttcattcacatattgccagcaatggctgtattacgaggttctcaaagcatattttcgcatggctatgatgtaaacgtgcctcgagtttgcccgagttgagaggttgagaatgcaatgtgtccgtgtccgtgcgtgtgagccgtgtgccaccgacacgtcctgtggcagtgagccaatatgtcttgcctatcgttctgtggctgagcctcagcaggcttgttacattcctcacactgatgacaccttgataagcgcatatgcccattgttcacatcccttgtcccttttttttttatgggaaccgatttcattactatgacggcccggccaggaataagttcatccgaggtctcccttaatgtcaccgaatctgattttcgtccttcaaccggaaaactacatcggatccctcaactattaaaaccggtgcagattaggtctctcggtggtttggaaggcggttttcattgacgtgatgtttatgtggctgatttgactaggtctttatcctatgtggcattgatgtggcgcttacgtggcaattatatatcagaaaaataataaaaatagtggcccacatgttagctacacacaaaaaataacctccctcactcctctcttcttcctttcccctctctcttctctctctcttctttcctggcagcggacggcacgggtgggtggcggagcagccaagcgaggcaggctatccgagatccagcggcggcggctcggcatgcgccacggcggggatgtgggacttggcgaaagggaaggaggcgaggcgacgggagcctcgaccaggggagaggaggccggcggcggggtggccttggccttgggcggcggcacgggcgccttggtgggtggcgcggtggccggagccggggtggtgggtgccgaggcgggggccggggtggcggggggtggtcggcgcggcggcgggcttcttcttggaggagaccggtggtgtggtggtcggctccacccgccgtaccgggaatccatctcggaggagctcctcgagaacattgtctcccgcatctccctctgcgacgtcgtcctcacctcggcgatctctcgttcctggatccaccggtgggagtctgcccctaatctccgccactagtggccccaccgcttgcgccccgatctggagcggcggtgcctaggtggccgtggcgggttcccttccaccaccagctcgcccgagtggctcccccagcctcctccccttcccacccccgcgccagcattgcacagcgtgggcgacttggccgagccagcggacgaggaggacgacgacgacgtggctgcggcgccaggccgcagccgcagcaatgacaccgtcgagccaagatctgcgaaaacatcacgcttggtgtccggcttgtccctcccggcggcatcgtcgagagccagcgccgcggattctgcgccgacctcgaccccgaccacacggtggcttcggcgccgaactcgactgcgccgcggccgtcttcgtctgcgcctttgagctctagcgcaccggtcgctctgctccacctgccacccctctgctccgcccgctgcccaccaccgctccgcccaccgcccctctgctccgcccctgctcgcccgtgccaccatcgcaagagaggagaggggagagagagttgaagagagggagatggggagagaggaggaagaagagtgggtcaagaatgacacgtggggcccacgtgggccctactattttttaattaatttatgtaaaactgacatgtgggtcccatgaggtttattatttttccggatcgaatggccacgtaagcgccacgtcggtgccacgtcagatcaagaccaagtcaaattagccttgtaggcgccatgtcagccaaaaccgtcgagggacctaatctgcaccggtttagatagttgaggaacctgttgtatctgtatctggttttgcggttgaaaaacgaaaatcgaattcattgacaagttaaaggaccttagatgaacttattccgcccagccaaatcactggtcaccaaacactctagaccaggcggggtactggcccagctaggggagttctgcaaattacaacccaacgctgccaattcgtgcgcaaccttattacattccgtggggcagtaacgaaccgagaaagaaagaaagcagctggagatgacattcttaatctccaaaatcacaccccctaaagccgacaaattaaaagaattctcgtggagtgccgttttaagcatcatcgagtccgtttccagctcaaccttcatcattcgcgggtacgaattacaccacaaaactatcatgtacggtcgatcgaattactcccctaaactcgaataccggatattttacaacgtcaactatacaaaccggacaaataacccctctagctcaatccaaagtagttttaatcctaagtggctgtccaattagcaaattttttttttaaaaatagtgtgggcccgacctgtaagtctccctatctatctctctcctctcacctctctcaatctctctctagtctctactctctcttcctcaatcccgattcactctctctctttctctctcttctccctccctttgctgcagcgagcggcggcggccgacagagtcggagcttgcactcgcacgaaggtggcgacaacggtggtggagccaaagctcgcatgagtggctggggtggcgaggcgtggctggatgggcgctccgatcggcgacaggcgctgcgacaaaaggggaaccagtcgatggtgagcggcggtgggtgtggatgggagggtgctccagtcggcagcgcgtcgggtctaggtgtcctcttcctcccctccaggaggcacaactacgaggcgagccactcgacgaaggagccgaggtcagggccaaggaaggcgttggcgtagacggtacagtggtgcggcccgaactgcgccgcctgttggtatttcttacgaccacagataaatccgcaagcccacggaataccgttgtaacacttcaccttcggatgaccccaaaaggatatcgaactcagagaacgtgtgtactctacctaatgctaagactatccaaggataacaactactggtaggctatctaggctagagaggattttctatgtgttttaattatctaagcgaagttgaaagtaatttcctatctgttgcttcaggcaccgacccttgttggtctgccagtgtggttccggctatagctttatgatgtatccgaacgtggaggattactatgacaggatttagggctgtcaccacctgctgtctacctctgacaaatccgtgggatacacaataaacaatggtaatctctaacctaaacaccacgtttaagttattaattactactctaatacttgcacatgaacttccttctttatccagagtcttagtagtagagcacttagtacaaatactaaataatgaacccgcaaagatgaaaatctatctcacttagactaagtaattaaataaaaaaaaagatctcgaatgcttactttatagaaaaagtttcttcgaacccggagcagagtgtactgatagcttcggtacaactccaaaattcttcctagaaaggtaaactcatcgaggtagaagtcggagagagcgccaaactttcaggcactcctctagagcttcccctcactctttacctattttctaatgcacaaaagatacaatagagcctcttgtaattcagctcaaagttgtttgttgtgaagtgaagtgagctcctccttttatagcctctatatgacggttacagctatgggaaatgtcctaaatgctctgcaaccgtcattgggatgtcatcagcagcgtacacgtggaaagctaggatcaaaggtgccagtggtggtttggccgaaccctaggcgccacctcctggcctctcctttggctaggagaccagctgggggactctgatggcggttatgacagttatgacccattccatggtggtttcacctgacttgggggcacttcaatccgtgtacatgcgtctgattggccggatgtatgtttccttgtatgacggttgtgttttctccttaaaatacctgcatacacatatttcaccaacactagtggagttgattagtaataatccctaccactaagttggataccatattttatttcattatatgcaggtattgatggtcaaatattatgatttatggaccgttaacaacacccccacacttaacatttgcttgtcccaagtgaaggctatggactctacaatagagttatgacttccttactaataatcatgtaaacaaattattcaaagccatacttgtacttgtgggtctttgtagtgtctaccaggcgatcttgagcaattgagaaatgtaccaatcaccctagcttttcatgaagaacaacttgagtttttttcaagtaacacaaaatttataacttttctttgctcctcagttgattctctcgatcactcaaggtgtatgattcctcacaaaggcacatgattgtgccttttcttttcttaccatctaataaggcttatgtggagttcagagtatggaaaagagtagagcattacttgcgtcacatatattgttaagtcaaataatggacccacggaaatgcaagacatactttcttgtcaagaagtgcatgtgtatgtgtatggcaaatttgtgggttgaaaaaggaaaatactattaataataataactccttttgtatacctcctcctccatttattttctgttttgaaattttggagagtgcatggttatctttttttttctctttgcctttttttccttttgtctctctttttttttttcatgatattgctctatacttgtaggcaaattttgctacaggacaccgtgactttgcagtttgtcatggctcatcacttctagggtgatcttgctttggttacggtgttgatgtgcaagatcactcacacacttgtctttgtacctgggatgctttattggacataaaaaaacaaagacaagagtgaagcaaaaaggactcatttggttggaagaccaggaagccaactttattttattttattttactttatttttattttaatagctagacctaagataactagagggtggcctaacgactcaggccattgaaaactaacggatcaagggggatctaaggactccgggtagaagctaaaagcgactaggtttactacgtctaagtcatgatcaacttctaacggatcaaggaaaaattttaaacgatggccatttaccttgaaagtgttacctttgttgtctcgttgtgtgatggctccatgtgatgaagtgtcgacgacggtatatgggcccatccatttacttcgaagttttccatgtccgaaaagcttcacccgtgagttgaacaactgcactttgtcctctgctttgaacaccttgtgcttgctctgtctatcatgccatcttttggttttgtccttatagatcttggcattatggtaggacttgtccctccattcctccagcttagagagctacatcttcctgagctgtccagctccctttaggtccatattccaagtccggatagcccagtgcgccctgtgttccaactctactagtaggtgacaagtcttcccgtagacaagttggtatggtgacatgataatgggtgccttataagcagtcctatatgcccaaagcgcatcaggtagcttgttcttccatgccttccccattttattgacagtcttctacagaatattcttaatttgtttgttgcatgtttctatctgcccacttgtctggggatgatatggagtggcaatgttgtgttgagcctcaagctcttgcaaaaagcttcggaaggtcttatcgatgaaatgagaccctccgtcacttatcaccatccgcggagttccaaaatgagggaagataatcttgtggaacatccgccgagcgtgcttggcatctgcgccttgcatggcattgcctctacccacttggacacatagtcagcggccaccatactcgtactcataggactttgggaaaggttccatgaggtcgatgccccatacatcaaataactcgacttgaaggttgtatgtcagtggcatcgcatctagagtagtaatccccctatgcttctggcaccttgtgcatcttcgaacgaatttctttgggtcatcatacattgttgtctaaaagaatccactctgccagatctttgcatgtgtcctgaatgctccatagtgatctccatatggggcagcatgacacttttcaatgattttcatgccttcgtctgccggaacgcatctccgtagtacgccatctgaacagactctgtaaaggtaaggtgcatcccacaagttccagcggctctcgtagatcaacctcttcttattttctcccagtgttacatgccccgcgaccatgaagttgatgatggttacataccacgggtcggagtctgtgactttcaagtttcaacagcatgtcatctcgtagatagtcatttatcggtagctcttgcatgttagtgatttgcatacgcgacaaatgatctgcaacaaaattctccactcccttttttatccttaatttcgatgttaaattcttggagttgaagaatccacctaattagccgaggttttgcatattttttagtgagcgggtattttagtgcagcatggttagtgtaaactattaccttagctcccactaaatatgacctgaacttatcaatgacaaacactacagctaggagctcttttttagttgtggcataattaagctgagctccagtcaatgttttactagcatttgcgatagcatggtcagtgtaaactattaccttagctcccactgcaaagttactagcatcgcacatgatttcaaacggctgcaaccaatcagagggttggatgactagtgctgagatgagtgattccttacagatgttaaaagattttagacactcatcatcaagtcaaacgggacatccttagctagcaccactgcttgttgcccgtaaacatcgtcaagacggagccgttgcacaatctgtatgccttcgtctcgtcacaccgaagtcatcgtgaggcctgtgattatgccgaaatgagatgttgtccgtccgtggtgcttttcccctctttgtcaagaatcgatgcagtctgtccgtggttctctccctttccgtggagtatgacatcgtcgctcgtccgtgtattggagggtcgcttgtctacatcaacatgaagcaagaatggtaccgtctatgatgccagggaaccgttcgtgttgaatctacaccaacaatgtcctcagccgttccgccgacatggcatttacttcttccaaggtcgttgttgtatttcttaacgacattactagaaatataattccaagtaatggcacagaaatactactggtatattatggttacagagtttatccgcaagcgcatggatataccgttgtagcatttcacccgagagtattccaaggtatcatatttgtttaatcccgtgggaagattataatagagagaaccgtactaataatttatatattacttgtaataaccaaagtctaagcaggggttaatataattcatagggtagagtgtcactaagcagaagcagtcatcctcttatttatgattatctaagctaagtggaaagaatatagaaagatcatattcctatacttatagtatacatacatattatacatacatcctaattatattattacttagctaataccctctatccgatgccctcctgttgcttgttgacggtcgttagcgatcagtttcgactgtcaatattaccaaaatagagaactagttatggttgcaatgcatattagtgttagaataataatattccacgtattgggtttactaaccttttgcagagaataaccataaagtggaggagaatcaacatcaaattagatgatcaattaatcggacgatgtcgaggatcagatttatgtatgaatgggccaagaacttagaaatgacacgacgaattgggccaaaattcacaagtctgtggaggagagcatgagaggaggccaccaaccaaaatttgggctggttgggccggcccctggttcggccgaaccttcctcaccgccgttcgatctaggtctttgcctggacggtgtagattggctccgaacgggtatttccgaccattccaaccatcacaaccgtcattgggaagctataaaaggagctctcatcctccatttcttgacatacttcaagcaagagctctctcatattctttctagtttagtttagtattcttaagcttgtggagtaaggatagaatagaaatctgagtccagatgtaagagccttaggttcataccaggtatttagaagtgcatttgttgtcctttagatttcatatttactatactgcaatttgattatatgcgataacaaagttaactctaatcggtaaaattgaaaccacttctatttgattaataacttgaacagaagtatacatgtttaataatttattcaaatactagtttatttatcaccaacaaatataaattatgtggaatttttactctctgtttaggcctcctacaaatccaaaccaactttcagcctaaccaatttcatcttttcacaagatttcaaatattaggaatttatgtgtgaaactttgaaaagtggaacctataaaccaacacctatcaccacaccaaattcctgaattgttgaacaaattttacctaatcaaattgaatttaccaagatagggaaagaaaataaatcctggaaatttcaagaacgaatctatactcagtttttcacccacctcgacttgggcccacttgtcactgaccttgggtgcctctttagccccacaacacacccatgggtgtgttcccacatcaggacttaagggggggcagagaaaacccattcttcttactcccctttcatcttcactgcttgctctttcttttcttctaagctgagctctcatctcacttctcctccccaaaccccatccaatagcccaagatcaatccctgcatgttagaccacaacaatccccatcatccaagctttccatccatcccaacatcttgcacatgcatggagacttgagagagatcgagaaggaataagagagtggtggtttcagcctgcagggctgcagaagcagcattttgttttcctccttttggtgagcttccttttcatccatggtgcctcttttgaattccctccatgttgaacatttgtagcaacgttctataggttgtccactccattactgcagctagaaggtggctgcaactcaccctgagttcatcttttttgatttcggttgaagcagccctacgcaatgtctcttgccgtcagcccgaggcctagctccgcctcttgccaactgcccaaggccttagcctcgcacaatcttacgtccaggttgctaccatgtgagccaagtccggtggaagttggagaaaaggggagtgaaaatagaaatcgatttctaaaacaactatcggactgaaagaggtatgaactttagaaatccataactaattcatatgaactccgaattcagtgaaccaaattcctatagattcataaacagagctcttcaatgttgtaaaataaaaatgaccaacttttgtactggttttcccagtaaaaatataaatagctatatgtatcccttgtgtctagctcttaataaattcgtatgaaattattggtaaaatctaaaattgtgcaaccatttttgttgagcttatattttagtactctttgctgttgtgaaaatgattttgacaaaactacctcttaaatcatgtttaggagtttatttagaattcctatgtttttaacttgtaaaatccttaaataaataatgacaacacatatagctttgaaataatttttcttaggacctgtgaatgatgttcttcccataaaaataatcatacttgtaaaaacttggtttgagttgcaagattcttggaatgctctaaagtagactcaattatttgcaaaactgccattatatgacctga

SEQ ID NO: 10817 - DNA, 581 bp, Oryza sativa
aggatttttatataggttcgggcccctgagttgtcaggtaataaccctacatcctattggccgaagccggtattgctcttattcaccataatcacaccaatacaatatgtgggtagcctatctaactgttgtcgacatgtcggtctgaaggtttgactcgtagtcgacaacagggtagtcttactcctcggatccgtgcccggcgagatcagagatagcgctttcgtatctcctgacagtatccggagacaccgtaggggaatagccatgcctatccctgaagtcgatatccggcggcgtgtcttggcgtatgtaggcttgtatgttgtggcttctggtgggcgtgtgttgattgtcatgggtgttttccatggtcctttcccctctcctcctagggggtcttgtatttatacccataggtgtccccttgtccaagtagaactagggaaaccaatatggatacaatccgagtagtccttgtcgtttccatgtagaactctggttgtctttccttatccggaactccctcgaggccaattttcgtataagacatggtatgtggtggatcctgccgagattta

SEQ ID NO: 10818 - DNA, 4509 bp, Oryza sativa
ggggagggatggggagggttagggttagggttagggttttgataaggctgtgggccgaccgggatggaaataagtctattttaggtccctcgggctggaaataagtctatattaggtccctcgggccgaaaaaaagagaagttcatttttagtgcttcattttttcagaagcatttacaattatagttattgaatgtgtttatttctaagcaaacctaaaaggaaggattttctttctttttccaattaaataattattaaatgatgtttgtattattaaaattagcaattaagctctgaaaattccaataaatttccaaagagcgtaactaatcatggagaatttaataaaattaaatttaacaatgtcattttatttctcacactttacttgtaaatttatttaattatacacatacctccttaaaaatactaaatatttcagcgaatttgtattttaattaattgcatattttttctgatacgtgcgcttcccggtgcaatacacgggtacttttgctaaaccaaacaacaattttggtcaatatacacactccgtaatcacccggtacaacgcacgggcacttttgctagtactatatacatacgtatagaagtagtagattagatacagagagactagagaaagagggagactgattgcgcgcgcgcctccctgcgcggctgatcgcgtatcagccgtcccgacgtttggtagggtagcaatccaaattggcccactgtctcctttcccccttcggatcaaggctgacggcgccccggtccaagttgcgcagtgcgacgtgggtcggtgggtgcgtgtggccccgcttgcagcgtgccggcccccggtcctgcctgtctcgcccgttccccctgcgccgcccctcgccggcccgcgcacgcgcccaagacgcacttggtggtccgcgtcgcgctcgtctctcgcgtgcgctgcgtctcccctcctacccctgattcgcacggaattcctcgaatcgcccgtgagatccgcttgattcgatctccgattcaggccccggggtctagggttttcgccgccgttcgagcggagcagagcggggcgtgggagatggcggggaagggagccaaggcgacggcggccaagtcggcggagaaggaaaaggggaagaaggcccccgtatcccgctcatcccgcgccgggtcccaggtaagttcgactgctcatcctctccccgcccccgctcgtcgcttctccgtcgttcgtggtcgctcaagattcggtccgcctgctgccccttcctgtgcattttggtgttcccacaggcgccttgggttcagctattgctctttctaccgctttggttggaattgcgcgttttagcttggtgaaattttcggttggagattacagttgtttgggtcttggaaattcgacccacgggagatttcaggctttcaacagatctggaaaaccatatgttatgtctggtgctattatttttgggctgtgagatttggttttctcgcttgggtgcgagaggacctgcacggactggtgggtttcggtaggttgtactgtgggtttagttgtctcaaatactgtccgaaattctgggtgctcggcttagtattctcgtgttggaatctctggaaatggtagtcttatcaaatgagcctccagtttcttgttcactgtaacttgttatttctcgaggtggcaacatttcagggatctcaacatggttggatgaccatttaggatacattttgctcccgcatagaccaaaagctgattttgtcttcatcttgaattcattgtagcaagttaatttatttgatagtacctcccttcgcttcctagcacaaatgcacaatgcatatagaggttttctcccatccctgggaagtattatatatatacctccccaccacttgaaaggcacaagacttaaaccggctgaactgattagagcaaatggatgttttcagaaatgtcaggttttagggtcctttgggaggtatattgtgtacatagtgttgttaatcaggtggtatataccttttagtagaggtattataacctcatgactaatgctaaatacctatacctcggacaaaaagtcaggagccaatgcaaatgtgaatttcctgtcctatccccagttgtgatcactactgggaggtataataccctctcgcatataactagaagattataataatctgttaatctgctcaatcatatgtaggagaagccagctccaaacaaggatgtttaccaactatttgctgagaaggttagggataacaagcagctggaatcaagatgggcaattatgcaagaaactcgtgttgagtatttccgtggaaaagattttactaccttcatgaggaatcatccagaagttagggaaattttagggccagataaagatttagaagtggaagacattgttaacactctgctgagcaagaaccttgtgataaggtgtgaccgagtttggaaaactgtcagaccaggaaagaagaaattgtcatcgtggcctgcacatttggagatacatcgtgtaagtaccactgctaatgaagaacattgtaggttgaactttctgttgatcttgttgatgtactgttgtatttttgatgatataatgttcctaatatttctattacccttatccacaatagtattacatttttatggcaatcacatctttgttctcttggcttcaagtgaaggttttcttgtgtcttggtgatttctgttcttgcttttaattcctatcatatttatcctgtatttagtttgaaattagataacgactgtatcaggtgaaacaatacatgtatcaactagcacatttgctccattttgcatcgctttgaagctttttttttttgtatcttgcttatttttgaccatgtaataaaccagttatgcctcgcaaattcattttgcttgaaaataatgagtggtgatttcatgatagccttttttcaggatactattatcctcagtagttctaatgtgagcttgatttattcttgcaggaacaagtgttcactgagaatgatggattttttgcttggatgtttctcaaaaggaggaccttgtggcaaacgattctttcatttgtttggcctctctttgctttggcagtttgcttatttccagtttacccataccaatgcaagattgtggtcttgtactcatgtgctggagctttattgttcattgtctctattcttttgtgtaagcacttctctctaacactgtcttttatgctagaaatattagcaccattaactaatcaaggtatttttttttcacgagtacaagacagacaaaacaaaaaataagcttatgctctccctagtgtctattaataatatgtacaatgcatggatgcccttgtaggcttgtactcgcatatgctgttactgcgttacctatgataaatgagacataatttagtactcatgtaactgcaatattttgctatatcatttttgtagttgcatcatcatgttctggagtaaattttattggagtttatgtgctgcttttaaggacgttttgtggcattatctagtagacctaaaattgcttgtgagcatgcaacgttctatttgtatttactgtttagtagtacaaacaactactgcaacaatgagtaggctaagcctgtctagcagtctatctcaaaatcatgcttttagctaaaaactattaatcgctgactatgtttgacagcttgggagtgtgacaaaaatgtgatttatatttttgttagactggtaggtttgaaagccttggaaaaatgattactaaatgacctctaaacctttgagatatgcaataattctttgaaaaaaagagagtaaaatgcactagtcataccgcaacatgtgaggtgtgtgcaatttagtcattcaaaccttgcaaattgctcagaaaagtcactcatattgtttcaggggtgtaaatcacatcaaacacatgccacgtgtgctgtttgcttccaacatggatgatatgctagcctaacattgtgcgctcatgagccacatgggcatggcaagctataaaaatgcaaataagtccgttgtttttcgtgcagctgctgcatgcactcatgagctacatgcagttgcatgaaaaatacaggactaatctgcaatttttaattttgtctaagcacctaaacttgtcctgtccaggtggctcatgagacatcatgttaggctagcatattgtccaaccttggtagcgaacagcccaacatgtcatgtgtacgatgaggtttgcacccctgaataaaaatgagtgactcactttagtaatttgcaagatgaatgactaaattacacacttcacaagttgtggtaccactagtgcatctaactccttaaaaaaactgttgcttgtgatgaagtagattgttgttactagaaaatactccctccatttctaaatatttgacatcgttgactttttagcacatgtttgaccgttcgtcttat

SEQ ID NO: 10819 - DNA, 27128 bp, Oryza sativa
ggattggatcaaccatgtgattaggtgttctcttcttaagcaggaaataggaaattagagggctcctgatgaagtagcataaatgcatatgtgcacaatctccgcaaaaatcgagctcaaaggtacgcatctccttcgatttggagaactgtaaaaaatctgatgcctccattttatgccatctgttatgtcttttggagcacaaaggattttggtctgtgttttttcatttatgtgagatttcagattactgcatcatcttatttatcaagaactataaattactttgttccagaagtccatttcataatctatattagctattattttttagatctatcttgaatggacttcaggcttgatcaaaatttctgtctgttctctaactgctattcactggccaaataagggcatctatcgagttaatgtggactgatggcatatattgtacattagttgtgcgactaataaattcagttgagttgctgatttattgtttcacaaatgaatttagtttcactctattttcttcttaacaaatcttttttctgttaattgcatatacatgttcaaatcccttgtcatggagatataaagctttagtgaacagtcaaggcagagattttgcatctttagtgtattgtagatcagttgataactatggatcattcatacatgattctggtcgctcaataatttgtgtattgtaaacatgtttataattcctgcaaatttctcctacatgattccttattcatgcaaattctgttcttctccctctaattggcctcaattcactgatgtgagaaaacaaaacatgatggtattcagtatcgaagctaaggtatttttctttccttttttgcagtcataaaactggattgcagacagctacctcggttctaaattcatccagggcatcgcttcatataagttactgcaaggaattctgcactacaactttctacacataggagcaagatggtaaggcacaaaatgcatagtaacaaataaaggataatgactatcgctcttgggctataaaaacttttatgttaaagcatctcatatgattaaggaaactgtatagctataaaagttatcacaactgaaaaaaggcattagtgtcccagatattctcggcttgtggaatacaaagttagaagaaatatttctcaaacattattgcagtgtctttttttttccttgaagaaatactaacgactactagattacttagaagcagcaatcaaagatgaaaactaacgcgccagttggcaaaaccaggttaaatcaggttatatgtaagctcaagtgatcttgcagttatgttgagaaaaattattagatctatgtgtgaactcactaatgtttttagggtgatgcttgatagtcgctgaattaccaattttaaagttcaattcagatcaaatattaattatttgaaaaaattggttatatagcatcgaaagtttccgtttttggttttatagcaccgaaagttaccggtcactttaatagtatccaaagttcaccttgttcccatttttagcactttcgtcaatttttccgtccgtcttgatcgttattgatccagccacacacatgatataacatttctacccctcattgatatgcattatacttgtacttgtgaggggtaaaaacgtcatatcgtgtgtgtggctggatcaagacggacggaaaatgatcgagaattgacggaagtgttaaaaatgggaacatggtgaactttgggtgctattaaagtgaaccggtaactttcggtgctataaaaccaaaaacgtgaactttcgatgctatataaccaattttgcctaattatttatagaatcgggtttgtctgaaacgatataaaacaatatgttttcttgaacttaataggctcacttttacatattctgcctatttgtgacgacatggtagagcagaaataccgagagatcacctgggtgaggtagacaatggcctttatggcgcccaggttctactgtggcccaacatgttcttttttacagagggtgtactccgtcaccgagaggagttgtcaatctgcaccatcaccaactgggaggcctccttctgtgtcgccatagaggagcattatcaatctcttccgccataggctcatgtgtcctcgatctgagccgccattgccagatatgtcctcgatctgcatgagacaaggatgttgctaatagctgattaacgcaatggggtacaaaattatgttgttcttggaggagactatactatgtatgtcttctccctgctgtaatgtttgagttccatccatctaatttagagttatctaactcaatgttccctcttctcaatgacaataataaaagggttaattagatcatgccattataattttcatggttttaaaatatgccattacaattcaactatttggaattataccattataactttagagttattagataaataccactacttacctcttcaacccatattctaaatgttatagacgaaattactcttttcttcttccttcgtctcctccccactctcttctgttcatcctcggaatctgacggccggagagctgcagctcgaagcagcagcggcaacagttcgagggccccgtggtcgccctgacctgtcccctatctccctgctgccgcagctgtcagggctgccgcactgcctagagatggtctgtgacgctgatgctacgcatggcgtccaatctgcatcaacgaagaggagcaacagcaatatctgtaggatgagtgattctccggtgctctctgctgtatgatactattagtagaaacgatcttagccattgatttattaggctataatgttaagtttttctttatatgatttgtgccttctattctttttctcttcgagaaatttgcatgactagatctcgcgcataatgagaaattatttttttttatctcttgcctttgatttgcggtgagaggatcacttgtcatatatatcaagcaactcatgcacttgaatagcgctattcagttttttatactcctatacgatttgtttggatgaagatgcatgaatacatgttcacatcaaaactaacacggtagctgctaattgggtagccaggccgcaagattgcttatctgtcctcgatcaggaccgaaagcctcgtgccgccgccttgattcatcatggagaacaagaaagcccaagtttaagttttagctgagtcaaaaatatttgtctgactttttctccgatgtttttattttattattttattagacaattatacccttacatggttctactaccatttactaagttggtagtagaatagatctgatcccttagatttaaaaaaaattgctccgattaattctattatcaatagagagcactggagaatcactcttgtgcattatttgtagaattttaattatcgtcgattacctatcatggggtttgcaacaagataattcccatctttatttaaatttggtgcaattgtttttctggaactttgatgtttaacacgtaatgccactgatcaactttatttcaaattcactaggaccttgtagatgactaatcattgcaccattctccatttagcattcgaatagttaataatgtggtactgtcatttgtaccgtggagattgaagcttgtggagcagctgaaattcagtttatgaaacaatgcttctgtccaagcttgtgacgaccaaggtgttatttgtagttatctgtacaatgaagattgaatcggaatttattaacaattcttgtgcttgcattgcttcatcataattcgccttcttttgcatgatcataatgttactcatgtctctgtatgccatgagttaacttttttgtttagctaagtggtattccgattagaggggcactattttatttcttaccgtgatattttattcaactattttttattgttcttgttatttaattaggaacactataaagatgtgatataattattgtgtattaatgtttttgatacaacaaacatacacccgatgattatctaacatcattgttcttggtgtgttttgaattcataaatatattttcttcttccattgcaacgcaggggcacccactagtaacttaaaacaaaaggaagtaactttatcatgacattaaaagtagattcgttatggaggtaaaaacatgagtctatctagaaattaaatttaatcagcaaaaattatggaattgactaaaaataataataaaataaacaactcacaacattatgaatatataagaagtaatttaatcaaatcgaaaagtaatttatatatatgataaaaataacttacatatataataaaagtaatttacaatgtagatatttcttttctcaaaatatagtaatgtaagatcttgttgtaaagatttaattgcaacaaacacaatggtgtaatcggattataaatcgaataagtaatttaaaagaaaattctataagaagaaaaaaaatacatgtatcgcttggtgtattagagcatctccaacatagcctctaaacatagccctcaaacaatttttaagagttaagaccaaaaactgttttgagagttaagaccaaaaactaagatccaacaggacccttactaaaacccccaaaataggaaggcacacaaataatctccttaggtccccagtgctggggctcatttgtggacccatggtggagaagcgcgggagaaaattcccgctcttccccctttttctctcccgcgtgttgtctctggcggcgatcgcaccccaggtgcccctcgtccatggcgccctctccgacgatgtcccccactgtccagatcaggtttcagatttttgtgaagtgttttattttgttcttgagcactatacttggaaattatcactgttaattatcaaatgaagtacaattcatttatcgattgtgattaatagaatatagcctactcagtttgcattatctgaacatggaaatatgaatgatttttacaaccttaaggacagtatcactgtttctttctttgcgatccatctaaattttgaatataaactatagcatagttaacaggaattatgatccatgtgtcctttactagtaggatatgtcattaccacgtttggcctttggagtcctttttgttaattatttctgcaataatttatattactttcatatttgttatttataatcgaaccattcatacttgtttcatacttgtaggatgtgttatttttaatttatataatggatcattggattcacatagtccattttttatgagcaattttcattttcattggtgaattataaatcttggttgcatgttgttgtatatggcactgtgcccacaccatatttccatgtttgaaaattttaattactagtaatatgcccgtgctaacgctatgataatattttatgtagttcaaatattgcacatccaaatcgccagaaaaatgcttccacattccgttgttcttaatacaaaatgtaatacacataaaccacaataaccacttgatggtttgataactatacatctctgggaatcgcatgggaggggtaacaaatctagttaagtagcaaggaattcgggaggggttacaaatctagttaagtagcaaggaattctctcaataataatctattatacgcatactatgaccactgattcagaaaaatattatccagatccccacaaaacctccacaattctgattgatccaatatgtaggagagtaataaggtatctacagccattgcatgcttcagatttatttaacagcccaatagcccattatgcacttcattgtgttgaacttgaaatgccttgcttgtgctacagagaggtgaaacgaaaggtgtttcaaaacaaagaaaaatgctaggccttgatcagcataaattagttcatttaaattttagcttgctcaatgttttacatggcaaagagtcagcataaacaccaacattaaacaacaccatatcttaaggggaatcatgcttgatcatcaagtggggaataatacaactattgacaatcctgccaattaggtacaacacaaaatcatgcaaatcagtgtatcatatttcaaaacgataagttgaccaaatcatgtaataccagtcaaagtacacaccatgcagtcaagctgacctcaccgccccagaggtcgtcgcctccccagcacttcaccaggacagccccttcatgtgccctacgaggctaagaccatgatgtaggcatccacctctgttgtcattggctaccttgtaaataacactcactgtagctcaatagatgccaaaccacactgttaaacataaacatgaggcacatgattttttttgatagaaaattggaaaagaaaacattccgaaatagcacaaattatttgtactgataaatcgaagattatttgaaaagtacatagaagtaaggaatgcactggaaaagaacaacatcatctcaaatatgggacctgatcacttaacatgatatcaaatcgagcagttcatgagcagaaagatttcgatgagcaagagcagtgaaatagcacgccaaagtccagaaattacatctgtacatgctactatcagcatgtataccactgtaaattcagacagtacatgctactctgaacatgtccatatgctgtcaaaatgctgaatatgactgaaattctgaaaccaacgacatgggatcaagtctcaacccatcgtcaatagagctccgacattaagataaaatccatacatatataaccctaaaaactaatgctaccctcagcccggtatactgaaaaatagttacctttaatatatgatgcatcaaccctcactccattctccagcaaaaagcatcagccacaaccatggttccacagatcattgtctgctgcacgttgtcccaggtttttttaccaggctgcattctatcttttgaaagaaatattatgtacagtggaaaattactatagacaagtaattttacctctgttcattggtgattttaccgtatgctatatacaagtaatctccaatatgggatctttcatgatatgcaaacctgaacaattaaaaatcaacagcttcccaatcagctcctagaaaccacagttcacaatagtacactgaaacaacacaaaacatgaattgtaaacgtaaacgtgggactcagggaagtggacataaactattttcctaggataagatgcatagattattttcagttttgtttgcctgtttcactttttttacatggcatagtctcagcatattttccaatcagcactatcgtatatagtcatgcatctgaattttttaaaaaatgacctctatggtattgatatatgctataacaggcatataacacctgaatagttaacgcaatcgtaggacagagctaattctgtacccctgtacccttatcaatttgaaaacaagtgatttttttaagggtgacaacaagttacagcgctggttatatacttgtgatactccatgcaaaaaaaatgaagagaatggcacctaatttatacacttgtcctcatccatacaaaaaatgaagagaatgccatataatttctcccaagaaagtaaaattaatccaaggaaccatattctggttaaatattactaactaccaagacagtgatattaatccaaggaatttgagtttttttgacaaaatttattctgcaaatatatgttgagaacacagtattcatgattcattctgtaaccaccattaaatctaattgtcatagtcattaaggtgagtcagtgtaggtgctgtttttacttcctagcagtatggttttgagtatgactaacattatggtttttaaagcatgattggaaattgcaacaattaaataatggaaactttttgggctgcatgagtttctagactgaactgaattttaagcaagggtaagcaattttcccttgcttcaacaaatttgttccattagaaattactaagagggaatcgattgcataattgtctacaaattgcattaaaaataagaagggtgatcagatgccctttcttttcttaacatttcctcttatttttctccttccctgagagcacatgggaattcttttcccatgattttacaaaagtacagttatgagattccgtaaaaaatgaaaacgtaaaatgatctagattaaatcaaaatacccatccaaacatgccaaaaagaaaatcaaactttaaagattcgtatgcccaaagaatctaatcactgataaccttgtgaaaagaagttgtttattatggaataaaccagctgcaatgcgagcgatatacgtagggtaaaaaatattaaactcacaggtgtaactgtaatggcatatcagtgaccaatcctagagaaaagacacgtgagcttcacccatgatcatcaacaagtaaagattgcaattgttcacagttggttcatgctgtaaacaagaatctatagaaattgtcgttgtccacgagctataacacacaagctatcatactacgagatgacagatatgagatatgcacaacattttaatatcgatgaatcgcctcgctggctcgctgctgcaatttataaacccttcccgcaaaaaaaaaagggtgattagaacaaatagccgcgaacaataaaaatagcaaacagacatgaatcagtctattaacgtaaacttaccggagcgaagactacacgcggtgatcaggatgccggtggatgacgctcagtgacggagatcgagggcaaagaagtcggaggtggcagcgatgaagtcgtcgacgacgggcagcgaatcttcgacgacgatttgtgagcgacgacggcgaatcgtgggcggcggcgcagaggagatcggtgaggcggcgcctatctggatgctggtgcgagcgcgggggttcgttcccatcgatccggcggcggcgcaggtggagctgctgcggggggtttgggattgggggtcggcgcgacgcggggagagcgagggtgcggcgatgatggcggatgcggtttccgtgggattgggatatgggagcggtgcggcgattccgtgggatgggagcgacgcgcggtgggaggtcagggaggtatggttcgatcattttcgtccgttagatttgatgaatgaagtatgaagaatgtaagacccagtaggtggattataaggtagactagtagcatgcccgtgctaacgccacggtaatcttttgtactacttgcaaatttctagctgtattcaccaaattaattagcatttttttctcacacatatatgagaggtatcggagacatctctgaattttattgccaccatttgtttatctgttcacattattttcttgtgatcagggtatcagacctttttttagacaaaaggctttcgcccagctttactaaaagcacgagtatgatacatgtattgttggggtttcaagcttaacttgcaacagcatcggacaaaggcaaagttgttggctcagcaaataggcagaacaagccagtctgagttacagaacaaaggaacaagctaacctaagctatctctctagggaacgttccatctcggcacaaaaatgatagcaaacagttgcagaaccgctggatagctaacctaagctatctctctagggaacattccatctcggcacaaaaatgatagcaaacagttgcagaaccgctggatacttatagctagttggaaaatccatcttcttgatcattagttgagacttgatcctcacatctcgtgaattttggcaagcaagaatccctttaaagcatccaagtaccctgccagtttcgaagggatgaaaggtctccattgttgcaaaagggaaacaactctataaggcaaatgcaatatctgaaagcaatttgtttttaacacccaatcatttcgggttagcgaaatggcccatgttcctacagagaacaaatacaagaaggtaatattctgattttgttttcaggatattgcagcatggacatgacctcaattctagaatttgggattctatctcttgcacatctctaaaatagcaactgcaggaactttgcttgagcacatttgaacattaagtgatcaggctatattgcataatatatttgaacattaagggtgatgtcttgcacttgttgctctgtacaacagattttggagaatggaattgtcgagctgtgaagtccatgaaggcagaggttccagatttggtctgtacagaaggattcatctcaacacagtgcaaattaggagtcaaaaaaaacatcatgacagaatacctgttcaagtggggaggcaatgtccattgtgttcaagcagaaggcacgactggcttcgtcgatggcatgccatcaaaaactgacacatgatgtgatactccatagaacttaagtggaaaataaatagctagaaggatgcaaaggtcatccctcgcaattgcttattgaagcgtatacttaatgggaaatgcaatctgaatcatatttttctatacagtgcactccaagtaagatgtgaaactgtaagtaaagaaatttgctgccaaagcgttgtactcgtacataagaataacaaatggccttgttttctcataactgcaaaacagattttaatttaaagaaaaatggagaaatcatagatcttcaattcctgttttgtaagctaaatttgagactatttgagttttccctcgggagaaaatgcaagcatacctacctacaaatcaacaatcatgaaaataaattaagattagcatattaatttattatatttggcttaaacacacaatcatattcagtcgtaaacctttatctgactttcatgcacaatactccaattgataagatgattaagccaagatgctactgtagtattgccacatgcttgtctacgtgggtcataagctcctaagacaagcatacgacatggattcccaaattaccactctaaattgacacttgccatcttcttcacccctttattccatggatggcaaccgtatactttcagggtgacaagatgcatccatactgatgaaccatatcacaaacatacatgcatcccccacgttatcagatctttaagaaagaaaaattttgatgtgaacatacaagcagtaggatcatagtcagttaaacatattattcatgcactaccatatcctttttcgcgaacgcatgcactaccatatcctgctatgtctatctccccaatggccagacatccaatctaagctagacatattcttcagagttaagaaccaacaaatttgcagtaaaactgcccagagtgctaaacaaatcatggatgtcacactgatgcaattaatccaacatctttaattgtgccaatttaaattattgagagagattaccctgtggttcaatatattaccaacgcattacacaagtagtaattggtatggctctgactgatcgggttagcctccaggaatcagcacaattccccgccgtcatgcatgaaaagataaacacaagctggatgtcaaaaggaaaccaaaccaatccacctcagaaccaaatctgaattcatgaactcacatattccagtcacactttgaggtagcggagatccttcttgtagaggtcgtcgtctggtcgtagatcaccaccagccgacttgagcaatcccctcctgtcggaagcagacaaggccagcaatgagcagcaaagcttgcggaaaccacagataaatccctaaaatgccaaaatccttcggctcaaccaactggtatgaattaaccggactaagagaggaatttattgcttactctagccatggttggagcggatcttcggcgctgtactcgtcgattgcctcgatcattttcctgaataggtagatcaatcaaacaatagacaaagaaaatcacgagacgaatcccctcccggcctccccgactcaagaaatccggagcaaaccaaaccaaaatcgagaaccaagagaagcggcggcggcggcggtgggagtcgcggaggagatcggcgcggtggagaggcgggggacggtggtcaatccgggcgacggtgaactggcggcgcggaatcgggtgacattgcggtgaggcggaggcggggtacggtgatggggatcggagactgccagatccagagggtctcaccgtggatgtgggcggcgcgacgagcggcgcactcggcgccggcgggggttgaagacgcgacggggaggggtgagggcgtgatgtgtgggggggtttggcaggggagcgcggaaacagaggccgtgatgagcgatcgcacccggaagagaggtagagctgatctcgatcgttcgatcggggtagaggaatatgagccgttggatttgatgaatgaagtgtgaaggatgtaagaggtagttggtgaattataggatagatgaagtatgaaggatgtaagacccagttggtgaattatagggtagatagatgaatttgaattgtggtgtttgaaattgttgatgagggcatcatccactattacccgctggcaaagacgcaataaggggccaagttgtctagttgtagtcgggcggcgaccgtgtgaacctctgaataatctcaccttgcttagcttgggaggaggaagccactttaaaagggagagccacccctcccctattggactaatcttttagggagattggcctttccccgagtgggtgtgcctaagaactgttggggcaaccttaatatattgggtctcggcaactgttggggcaaccttaatttattggagccaaccccataatttattgggcctcggccaaccccacctggggcggatgtatcatttggtatcaaagctgggccctcagccaaccccacctgggcctgggccagatgtatcatttggtatcagagcagagttaggccattgtatcatttggtatcagagctgggccctcggccaaccccacctgggccaacttcgtggttttagccgtgaaacaccgcacgaactcacgtttttggggaaaacactctataaaagtagtaatttgccagcggacaccgcgccgattaaaatagtgtatccgtgatgacgaagttttagtgggcccgatattttacgcggagtgaccaaaatgcccctgtgccttacccagtagcgtgctattgccaatttgccatctcctgtgccgccgccgtcgtcatctccttcatatcgagggtcaacagcttgtccatcactgtaccacctctgcagctacagtccatgccgttgtctttcgctgtaccaccaccgcagcatcatcagcaaacaccaccaccgattcagcttcagcaccacataataccaatgatgccacagtcccagctccaactacatccacagagcaaggaggccaacaccattcaagcgccgccactagagtagtacgacacgaggacatctagtggcggcggcgtgtcgtcattgaggttgccgaagtgggaaaacatcaagaaggagagaaacaagaaacatctcaaggacacctagacatgcccctactaccatcagcttgacgctgatgcagatatacctatcaaaagtacattgttctttacttgcagatcagaatataaggtgaactcgtttctctctaagtctatgcgtgaaatatatgagaatttgatgctacataatattttgcacttgattactttcagacatgagagatttggaccattggctggcataaacaacatggggtccagccgaaggtgacgggtgtagcagcgcacatgtggaagatcggatgctattctgttcgtgaagttcatggcgaattctgcattgatgagaaggctttcaacatgaatggcttatatattaggaaaggttatcaagtctactttccatcaaatcaaacggcatgtcattccgagctttctaccaacggcaattgcaagttgaagacatcctgtgcgggcagaccgggtgacgcgcaagtaacaacaatggtgatgagcgtcggctttgcacggcatggttggatagagttatactatcatatggcccatcttgggttgggaaggagtccatctattatttctccatggattgaagctttccaaaaccaggagtttcaagataagaaaggaaagattcagttcggactcggtttgggccagcctgaatataatggactaaaacgcttgtttctctctcgtccggagtccgttttggacgtgtgagcactcgttggaaagctaacttcatggcccacgtggtggatagggcccacgacacaaattccttctggtttcaccgcaagagccgaaacaaattgacggtgctgtagagaaatttccatattgtgatgtatttgattcttagttagtttctaacccatgtaatggctatatatgcctttgtgcacgacccatgagggggacaacatttattctaatgaaaattgcagcaaatttgctcttgttcttctcctaggttttgtgccgccgccgccaaactagagagagggattgggagttctgccatagattgttcttacttttccttgcagggaattgagggggcaatagattcacttttgcgtggttaagtggatcaacctatcaaagcgtgtggttttgcgaattcatggtgaaaggtgtgttgcacgggcaacgtgttgttcatccagttcgtgaggttttacggtgtttccggatcctacgtcgagaaggtcgggctttcccccgtatcagacgcgctctatcggctgcagcatggccaacgccgcctcgtcagctccagcgaccaccaccgtgcttaccgcggcgctgcacgtggagcacggtaaaaacaacggcaatgcgaatgggtgggcgagtgctaacaacaacggcagtagctccccggacacgagaaggttaatggatgaacgttcgccaactacttcattcgcgaatggcgccacggagaagggatcgcaacggaggagaagtcggaagggagcaatattattcctcccattccaattttcggttttcctctttttacgtggtcctttatcctttttgtttcactacctttttctttttcagatttctttttttaattccttttattgtttctttaacagaaatatttttatatgaattatttcatgaaaactttctatatatacatatagattatgtatgtaagtttttatatgtagattttatgtacataaagtttctatatgtagattatatatatatataaatttctatatgtaaactttatatagaaataaaaaaatgttgatcatcaccgaattattttttttttaaaaaagtccaatccaaacaaattgtaacaagaaaacataaagcatgcgtgtacttagtattttaaccgaagaaacaaactaccggcacgttagtcattactaatcacgattaagcatgtaattaggcatgtaattagttatgaggaagaagagatgaaacggcacttggaacattcgtgagatactactagatgctaatcacgtgcatgcatatatgcagcggagaagcgagaactgttggagtccgttcgcttgtcgcgaacgctcgcgaatcagactcaccccgccagcggcaatggcaacgtcgtggcggcgacaattaataacaacataatctctattacttaaaaaatccgtagtgatgatggtgaagccaatatacacgtgtgatacaacgctcaaacatcctcgataaaaaaaacggaggggcgcactcctccgcaccaccattgtgcgactggatcacgatccggaatcacccaagaaaaacggcgccccgcaatccggaatcagatcacttccgcaacgctctcatcctgcagactcgcacacgtttcctctcccgagcgatgtaagatccgccttcctctcaaccgctgctgcgatcttctccgtatcaactgcatgcagccaccgccgatctgtcgtcctgacgccgccttcgtcctccttcctccccctcaatgagcgcctcctcgatcccttccacctcaagcgcagccatcgccgtctctccctcccgagtcccgacgaagctcacctctgcctctaccactgtccccgacccaacccgctccctcccccatccagcgccacaacaccctccaaagtccaaacaagccatcaaaacgaatctctccgcctacgccccagcttacgccctccgccgatgctccttcctgtgtgcaccctgcgtcatcgccgccccttcctccgtgtgcactacaccgcccacccccatcgcccagcgaccacctcctggtgtggcaagcatggacgcgaccagccaagcttgaagtggcggtggcagcgacgtactgacgacactaccggatgtatgtcatttaaaggcatttggtggaaggcatttctttaaaactgcctcaaatcatctcttttaaaggcaattttcataaaatgccaaaaaaatattcctatacatggcaaatttaattaatgccttcaatacttttatcattagaaggcgttttaaagaaaaacgcctcaaaaactatgtgctttcaaggcattttcattagcgccttagaaaatctcctatttcaagcgtaatcacggaacgccgtaaattttatgttatttgggggcattttgcaaaatcgccagggcaacagatagaaggcactttcgagagaaatgcctcctaatctatgtcacatatgcaaaaagaaccctaaaagaatttaaggtatagaaattagtcctttcaccactcaatcaccaatcacgcggacgctaccatatccgatccctagctttctcagatcagatcgagcgaaaaaaaattggcaaagcgcgcgactcctggccgccgcccggccggtgacttgccgccggcgaccgcaccgcaccccgccctcccgtcgcccgtcccgtcgtgccgccgtcgacggtcgaccggcgcccatcgccgcatcagcgcatcgcgttgcgagcgtcctgcgccccagccgcccggtgacctcgtgggggtgacttgccgccggcgagagccctgcgccccgcccgtcgcgccgtgacaccgtcgacagtcgaccgtcacccgttgctccatcgcggctccacacacaagcgctgcgattccccatcgccgcttcaagccctaggcccctacatcgcgatctgtcgctgcctcagacaaggacgatcgtcggcctactgcagcaagtacaaggtatgttcctatcgctacccacccttctcacctcaatcgtgataggatttgagaaatttgcttgatctattggttaggagatgtttggtgttgtgtagatgttttagattagacctaaatagaatctgatctaatcatagtgacctcaatggcgatttatagtgtgtgttattgaaagggtcaattaggcctagggggggggggtgaataggctaagtttaaaactttatgcggaagctaaaactgagatagggtcggaaagtctgatccacagtcagactatctgaaaatatcagatagtctgatgttggatcagactgtctgatccactaaagagatacaccaagcaaatctagcacacaaacaagagtagtgcaaacagcgactagatctatagcggcacaattaagcaaagctaaagagaggatgaagagatatcaccaacgatgaagttcacggagttgttcccggagttcaaatccttgaggggattctactctccgttgaggagcccactaagagccgggtctttgctaacccttttctcaagaggttgcactaagcactcctccttccactaagggatatctctttccttgcggaggcgagatccggccttcacaaacttctcccggccaaccacacgtagatcggtggctcgggagtgacacctagccttctaggagtcctcaacctccaagagtaacaaacaccacacaactcttggtcaaaccctagtgctcaagatcgagtgaaacacacattaggccctcaaacaccaaattcacaaccaccaagatccacaacacaaagaacgaggactttcagttattattggttggatcctaggattcacactggaattttggtcctatgtgcagaactgaacttttgaaatatcagagtgcaagcatttgaatgtataaatccatttgctagatacatattactggaacttcatttgatatactttgcgcagtttgtagatacatgcctacatataaattctctgaaatgctctgacatttttatatagactttggctgtaatataaattctctgaaatttgtatgtcttgattcttaaattgctgtgataagttcttttctaggaagtacagtactgaattgtgggttgtacaatacttaaattataaaatcatccctagtatatttttgaattaatccatgagttgtttcgaagagctgtagctgtacaatctgatctatatagtaaaaaaaatgttctactcttgatttagaccatatgctctgatatagatgacctaatatactgcctatatatgcatataagttcagaaacttctgtagattgttctgaaaatctgagactgcagtagtgcttgttctgaactttggttttcaatatagtatagatttggttttcaatttttgacatttcccagaacaatggctgcagtataaattatctgaaatggatattttcaattctctgaaatggctgtagcactgaaatctgaatagtaggatttgttctgggttctctgaaatctgaatatatatagcccgctcaaaaaaatatatagcttgctcgatagggattaacatgcttatatttacttcagtctttcctgtaagcaaaattcataacccaaacaacctaagtctttcctgctgatttcatatgtgttgttgctatgcatgatatcaaggcaaagaagtctttcctgctgatttcatttgtgttgttgctatgcatgatatcaaggcaaagcctctttttaggctggttgcctgattgtaatggtttgataagagtatactggacgtttctttttctttacacttttgtattctttaacagagcacaaaacataattggaacatcatggataaagggtggatgaaagcatcgagatctagtattgaatataatatcggggttaataaatttatagacttcgccttgtccactatattccacggtactagacaattttcctaattcatagtttgttactccaaggttgcaaaaatttagatgctaaatattatttgtacccaattctaggtgttaactgctgttagacacatctcatctgaccaatgagacatatctgcaccaaggagacaaatacatgatctaacatacaaggagaacataggacatgaagatgtacattctaggacaagtagtcttggaaaagccagcgctggtttttaagtgctatcaagttcagtaatagccaagtgctaacaacttcacggttctagcttatgaaagtaagtctcctatcccaagttcgaatgtcttttctcaagaccatggcaacaactctgttgtttcataataagaaatagaactactgatttggatatattatttttttactaggatttaagtggatttgtaattgtaaaatgtagcaactcaattgtagttgtttatattttgcaatgtagaagttttagaaagttgtgaagtcacaagttgcagttaaggtgaatagtcatctatgttatttcttgatctatgattccttttatggcatattggcatattggcatattatgctcatttgtttctttcccttagaacttttatggacaattataatttctgcagatacctcatttgacttgtaaatgtaatacagatgtgcagatctgcacttgtatttgcagatagcctgtctatttcaaatgaattcgtatgttgcacttgtattacaggctatctgaacatcctatttgaattcgtattttgcaggggaagcatattattttcgctgtatggttttcttcacatggcttgcaagtgcaacatagcaccaataagaattcgaagctatactatcaagattttgtacaaagtgcaatatagacacttgtgattgtgtgatcatcatatgctggaggatgaaaacaaattgcactttacagtagcatcatgtcattcttgttgattatagttttgtcctgtgactgagaaatcatcgttgttattagttttttatcataaatttgatttctctatttgagttgcaatctcatattggtatgctcacaatttgtatgcgagcacattgtggaaaagaccactaattactaatgatgcaatgaacgccatggatcttcttgctggcattttaaaaaatgcccccaatctgctagctggcgtattgaaaaatgccttcatatctcctgggtggcattatgagaaatgccactgaatacctaagtaggcatttttggaaacgcctcctaaatatctttggaggcgttttctaaaactgcctcaaatcacttttcccgtcgacagtatatttggcactttttaaaatgccttgaaagatcatttgaggcgtttaatcaggcatttaaggcgttttgaaatgcctgctaagctatgtcatcctgtagtgcgaacgcctcgccggcagccgtcgcccccacgcatctttccaggttgtcgtcgtcgccgctgctccttatgcccgcgtccaccatgctgcctcgatctcctcctccatccccggtgcccaacccttccctccagtcgaccctccccatccccggcgccgtcgtccgctactaggggcggatctacagtataagcgtcggtgtcaggcgacaccgacgactttcggcaaaacatataacaaaactgcttatctatatactataacactatgttctaagtataattagcatactatgacaccgatagatacgttatgacaccaacaaactgattttctggatccgccactgtccgccacccatctcctcctcctcgctgcacccaagtcaaacatctcgatgagcgggatcatgtggatggggctctccatctcggtgacggcggtgagatcctgcggtggcttctcctgaaggagcttgcggagaaggtgcatctcgagctcgatgccttcggccacgatcaccatgaccacaactacgaccaccaccatggctacgacaacttacagctcgagttctccccttgggttaggctttttttttttggggtttaaatgtttaatttaggctatcctgggcgaaatgtcgatttatgtttgattcattttcgcgtgattgagaaatttgggggatttgattggtacgtggctcagtgccatgggatgctcgcttctggtcagcatggcgtcgcccgtctgtctcgtcctgctcccagtaatcttctgttctgtgagtgtcccccaattgaatgtttgcttttttttttcttctgattatatgtgtgcgctcacgttctgtttctctcatttgcattttacagtccaggggaaaccatcaaagaccatggtggattgccttgccaccttcgtggtaagtatgtaattttcagtggttaaaagtttttattagtacaaaacccaaactagcaaaaacagatcattgactacaatttactcgagtctgaatgtatttgtctgctatggtaccagaaccagcatagtataccaatgggtaatgcagtttgaaattacagtacagcaaggtaatttaggtggttgttgaattccttaattgtagactaacaaatggccacatctatactaactgaatatcacgtcacatctgtgttaatatatattttatattgtgattgggtaaaaaaaagagctttacgtaaggaattagatggtgaggctgactttgaatggatcaagtactgtggtttttatttgtacattttttgtgattttcttttgctatggcgtccatttgggtgcagatttgagtcttattgttcggattagattgttcaaaatggatattccaaatggataggttgattgggattattggaaatgtaggaagagatgcagtttcagatcaagctaatcctgaaaattccacgaggtatgatttacgtctttacaaattttagacaaattgacactctcttcgttatatttttcctgtgcaggtcatgagacattgcacaatttggttgatgaagccctcttgctaaaggtattgcataatcaaatcaagatgcaccttgattttttttttgcataagaactttaattgttcctaaaaaagccatgaagttacaagcttacgactttggtttttttatcaatgaaaatcattctatgaatatgtcaacgtgtatttcattgccattaattatttcatttttcctttaagctgagatattgttcaattttggagctctagacaatgaaaccatggcttcatatccttgaaaaaactctatcggttgaatccagtaaaaatgtgttttctctggcattttaaatattgcaatgttctgatgacttttagttactaatatatgatgcataattctatgcccggttctgttatttctttttatttggacgtaacttgcttgaatgatttgatgtggctaaggagaaaatttctaaggccctgtttggtttctcaggaggccaggagttggagccatgcaaacttgccttatgctaatgtcttcgggagctttaagattaggccctgctgcattgatcaaattaagcaggtcagttgaggctctaaatttgcttgcaatccagaaggtttccaccaattatagtgataaagcatcaaactcttatgatcaatgtttctttgttccgagcttactgccatagtatgttaaataaatatgctgcgatgatttaattatccaatcctgcgagccgacggacgcgccaccgccgcctgcaaatcctacccctccgcccgtgcccctacccccacccgcactcccgcatccgtccctccacctccgtccgcactgcccatgcctccatcctccaagccccctaacctataataagaaggttaagttagtttctcattgtttcatattagactgtccaagccccctcccctataaaaaatgtcaagtcagtttctcattgttttatatttggctgtattagttatgttttggtttagtttgattcatagcaaaatgcagtatgcatgctggactttgcaaatcctaattgtagacagcaaaataatgtatggactgttatttggtcttctatgttacaaaaaaaacccaaatattgtgcacctcatacgatatattatgcttgctaggtaactaatagcactggaaactgaaggttagtatgcatgatttggttaatagtgacctgtaattataaatggaacatgtatgctcaagctagatgagtgcgctgcataatctttgctgcagtaaattatttatgcccggtcttaaatcaaatgaataatatgttaaggctgaaaactaaaaccgatatgtgaaatataatttctggagtcatatgcgtagaaaatattccacatatataataccttattcatattaccttgctatttttaacatagagcaaaactttcagtaactgaatttgcgtgatggcattaaaaatgtgttgcacaattcagggtgatgagacaatacacttttttttgtgctgttactgtattgtatttatgctcccttcactaagaaatgtaagacatggattgtcatggtattctccataattgaacttgtctagatattgtgtagttctttatgcatcaggtggtattgcaaaaagagaaaaacataattaattcttcaggatctatgatgctgaattggttagtccatgttttgcactgttattatcactgatatggaattgttctctcagaactcttagggatcatccgaagattgaatttgaaagagcagtggactgatgtgctacctcactttattacttttgcatgctctaagatcaacaatctctcatgatagatagcatatcgcgtaatgctggagatgtggatggagataagtacattcattacagatgaactcgtggcagaaatttcttgatggaaattttacatttatcagaacggtttgtatgcaaattatgtggcaaaaattaacagatgtttgatacatgtctttaatgtactgtatttgatcatttcaattcagtctctatcctttgatttaaaaatgtagtattcatctgtaatctatggagataattttcattttgtaatatataatagtttgttctctgtatatagatcatgattttttatgatgtccagaagattgttacatgtgaataggaaaaaaagggaaatgtcctgttgtttggagtgaattggtgatggttcatgacaatgccaatatatttttacgggagatatgtgatggggagatatgcagctcatccatgacaaataccatatctgggtatgtttgatgttctagattttttgtttgtgctttaattagtatgacatcattaaattttcatagcagtcttctatctatattgtctttttatgatttcataaacaccatgaaattgttttgtacgtcagaaagcttgcactctgattgtagtggtaacaggtttcttgaattggaattaatctacataacaattttgatttgtagtctctttgatttgccagatttttttcaatgttcaacaaattttcacccaatgattatttaacatctttttacttgatataatttgaaattggtactccctccgtttcaaaatgtttgaaaccgacatgtttgaccgttcgtcttatctaaaaaatttgtgaaatatgtaaaatacatgaaagtatatttaacaatgaattaaatgatataaaaagaataaataattacttaaattttttgaataaaacgaatggtcaaacacgtactaaaaagttgaacggtgtcaaacattttgaaacggagggagtatatattatttcccgttgcaatgcacgggcacccaactagttagttaaaaacgcattgcatcaactcgtgctgcgtacttgtgcgtgcacatgagcatgcaagtaagcatcgttgtctatttgtctgtacaatccgttctaatcgaacaatgtcacatatcaaatcttgtaattttgggatcaaaacaaaggcagacatagctgttggccatgaaccacaaatacaacaacaacagaatggccgctgccgccgacgacatcggcggtggcaagatgtaggtgcagtacgagacgccccatttccaacggccgtagctgcagaaccagaacgttgtcgtcggccagccaaatgtgggcggcgggcgacggtgctccgatagcactggcaggccctccgcagcctgcagcaacaagtgggacatctttctcggtctgcttccagtgatgacgacaaagacgacgacatatatacacctagaaatatgaggaagcatgggcatttcggtcactgcacgtaaaatatcggtcacttagcgtctcgtcagcacgtatacattattttaatcgacgcggtgtctactggtaaattaccatgtttatggagtgtttcccccaaaaatgagttcgtgcgatgttctacggctaaaaccacaaagtcgtgatgtcctatagcaaaatttgtcttcaaaataaggactattgctggagatgaagtaggtctgagatagtgtgcggtctcacgtccatttccttttgttttccaaaaaaaaatccttccgtgagtgtaagggcgcgtcgtcaggcttactgggcatgtttggattgatgcccaaaatacgcctataagagacaaattcatgggcaaagccaaatttatggcataagtagtgttttaatagaggttaaaaatgtccatttgaattgaagccaaaatatacctataagagataaatttatgggcaaaaccaaatttgtagcataagtagtgttttaatagaggtgtttggtttgctaccctaccacaattttggtagggtaacgtttggcaagaaaacaagttggcgatcagtcgcgcgcccccctccccgcgtgactggacacatgtcgcgcgtggagagggggcggcgacgctccgcgcgggtgaggaagagcgagttttccgttttttttttgttttttttcgtttttccgtttctgttcggttgtttttcctttttttccggttcggttggtttatctttttttttctggtttctcttctgtttttttcccggtttttttaaattttatgaatacaaaatttgtattcgtatgtataccaagtttgtatttgtacgtatacaaagtttatatacgcgtatgcaaagtttgtatacgtgcatataaattttgtatacgttgtgtattttttattttttaatacatatgtatataaagtttgtatttatagtatacaaagtttgtatatgtcctatgtaaacttcgtatacgttatatatatatatatatatatatatatatatatatataaactttgtatatgtgtataaatttatatacattaaaaatatatttatatatatacgtatgtacatactatatatacacacgtatatatacacacgtggtgtatatataataactaatataaatattcgtatttttccggtcgtcacatctaattttcgtctgtctttttctatgcacaatccgattcggttagcaatagccatggaaaaaattgcaaaaaaaaaaatggcggccaccgacaccaccaccaccgccgccgccgccgccggatccgcccatggatgaagccgacgccatcacagccgttgggagggcgctgtcgccgtcgaggccgacggggagagagagagggggagggacggccgtcaccgccgtctccgccgcaccccgccgtcgctgcgccaagccggcgagacgggtaggagaggggaagagggagcgcggccaccgcgaacgccgtcgtcgccgccgttgggacggcgccgtctccgccgaaccccgccgttgccgcgccgagccggcgagaagggagggagatgggaagggaagcggcgccggtggcgggagaggcggctgactggggggaggggaagaga

SEQ ID NO: 10820 - DNA, 708 bp, Oryza sativa
acgttctgaaacttagcagccaggtagagcgaaccagcagctatgtattggggcttatactgtaggcacagtgttgttttaagcctacgagcaacagaatgaatacatccagattgatcagttgaatgaatgaagcatcaaaacaataatgtcacaaagtgatatgtcacatctcataccaatcatttacaaagttccaagctacttgtttcacttccttctgagagatcccaagtttttccatagcatcaagtagtggtctgtaaggatgttggatgttgaaatcaaaccgaacagttgtaaggactaatctctccccggtcaaaattagtgctttctgcttctcaaatacatcctgttgatagatactacttgtcaaccattaactggatggtacatatatactgaaaactcaattaatgatccaactataccttctggtggattcttcgagctgtagctgggtccctcctgtacattgttccataggccactctaattacttggtccagaggacaaggtgtatcttcaacttttgaagccagaaatatgcacactgttgcaatcgtctgcaataaaaaacaagtaaagctattggctctggaatgacaataagcaaataaaataaacaccaattacttgtaatagtatttagttatagacagcttgcatcacatgcacagctttttttttcttttcttgagcaat

SEQ ID NO: 10821 - DNA, 6205 bp, Oryza sativa
atttagtaataaaattatcacaaaactacatgttctgcatcatgttaaatacaaaactacaacatttagttttgtgataactctaatattatatctatagttttgtgattggccttaaatctgtagttttgagatacgacgtcttaaatatgtagttttgtgataatttggtcaaagtacctgtagtaaatattatgttaccagcctgccatttttgtttgatggtggtgttcatctctaaaagtctgatttactaatggttttaggtgatatgtcaaaatttctgagcaactaccctgaatatcggaagactcatggaaatgtaacgaagcatgttgctttggtcagtgagatgagcagaattgtggaggaaaggaagattatgctaatttcccagacggagcaagagttagcatgtacaagtggacaagcagctgctttcgaggtattggtataatgaacatgaaatatatcatggtgccgtggacacattgttcttataaaatatcatatatgttcaatatcctcaccaccaaagatattccctcccgaggtttttcattttcaatcaaatttatctgctgctagagttcacttaagttctttatttatgccagtgcaatttccaaaatgggaattacacctataccatagttctttagcttatacacactaaaaaactgtggcacggatgatcttccaaaatatatttacaacttgactcatgcttttttttttattatcaaaagacagtgggggaggcacccacggtatatattataaaagaataaagtatttacagggaagacaaaaagagtggaaagaaaaagactaaagacttaaattacagctgatcaatccatgattgaactaaaggcctgttaatctctttgagtctaattaaatgtagactcaattgactcatgcttttggattgaatatcttattgaatgggctgtgtgcattggaaaatgtgttgttttctacatagcttaagagttatgcagctttctttgctttatttgccaccattagctgcatgaatcaaagcagcacgtccccttacagtttttcatctgtccttacatcacctctcattgtttatctcatctgatttgatgctagtaaaatgtataagtggtctgttccacgtttttggttcacctgttgattttctgcaggctgtcacttccttgctaaacaatgaaagtgtgtctgatattgatcgtttacggttagtattgctctatgctttgaggtatgaaaaggagagtccggttcagttgatgcagcttttcaataaattggcttctcgttctgctaaatacaagtcaggggtatgaacctttaactagtgacagatcatgttcttatctaagcgttcttctattttatatgttgttttgatgttcatcttctttgtaattatttttagtggaaggtttttgctttcacagtttgaaccataaacaattgcagtcttgacatcactgttacgtgccttcagcacatagtaactatctcttttgtgcaaatcatggacttcccttgttgtgaactatgaggtcttctaaaaagcatccttgatttcatttgatgtactgggagcactgattcactgtttgataagtctactgccttggcttgaatattttaaaaattagactacaatttatttggaatcctagtgtttttaaccaggtttagttatcatttttttctttggttactaagtactcccttcatcccaaaatatagcaacttctagcattcaaaatttgtcccagaatataataaacttctccacctactagctcatctgaaccaatcacaaccatctcatttaatttctccacccacttcttctcaaccaatcacccttttccaatttaattctatctacttccttaatacctgtggctaactccagaaattcttatattttttgaccgagggagtattttgctaccagttttgaacaaaataggtaatatattttactaagtttttgagcaggctttccacttggtacactatgtgaattaaacttgtcgtgctagtgtaaaatggacacaggggcctcttcaggtggctgcctgttattatcggagacaaaatacctagccatattgtactgatggtttttgactgatgacttattctaattttgcatgcagctggttcaattcctcctcaaacaggctggtgttgataagagaacaggtgacttatatgggaaccgtgatctattaaatattgctcgcaacatggctcgtggactcaaggttagacaaaaaagtcttccttcgcacttgtggtacatgtaatgtggcttatttcttatgcacttattggttgcagggcgttgagaatgtatacacccaacatcagcctcttctctttcagaccatggaaggaattgtaaaggcacgattacgagatgctgattatccgcttgttggcaatcatttccagcagaacaggttagtcctaggatatgcacgattgtgaaactaaattctttaatcagactttgttttactgaatggacttgaatcctgccaccctgaagtaacattttattttccgttcaattttctgaattctgatccacattcttttgttgtcagcatggtttacttctaaatgtggagtaatttttaggagtactggctgattgatactctcctcacaggcctcaagatgttgtgctgttcattgttggagggacgacttacgaggaagcaagatcagtagccctttacaatgcagcaaatcctggagttcggttctttcttggtggttcagtggttctaaattcaaagaggtatattcattgcaattcttcccatttgcatagagtgggatatgttgcatcagtttttgctgatttgatattgtgcaataactctgaattgatttttaacatctggtttcaccgtcaaattgcagatttcttgatgacttaggagaggcacagagaatatcgaaatcgaggagtctagtatgagcaggctcttagcttctacagcttgaaacttggcagtctgacaattgaaacttgtggtgtttttgcatagagaatcaacttcgtggtaaattttgtaatgcacagctttagattcatagtgcaacacaccatacggaataaaattgttcacagttcacctaaaaacacattttttgtggtttgcaattattgctgcatatagggcgctccgggtgaaattaatatttaacgcagtttagttcaatgtcctgggagaatcaacattcaagtcgcgcattttgttgatattttgtcaaattttagcattttgttgtccagaaccaacttaattatctattactctaatagtcttatgaccagatatatagtggctaatgtggtaaattttagctgtctttagatgtgaaaaaaaattgcctcacttatatagcaacgtatcaggtgaactcagccgtgcacacatgcacacgctagaacaatccaactttcgaaagaagtataaacagtgctcaaaattgaaatttcatcagcgaacagacaaatatcaaaagagtgaaattgtacacgtaatgctgccaattgatagcatgcatgtgccatcttgaatcgtcgatggaatttgacatacctagaaaaggtagtagaagatgatgaggtcctggatggctggatgttcttgttgggaaagacgcagtggctggatggtgagcttccccgaagtggccaagaaaaaaggctggtctctcggccttttacaccccaaccgagtgaggcctcaaagggtacttggataattgacaaacataatagttgaactagcaagcaataatgctcctgcgttgcactgggaaaaaaggttgatggaagagagaaagagagtgcattgtcaataaaagcagagcaaggcagctatgtgaaaagtgaaagataacgaaaacaaaatacgcacagatgaccaagatagaaagtgtgtacggtgacgattgaaaaaatgtatgaatttttaaagtagataatccctcctaatatatgacaccgttggctttttatatatattcgacccttttgttttatttaaaaaatatgtaatttccatttattttgttataaatttatataacgatgtcatatattaaaaccggggagggagtattaaaaccagggagagtatgtttcaatatataagaatatacagggatatggaagagatagatatttaacccttccataccagaagccacgacattactaccaaaacgatttgtttttcctgacggactacaaaaccttgctcaaaaaattaaaatgaaaccctaaacatctagccctgccagtaaaaaccgatttttacagattcttattgacggggtttcaagagcgccacttgtaaaaatagaggtatttttacgagtgacgctctttaagactccacgtaaaaattcggggtttaagccagaaaagaaaatcgtcgaaggcaatgcacaaactatctcaacacccttcctttttttctcacaactcccacctacctctccctcgtactcagatctagctctcctctccaccactccctcaacctctcctccctctctcggttcgacggaaggggtgacggtagcaacaaggggagccgtgggcagagttcctccaacagctagcggcggtggagcttgggtcgcaggcagcggtaccgaagacatagctcgggcggtgggggtcaagccacaggaggtggagttcagtcgcgggctgcgggctgcggggcggcatatctggtgtcggttcggggcgggggcggtggatccgatggcgatggtgacctagggtgcaaatccgatagccaatgccatcgtatatgcatgtatcgtgtataataaggatgggtaaatttcataataggctcatcaattatcctaatccaatacatcaatcaattattccgtatacgcatcaactaaacatcgaatgcaagacttgaagcccatcaagtgtacaaagaaattagctggccgaacgatctattcatcgaggcgattggaaaaggaaggagatggatggaaaacatgataatagtggcacggtttcaattttataaaatttctagtggcacggctacgaatatatgaattgtaatagaaaaaatatataaactaaaattgtaccaaatatataaactttagatgattagggtttagtttttcatgatataagccctttaagaaaacatattcttcacatagattgttcgaaaatagattttttatctacatgctttaacacactaagattttctggaagaattctctcatattgaaatgattctagtgatataacatccattatctacatgactacatgttttcacttgtccatcgtcattttgccatattgactgcgatcgagaagaaaagaaaaggcgagaaagttaattcaagatatagagctagcatggatggtataatggtcgagtaaagcgatggagtaaaagaaaagagggtggtcgctcaatggtgcttggatatcgcgacattccaaaccttaggtagagaggcaagagaggagtagagggccgagtagaacacaatcagaattaaacgtggaaacaacgatgaatcaaatcctacgtgtctcaaattggaatatagttttacatcaaaacttgacatgaactgtgtgtcgcgtgggaacacggtcttgtcgagacaatcaaatctaatcaacccaaactttgacaatagaaggccttaaactgtaagcatgagtttcgagacggtgaagaatgctgcctaatggcatgaggaatggagaccagaacactcgttgcttagagagatactactctacaatgcagagttgctttggatgggacatgatgatttagcattttagccctttgtattttttaaatcagtctataaactttactaaaatatgctcttcctaaataaaaatgcaaaatagctctagcattagaaaaatttacattcatagccttggcccacctctaagccacacaggacattatcccagtctccagctacccttccttccagatgcatgcatcccaacttccccaaatatacaagttcctggttcgaaaaagaaaagaaaaaactaggcccccacaaatcgatgccgcatctctccgtccgctcccagaaatcaacgccaccactgctgacccccccaaccttc

SEQ ID NO: 10822 - DNA, 1570 bp, Oryza sativa
tagagagagagagagagagagagagagagagagagagagagaggcgggatttgaaattcaaatcccggccatctcggggtgcgggcgagcgggagagggggttgaggggcgcgggaaaagcgggcgcacgcgcgggcgtggcctatgtgacgcgggaaaggcgggcgcgggcagttgcgaggcggcggctgcggacggcgggcggccggaggtgggagacgggcccaacaggtgggccccacctgtcggcgacccgaagggaggagggaggaggcggccggctgctgggccttggccttcggccggcccagcggggagggggaggggaagagaatgggccggcggcccattcgaaaagaaaaaggagggaaaagaaaaagaaaaagaaggaaatgaatttctagggaattaactattgcttgtgctcatttttaattggttaaaattatttctagagttctgaaaattccactaaaaatcttgttagcatatttcgacatgaagaactcaagaaaaatcccacatgccaattccgattattatttgcattaatttattagggtttcactcttgcttttacactgatatttttttgggaccatttataaatttaatttaggcttgagagaagaactttagggtgtgacagtctaccttttaactttctgaccaacagaaacgagaagagaagagcaaatatatgcgtgactggcgtgccagaaaaaaggctgagttaagtggtttaagcaaggtggtaacaccactcactccattacaagcagcaaatgttcatgtaccgtcagtacacggtgagtgtgaggtacacataactcatcttgccgaacttagtgacagacagaagagagaagagaagagcaaatatatgcgccaatggcatgcaaggaaaaaggctgggacaggtggtgttaatgagcatgtaacatctagcactttagtgcaatccacaattgtttctccaccagaacagagcgattgtaataaggtccacataactcaacttactcaaagtgatggaaatggactatttacaacgctattgcaggaaccaaccattgcatattctcagcatattgagagttgtgtgctgcagacaactgaactttctgaccaacataagagagaccagaatagcaaatatatgcgtgaatggcgtgcaaggaaaagggatgagttaagtggtgttggcagtactgtatcatctggcgatccaatgcaattagcagctatttcaccttcaatttagattgaaggcgatgattttcaaaaaaactcagcttacagattcaagtgataaacgaaagagagaagaaaggaacaaatatcaacgtgaatggcgtgcaaggaagaaggccaagttaagtggtaccggtaatgttacatctgacagtccagtgctagcaacaactatttcagcgacagaacttagtgaagggggtgaggtcgggcgatctgcaatctccagcacagaaaagaaagaagaaaggaatagaaagcaacgtgagtaccgtgagaggaagaaggctgagtcaaagagggttagtgaagatga

SEQ ID NO: 10823 - DNA, 11755 bp, Oryza sativa
gcgtgcgctggcacggctagccgtggctcgtaacggcgctgttcggggtgcatcggctctcggtgtgacgccgtgcggctccgtggccagcagcggttcgttgcagcgcgcgcggcggctccgtgcggcggcgtggccaacggcggtgctgtgcggggcacggctagcagcggttcacggcagcgcgcgcggtggcgcgagcggtggtgcccgagtctgcgccggcgtgccgtggcgcggctcgagagaggtaggcggcggccaggtcggcgaaggggacggcgagccgacggcgacaaggccgatctctccatccatggcagggagcacggaagcggcgactgccctatccttgcccggaggtgccgccgccgacgaggccgagcgctgtatccctgcccggagccgccgataacgaccaccgatgacgacgaggccaagcgccgccactccccatccgtggcggcggcccgtgggaagaggacatggccgccgccgtttctctcctcaacctgctcctgccttgccgctgctcttttcccctgccggtcactggtcaccggccgccggacctcctctcctctcccgcctctccatcctcgtcggcgccgcaccaagtcgctgccgcatcgcatcggcccccagacgagcagacgaggagaaagtgagagaaagagaggaagggagagaagaggggaaagagagagatgatgtggcatcctgacatgtgggacccacgtgggtcccatgctgactcagtcgccatgtagatcaaaaccggggtcaaaaccaccgagagacctcgggtgaccggttttatatagttaagggacctcgtatatctggttttgcggttcaaggacgtttttttatctcgctgacaagttgagggaccttcggtgtactttttcctttcagtttagttggggccttccataccgaattggaaaagaagcccaagtgtcctagccagccaacccaaatccaccaggcccaacattgctgaaaccctaactccccccaacccccatccccagctgtacggacgcgccgcacttgaccggccgccgcttctcacacgccaagtgacgccgcctcctcctcgcaccatgccgccttcgcaccaacagcatcctccttctcctcctcctcctcctcctccatcctcacgtcgcgcatccgtcgccgccgatggtccttgtgccgagctgttggctgccgcctctccttctccccgttgctctgccgtgccggtcaacccgaagcctcgcgatgcgtggtgactggtgagggggtggaccgtgcgcattgggctgtgtccgaatagttgatggtcgccttctcctcctcgttgtcctgccgcgcctgcaatgctcggtggcacgaggtgagggcatggaatatgagtagcaccacctcggtaatgtttaccatgctgataatcttctccacttatttgacttatctgatccagcagtttgtcatattttcggatttgtgtgatttttattctttttttctgggattattggtcagtgtagttctaatacttacaatgattgttcgattggtttgttaatcgatctttgatttttttttatttgtccggcacacacgagttagattttgtatcggactgtttttttttttatttttgccgttgtacgcgatgtaagttcgcgtgtgtggacggagggatggagggtgccgcttggttggattgacggaaaaaaattaaggcatgtttagattgtagccaaaataaaccttaagttggtaatattgccaaaattttggcagaatttcttatatatttactaaagtttgacaacatttttttttgacaactttaccaaaaaaaaaaatggtatcgttgaaaatatcatcaatctgaacagcccctttctgtggagattggaaagttactaatcttttaataattattacttcctccgtttcataatgtaagtctttctagcattacccacatctatctatctatagatctgactatacagagaccgcactctatattgtcttaactagagactcatcttgcctactaggacaccaaatgatacatgtcttttttcttcttcttctagatttttcttttaaattatttatccgatttataatcctattacactactgtgttcgttgcaattaaatctttataacaagatcttacatgactatattttgataaaagaaatatctatgttgtaaattacttttattatatatctaagttacttttatcatatatataaattacttttcgatttgattaaattacttattatacattcataatattgtgagttgtttattttattatcatttttagtcaattccattatttgtgctaattaaatttaatttctagatatactcacacttttacctccataacggatctacttttaatgtcatgacaaagttacttcctttttgttttaagttacttctataatatatgtaaattactttaaagctttactgaaattacttttatatgtctaagaagtagtttagtgaaatctaaaagtaatttagatatactataaaagtaatttgcaattttcctcaaaatataattatgtgagatcttgttataaagatttaattcttacgaacacaaccgtgtaattggatcgtaaatcggatgagtagtttaagagaattttatttgaaacataggtgataccaatatattttctatttacatgttgatatctagatagggtctctcgttagcactaaaacgagaggcctcttgatttagattttgccatctatctatctattatattattaaaacagctttgaaaggaggcactatgttcgcggtgggggctagaaattcccacattaatcgcagaaaaagaaaaagagtgtccaaatagaaatacagtttaaaaatatctgaaattcggaattaaaaataagcaatatggaaagaagagtccgtataagaacctaatacgagattaatcaaaatctagaataaaaataaaataaaatctgaaattagaaaagaaaaggagagtccaagtaggaatacaattttaaataactgaatttcggaattaaaaataaggaatgttgagagaagaatccgtataagaacccaatatgagattaattaatattcaaaataaaaataaaaataaaatctgaaatcagcaaaaagaaaagaagagttcaagtaggaatacagtttaaaattaactgaaatttgaaattaaaaataagaaatattgaaagaagaatccatataagagcccaatacaagattaattaaaattcagaataaaaaataaaataatatccaaaattagaaaattaaaagagagttcaaagtaggaatacaattttgaaacacttgaaattcaaaaataaaaatataaaaatattaaaagaaaaaagatttttaagaaataaattctgaaattataaaaagaaaaaagattttaattaggaatacaatttataaataactaaaattggtgataaaaaataaagactattgaaagaaaagaccatctaaaacacataacgagataaattaagtaacatgcctataaagaaatagagtggttgcggttgatactacatataaaaattgttaataaaacatcaaatagaatcctaatgacgattaaaaggagggatggcaggcaggccgtgaagtaaacgagcaaggcgattgccgagacttctagaaagtaaaaaaataaaccccatttataatcatatttgatttttaaaatctcaataacaataaaaaggagaagcagcgggcggggtgtataagagtatagttgtagagccgccgacggttagcgggacctctagaaaataaaaaataaattccgacgatagttatgttcgatttgtagaatcccaatgacaataaagagtaggtggcgaatgggccgtagaggagtatactgacatcgtttgacgggacttctaaaagttacaaaaaatgaaacctaacaagacaataaactctaaaaactacaaggtccaattaaggttcagaacttctaaaaagtaaaaaaaaaaactaatgataatcatgttcaattttaaaatctcaatgacaataaaaaagggagacaacaggcgagccataaagaagtacaatgacaaagccgctgacggtttggtgggacttttagaaagtaaaaaatgaacttgaatgatagttatgttcgatttttaaaatcccaatgataataaagaaaaaagacagtggacgggccgtagagaagtataatggcagcgtttggcgggacttctagaaattataaaaacgaaacccagtgagacaataacctctaaaaactaagatccaatttttaaaggtttcaaagagaatgaataaaaatagtggtagatcgagcaagcaaataaagaaggatatgatagaagtaaggggtagcagctagggcgacttttaaaaattatataattagaaatacggggatgataatgtttggtctttcagctatttaataaattttaaataaaatcatactgaaaaatattgtttgtttgctagccgcgcaattgcgcgggccacccagctagttcatatagatgttaatgaatctaaacatgtgtgtgtctagattttttaacatctatataaagatgagtcatctaccctataattcaccaactcatcttactcatatctcatccttacactcttacaccttacatatccaacggctcatatctacctgctctataatccaacggtccagatcgtgtgcagcttactcccttctccctccgcgctcctccccacgtccacgcggctccttctcgcgattgccccgtcaatctcgtgattcccgtgaatcgccccaatctcgcccccttcatcggctctagccgtgtctcccatcgccccgcgccgccgcctcaccatcgtcgtcgctcccttccctctccaacgccgccgtcgcctatcacgcccgaccccctccatcgcttccccaaaccgtgtccctccccgccgccggaagccctccgtcgccaggtcgccgccgacgctgatctgctccaccacccactccccgctgcacgcgaccagttcgccgtcacgcgccgtgacccgtgctcccacaccttcccgccgccggaagccctccgtcgccaggtcgctgccgacgccgatctgccccgccacccactccccgctccccattgcacgcggccagttcgccgtcgtgcggctagacccgttgtcccacacctccccgccaccggaagccctccgtcgccacgtcgccgccgacgccgatctgctccgccacccactccccgctgcacgcggccagttcgccgtcatgcttcgccgtcacgcaccgtgacccgtggtcccaccggttagtttatgcctagcgctaacacaatgccaattgctgtcgttcagtacgtgcaatgctcagtatatacaatgtttccgccaatatcaggttatggaatggggtgaactaatacatccggattggtgagatcagggtgattgggctttttttttcagttttttcttatgatgaaaattttgggatgtttctcatttaagtgggatggtaatgttgaactataaatctggtgtgtagcattgctactgtggcagcagtttgctgcttactggctgaataaactcataaaattgtttgcctatgtgctcaatgatgtacagttgacaccatcctccccagctccccgccgtcaccacgcatcccaccgcgtcgcccccagtctccgcatcgtcaactgcctccgctcctatgtgagtcatcaatcgcctccactccacctcgtcaaccacctccgcgcgtccacttgtcttggcctcttcaacaacgtctcccgcctcgacctgattcaccggaaggtatcatcctcctcccccctcaccccttctctttattacccatctgaaagaatcaaccaaaataagtgtatctatccacactttttgtttctaaagattgagagagggcatctatccacactttttattttacaaatatcatagtacattgagttgcacttcactggttatttgacaaataagtgtatgatatgcttctccataagaatggtgctggtctgcactgtactttattatcttaaagtcgattgctcaccaactaagtgaccggtacgggttatctaactcttaaatcagacaacacctattagcttgttacacatgtcagttgttcacggttatttaattcaaggttacttacatgttctcctatggtctttagtactgtcatccatattctgatgcagcttaacatttttcttaatatacatgtattagttacaatacattcagaaatttagtgcactgatttatatgcttttcaagggtttcgacaaggctattactgtgttttggctgtgtttgaggaggttccttcgtatagcaccctaaatttatagacgggataaaatattaagatgaatcagtgttgattggccttatgaagaaaatatatattgctcataatatttgttttacaactttgctccttgaaggttttttttttggaacgtattgatggttttcctcataatatgttattgaaatccgacacgctcacaatttcagatataaatagctgagtgtagggatgtcactaatcataactttgtttggggattacttagcgatgtgttgtttttcatgcaattgcagttcattatgaaattctccaaatgatactgctaagttgcaacttttagaaaacaacacaatgagctccttggaccctgttatgaaggcaaacttggagcctgttatgagtatttagctttttaatacacggctacttacctttctatttaggatattacgtattccatgattatttaacttcagaattaatctctgaatatcattacggcgacctccacctgtcactgacgaccatccagagaagggcatccctgttcctctctcttaatttggtgataccatttttgggtctttctgagtattcagtatactcattttgattttaatgatgaatgaattgcacactaactttaccacattggttttctagatccatcgccgtcatctggcaggagcagaagcgaccaattcatcttggcatatttcttaaggtaaaaaagttaacttttattgtacattgtagagttcctacctcctgccggtggatacgttcactcaagcttacggggtttctgttggcaaagagagttcctgggttttttatgttattgcaactgtgcaactgatgataacatatggtacttcattttacaggttggatcataggtatttattttgtaaaaaaattagctggtttagggcaacaatatggtaggtgtggatgtgtattgcaacagaaaaagctaaagtaacagtaaccattattgagggttcggttttcgtgctatgagcttttaaaaaaatatttcttcagttagagaaaaaaggttggattttcatataaaatgagtccaaatcgaattgttcgtgttggatcagttattgtaaaatacaatagctagagagttctgttccactaatcgaattgttctgggatatttattttcaacaaaattagacaggacagagaaaataagtatagtcgatagtgattaatgtgaaagggatgatgctcacatttcagctgtgatgaatgaaatatttgatggcactatggcaggacatttaattttcaggattatattcaactttttttttacaatttgtaatctgtagggtgtagactattcaggtttacaggttattatggtccatcaaatctttgtatattttttgtgtaccataaactagctccagtagcatgtgatgtcaaattacctacttcataactttaggggtaaaaggaagaattacctacttcagaactttagactctaaaaatgtaatggcagtgatttccgcctccagatcaccgacaccagccgcgccgtgattccgacaccgggactccttgcccctgcgacagcttctctaccgcaacaccgtcaagtgatatcttttgcaccctgaccggaaacctctctactgcgttgcgaacaaggtaatcatcgctcgatcattttctttcagccattactgtttaaactcaaatgcggattaaataatagtggatgtgattgtgaagtatagtgccatggctgaatgtgtatatatgcatatccacatattaaataatcaacggccattatcaagaaaacttactgaataaaaatgaatatatatatatatatatatatatgaatataattttcctccctaccaccatagcatacaacagtgggactattgaaatgttccttgtgaataaataatatgaacttatagcaacagttgagtacatgcgaatgtgaatttcttttactggaaatcagcgaatttgaatttaagtaaacaagaatatggtttcagtcaaataatgttatcttgcaaagttatgtacaaaatgttaagagtataatctatttatatatatctattaatttttatgctgttaacatacatctacttgcatggtactgtcaataggttgatgtattgtcaatattttcatgcataatggtgcatgttttgcttttgagttgctttcatctgtctaaaacattaattttcaggcattagtaacatgattggattttgtaatcgcattttctttgattgcaggttttggaaatccttaacggatgacttttgaagtctaaatttttctttcatccctgccacaggaggtacatactgtgccgtggaagatgtgtaatcctcagcaagtgatcctttgcctttccataaaaatgtgcaaaaaaggtgtaacaagacaatttgacaggataattcgtactaaaatattgggcataatgagaatatggcttgttgagctttatgggattatggtctttgattgagtgctttctataggtcgtactattaatatgtcctactgcatgttttacaagttgtgctacctatttatttattttctaaaaggaccaacaggtgctatactcattcaacatgtttatgagctgtcattattgatgttagtaaaacttggattggcagttttcatggtttcaaattagtacctacagtcttcattttacagtatagaccaaatgaagcggcaacattttttagtaatgtattagatggttaccatcaagcttttggaaaaatgtgctgatgtgcatgtactgtaaagctaagtatgttcattaatctcacaacttgttaattaggtagctatggatggaaattgccctgccaatggagcacgaattacgttgggtgatataaccaataaaccaagggtaaattgaaaccatgccattataattttataataatattgagacatacatagtatttattttgttcattttttcaaacaaaaatcacaggtaataatttgacagacaagcatgataaaatatgcgatcaaacaagagaagatagtggagagcaaacagtgtgccgtactgatggtactagagtgtctatgtcacgcacaaaaattcccgaatagaattccaagcagaatgtgcattaaaaccctcgtcctggccggggtacacaaacgacaaatttgacatatagatccacgtcttacaaatattataaaagccttacataaatgcagcggaaaattaaaagataactggagctaagccttgacttggactgcagcgggaataccacttcacaggcatcctcgacggcacggacgaagcctactcctcggaaaagccaccatctaacacgtactcaaactctggggtttggggaaaatagagcaagactgagtactacccactgtactcagcaagtcataccggaataggtgtatgatgcaggatataaccaaaggatagctagagcggttcatttgcataaagcgagcatttaaagacagtagttgaaagtagaaaaatagttgtaataattaatcaatattaaccatccactgtccaacgctacaccatgttgcaacaggcccaaccacccacctgaactaatcaattccattagactaagctagggtgagactaatcacggtgaatctggttgaccgcccataaccgcgggcacggctattcgaatagttttactttgatcagaggtgtacaactgtacccacaagacagccccacgacacgtttccgtgcgccgacatgccaccacgacataccggatagaggccgtgataggacccttcgcataaccccctctaaccaagcacaccacacctcaggtttcacccccactcctcgcaaggcagcgggcagtcccctctcgtgcctaggtgaatccggaagccgcataggccgtcgcaaggcccatccaaactccatcacgcccacccttgcctggatgtgtcagctagaggaaagctacactacaagcccagccgttgcccacgctggcttgtggtaagtacgataagttcttccagggcatcccgcgaaccggtccttaagtgccatgggcgcgaccatcaaaaccatgcacccacagcccaccatatgatatattttaattgaccaacaccaagatggtggcactaatccaacatcaacactagaacctgaagtctatgcattaatgcgattctcccattgtgtgctagttaaactaagcatggctaagcaatccctagtccaatatctagtcatgttatatcccaagctaacaaaggagcaaggtacaaatagcatagctaaaacagtaggtaaccatcccatggtatcattgtaaatcaatgcagtatttaaaggaaaacaatagagcctttgcaatataggatcaacatgttcaagtgacaagcatgacttgccttgctctgctgctggaggaacctcggcgactatttcaaaatacaccggagcgtcgggagagccggaatctaagcgacatacaaagcaaacaatataaataggccataagactactgaaacagagaacaaaaccatttttaatggattctttgcatttttcttgatttactgagacttgaatgggcttaaacggagctcggatgaattttctatgaatttaagaagattcactgtgtttttactataaacagaaaaaccctaaatgatttattgcgcaataattaaaaccctggagagagagggggcggcgctgacatgcgggccccacatggcagtgacacgggtggcggtccgcggtggaccgagtccacagaccggggaggaggcggcacaccacgtggcgctgatgtggcgccgacacggcggccatgcggcagccacgtgggcggccaaatggacggccccgatctaccgcccggtagatcggacggcggaggcggctcgcggccgggcgcgcacgggcacggctcaagccgacctgccagccgtggcgcgcgatggcgcggcgcgacgcaaggcggcgaacggccagcggcggagagcggcggcgaccgacggcgagcggcgatgcacggcgagcgacggcggcgcggccccgagcggcaaggcggcggcgctaagagggagagggggaaagacggcggggagatgctcacggaggattcggccggcacggaggggcgacggcgaacggcgacgaggaatgaccgggagacgacggcgaacggcggacggtctccggaaccacctagcgaacatgatgaaagggggttagagagagagagag

SEQ ID NO: 10824 - DNA, 3041 bp, Oryza sativa
gttccggctccctttccccttcggccacggcccagggggccttggcatgggccttccccggcgagcggcacctcagccacggtgccctccccacgcaccggcggctttccccctcccttctcccacccccaccggcagtgtcgctgctcccgctgccatggctcacggcgccctcgcaacggcgccttccctggcaagcagcgccctacccttggtggttagcgcctcagccgccgcgccctctactcggctagcagagctccttccctggtgggtggcgtcctctcctcagctgcttcaccctcttctccggaagcggcttggtggtagcaccctccttgtggcacatggcggtgcgcccgccaagccgccatggccttagggaagcggtgtgcttggcctctgatgagcagtgacctgggtgatttagttgttttataatttttggggatgatttttgttagaagtacagatatgttagttatagataagagtcaaatacaaatatagagataagatatatcctagagataaaatagagtcctaaagatagaatcctagagataaatctactcttacttgtattgtactccaagcatccttcgtgatgccacccatcatccttcgtgatgccctagcgagatgagatgaatccgtaagctctccttgggcaacacattagctagctatcctctcctatcatctatatattagattatccaccgatctcattagatatattttccattaattagtaatagattagatcaattccttcattagccacgtaaaagccaatatcagtactgtcgtgtcgcccgggagcagcgctggagccttggagatcaacaacaagcagcaacggcaacaccatccaatcagctccgagcatgtacatctactgatctactccaagaccaacgtcatccatcgatcatcaccaagtctacggcaagatcgagccagctgctacatcgataaatgactacgtgatcatcttcgccgatcctacatcactagttatcttcatcaacttgctgccgccgactcgtccacgtagatggacacgtcacctcctctgacagattaatctgcaagacggttcatcgacgacgacatcgaccgcgtcatcgactacggcatcgatcatgttatctacaacgacaacaactgcatcaacatggcatcaccattgtgatgaccgctacacatgtcataaatatgttttttcgccttcggctatatgcggctacacctacaaccacggctactacatgatcagctacatcgacgaatgtctacaacaacaatcattgacggaaactctagtcaaagcgtacgtgtcatcgctatcatctatgacactcccgctataactgcgagagggaatagaggagagtccatcagagatccaatcaatgatggtgagtcgaacaagatgaagaaatagaagatttcaaatccagttgcaattgttcgcttcactccggttacaactgagggggaatgttagaagtatagatatgttagttagagataagagtcaaatacaaatatatagataagatgtatcctagagatagaatcctagagataaatctacttttacttgtattgtactctaagtttctatctcctatgtactcctatatgtattctatgagagggtcgatctaatagatcagaaaacatcagaatacaacaattagaattttcacaaatttgattcattgttgttggatttgtgattttgtgatttagtttctctcgtttccgtgcggagttctcggctcatgtggatcggatttgatctcctgtacggacgggagcgacgtggaggtgaatcagtgatgaatcggctacgaattcgtgggtggtttattggtttttttttttgcaatttctttctatcggtaactaaatcggattgtggtaggacatacatgacgaaaacgcggaaacaaagagaggtgacgaaaggaaagttacaaattttttaattagctaaggttaagactagaaaaaaaagcctatatgttgcaatgggttaaagcatttttaattttagttgtgcacgtgctttggcagataaatagttgaacataacaattccacgaccacgatgatgaaggaagcccaagaaaaaactgtgtacatgaagagtagaaggctatcaaatcgattgagattttcattactaattcgaagcttccattgctacgtaaggcagacgctcatatgtgattttttcttcttcttgtgttgtaacagattttcttatagatcataaaaaaaagccagtttattgtgtagtaagtcatatcatcgttaaatattgttcactaattgtgtccgcgctatggatgactaaggttaataaatacatgttactcaggatatcagaaaattggtaataacaacttctagctagcctccagaatttatctcaaaatataacaatttatacaccaatattctcttattaaccaatcacaaccatccaccattcaatttttccacctaccttcacttctcatccaatcacaattcttcattatttaattctacataccttcttaataactgtatgtaactctaaaaatgcttatattctaggatggaggaagtaccaactatcaactaatatttggattcaaaattttgattgaaaaatatatatgacaccgtacacttttcatataacgtttgatcatttatcttatttaaatattttacgtaaatatgtataaatataaattaaggttagagttgctcgagagtaaaaaaataagtcacaacagaatacaagccgacgatcttgcatggcgattgatatgaacgtgtggcaaggtacgaacctgttgatgaaggcccgtggctgagggatttcagtttaaaaaaagtacaccgaaggtccctcaacctgtcatcgggataaaaaacgttctcgaaccgcaaaaccggatatgcagggtcccttaactatacaaaaccggtcacctgaggtcctttagtggttttgaccatagttttggtcaacg

SEQ ID NO: 10825 - DNA, 671 bp, Oryza sativa
attcctgcagccctggacttctccaacaacaacctgtccgggccggtgccgctgcagctgatcagggaggggctcctggagagcgtcgccggcaacccggggctgtgcgtggcgttccggctgaacctcaccgacccggcgctgccgctgtgccccaagccggcgaggctgcggatgcgggggctcgccgggagcgtgtgggtggtggcggtgtgcgcgctggtgtgcgtggtggcgacgctggcgctggcgaggcggtgggtgctgcgggcgcggcaggacggggagcacgacgggctcccgacgtcgccggcgtcgagctcgtcgtacgacgtgacgagcttccacaagctgagcttcgaccagcacgagatcgtggaggcgctgatcgacaagaacatcgtcggccacggcggctccggcacggtgtacaagatcgagctgagcaacggcgagctggtcgccgtgaagaagctgtgggtgtcgcggcggtccaagcaggagcacggccatggcggcggcggggggtgcctcgaccgcgagctgcggacggaggtggagacgctgggcagcatccggcacaagaacatcgtgaagctctactgctgctactccggcgccgacagcaacctgctggtgtacgagtacatgcccaacggcaacctatggga

SEQ ID NO: 10826 - DNA, 34298 bp, Oryza sativa
attttagcttctaataacaggattgtaagctgtattcctgttggctaatggcaatagtgtaacttcaacaggaatgctgaacagacttgtcctcaaaaaggatgttctattgtattgtacaatacatctcaatactattgtatcttccaaacatcccaagcaaatcaaccataaatcagactatatcaaaactttacagcacagtaaaaaagtaaggaattacaatataggattactgattggcacaagtagatccctttggaattgaatttctaaatcacctaatggcactgtaacatcgccatgcacttaataagcaatacaagattaaatgttagtgttattatgcagcttcatatttattgtacaaccgataatagatcggaaagttaagcacaagttgcaaagagtatatgaactgatcaagtataaaaaatatgcaagggttatatatgttccttgagaacctttgccagtaaatattttttaaagagaagattgtatccaattgcttttctaaaacattctttcagaaaaatgctttttctaaaagacaccaacccaccacaacaaaagagataaattaaaaaaaaaagctccttacctgccatccgtttttggcaagggactggtacagatagaagcgatggcagaacattattgctgttgctatagtcatctgtggtctgaaagaaaaatgttaaaataggtaacaagcttagcaaacttccagaataaaagaaattattgtgtgctaactaagggcacaaactagccgtaaaaccaacatataagtttgaaaagtgagctatactgacattaaaaggtacactcaacaaggaaattggcacatacagtttcagtctaatgccaacatcccgaatgaatgaacagtacaactgccgaatttctgactccattatctcagtaataccatctttcctagatggggaaaatttctccagttcttccctggtgaagtaccaagagtacatgtgctcacatgataatttactcgtctgggattccccatccatcagtatgtttgaaaaaacctgcttaaggaccctccaaaatcttcagtgtagtttcagacagaacttccgaattgcttgtgctgaacagcctgcagaaccatgaaatttatgtatataataaaaatatctacaatatgaatccacatactgagcaacgaacattatgaatgtaaatttaagccaatatgtacagattatagctaaattgtgcatgttttacatgatctattcctttgatagcttgctacagttgcattcaccatgctactgtgaacatttttacctccctttccctcaattggcagagaacgaaattaacagaaatgttaaaaaagtttctcatagccacaaaggaaaataaattatattgatgaagatgatattttttaatcaaattaacatacatggtataacaagatactaatgtattccatcccagaaaatctctcccctatatttttgagtataacatgagccatcatattaagccatgtcatcatcattaaaatgctaatcatctgatgattttactttaaaagaaatccataagatgacctatttcaattttatccataactaatcaagagtcacggatactgatttatattcatcaaaatgctgtgtgcagttatattcattacatttccttccatttaaaactcttttgttcagaacctgtacagacatgtgaattccacgagattgaatcttttgaacatgtactcctaatggaagacgatatccggcattgaagcgtctatactccagaggaaatcaatgtgtgctgatgagtttgaattccaaagtctaaattccaaaaccttaccaaaaatgtagatgagtttgatccgcctcaatgcactaataaaaggaaaatagcactgagcagagcttagaaattctaaagcctacttgcatggtccaatttgtaaccataatcacttatcagttgcatttcaagatttctatgcaaacatcttgcaattactgatttgtctgttcatttcagttcattgttgtttgtgccctcttatgtgccaattaaattgttgtttgtgttctctgaagtgcaaacatcagacattctgatctgttgccatgcaatgtggagcattgtatggatgggatctatcgacaactatacatgagacaatgtggatataggagtacgatgtgagatttccgagatatccagtgtaaatacatggtgaaatgtttaactaggtcggaaacatgtaaaccacagaatataagttctcaaaaagagttttatttgaaaaaaagaactcaatgatagctatatgaaattagatgggcatacaaaattcaagataaaactcaactttgtttgtgagatattaagtttacaaatagcaaagaaaaaaacacaaataaagaatactctttttttcctcactgtttatcaatttcatatgtcctgaaattttatatggttgtctaatataaccttcctgtatgtgagatattttagaaatttatgcgatagttttcccatgtttaatatccactgcatgtttttcccatatatcaatgtgcaactacacattacccattgaaagttttcgcatgtattgcctttccggttagaagcagacaatacacaatttcaaggatgtggtacacggcccttgggttctgcttaataacaattgcacctgagacaagttaacggtattccattatacaaagagaataatgctcttatgccacaaagttggatgcgaaaactctcattttgaacaaaagtttgaagcctttactaaaatgccacaaaattgagtaccaattcattcttttaccacaatacagtgtgaaattccaaattaatgcccaccttcttctccttctccatttttgtcctatccccacccttcttctctgtgtccagcaaggacagacctagctctgtccggccaaagtttgagccagacctggcagccagcccactcctgcacgtccgacgccccactcctgcatgtccaacgcgcacgccatctccgtgcacctgagctcggcatgagctatgacaccctagctccagtagccagcttcaaccttagcattacctccgcctctggccgccagcagcacaacaatatgcgtcctgccctcagcaactggctctgtgcagcccacctactccgcgcacggctttcctcctgaaagccagttccacgcgccctgctcccggccgcagtggcggacctaggtcctaggcctgggtgtaaaagcccatagagagacatacatttttaagatataattttctgttgggccaaacacagtgggcaccagcccgtgcggccaagctccattcacaaactcatagaagagagaaagagggtgcagaagaagggaaaattgcacatttggtgggttaaaatggtaaagtgtggcagataaacgagtatacaactgaactttgtggcatttttacaaagccaacaaatcatgtggcaaataagagtatggcatgcagctttgcggcataagagaaattttctgttgtacatacaatcttcacagtatagaaattctggttacaacaaaaacaacatgctgaaaactatgtcttttgttggcagaagattgtaatatctcatccaaatccaagcttaactgaatgtagaaaagatttctcaactagcagtaactatttatgtataggcacaatcttcttgaccaagtaaataatagattctacaaactgcgctcactaaaagttggcagactttgggtgtaatttcaaccaactcccagttaataaactgaccaaatttctcgacaaaagcaaagcagtttgtccacccctttaggataacatctttgaagacaaaatcaagaatacacacaagctagtcccagcccgacaaaaaatctagcccacaagatatcgttgtaaaaggtggagaagcaatgaattcacatcgacttctgcatatgccatacggccaatacgtcaaacagcgagaagatccccaaattgaataggaaatcacgacgaagctcgtcggctcacccatgaattcacctcccaattcgccaaagacagaatctttgacctaaccgggggcatgatggggttcagttgaacccccaaatctattgtttgtggaactaaggcggagagaaaagcttccagatctaggagagaagataagggattaaaaagaggatgacgcgagcagggtgctcaccggcctgcgaggatgcggcagaagcagcaggctgctactcgccctcgcgagatggagatcggcgcaggcggcgggtgggcagtcgaggccgaggggacggggatgcgggggagatcaatttccctaggccgggcgcgacgactcggaggccacctacgccgtactgcactcggatactattgacttgcgtccagtgccccaaaatccacccttgaaatgcatccaacgtctcaaactgcctcccctactatccggtgtcactggtctgtaccgtgtaaacagctcacttccaaggtcggacctcgccgctaattctgctatcatattttggtctcaaatatataattctaaattactcctagctattcactgggtgaataaggccatctacaatgtgtcttcaacccgccccagcgacggccgttcgcttttccgttcgagccatgccctggtgatggcgcgcgacccctgcttgggagacgcgcctcctccttttcggctagggaacgggctagaggcacgcgctgcggcgacagacgcctcaggcgactgtctctccaccaccatattccccttccacccctctccccctctctctcctctcctccgttctcatcgcgagacggcctaccccgctgagccgagctcctcctcgggcaccgccgaggtgcgccgtctcctcagcctctgctagcgggagagagagaggcggtgggcggagtcggccaccgtgcggcagccgtctgccgggctcgtcttagccatcggcagagggagcggcgggatctcgagctacggccggaaatagcagcgacgagagagagagagcgcgcggcgagcggcggcaacggcggatccccggcggaggcaacgggttcgcggcggagtaggcggctctcctcgtcgccctcgtcgacaaagctccggcggcgagggtggtcctactcgtcgcccttgcggccgccaccggagagagagagagctggggtgggtggcgacgatggcgtgacggagaaggccagggaggatgccacccgcctctcgccgcttgccgtcggccaccgcagcggtgcgctgggcctgagttggaggcggcggcgagagggagaggcgagtgcggtggcgaaaaaaaggagggggcaagagagagagagattaggggtaggatagtaaaaataaatatggggctttgtaggctgtgatacctattgtgggttggagtgtctctattaagttgtttcagattttgaggagcccatccaggggtatcctccattccgagctgagttcctctacagcactctagaagtggctcacattgtggattccctaaggacaatagcagtacaatctactcaaaatcatgcctcgctatgccacataggatgaggttcctatatggacactagctccacaatggaggctccacctaacaactttttttcatctcagcccttaaattcttctatgtcagcccttcctatattttgtattaacaaaccatccaattttttatatttcagaccctgcaacaaaaaaaaaagatctacacacataatcatgcctgcccactgacccacttgtcagccatcccttactttttcctccccctcaccccgttctctcgctcccaattgcatttaatcctcatcccctcccaagtcccaacgaagacgccgacgcctctccatcttcgccgcctcaccaacatcgcccccagcttcatcgcctactctcctctccatctccgtcggcgccacccatctccgtctaccctctcccgttccccatccatcccctcccctccagcggcaaatcaagttccaatgatgcaaccaagctcggtggcggtggagcttcggcggcgggaccgaactccggcatcagcgaattgaactccgacggcgcaaaacaaggttggctttctcctacgtggatcaaggccgacagtgtgggcggggcagtctcgtctccggcaagcaccaagtggagcaacgtcggggccatcgcgacgtggagcatcgacggcatcctcgggctcatctctggcaagcggcgagtagagcagcggcaggcccactcgtggtcgttgccacgtccggaaattcactagtaatttccgaacttatttgtgcataaaaccctcgtccaggaatcagccgaggtacacaaactgacaatttaatatacaaatccatcataataataacgttacatacttacaaaagaaaagaaaacagcagcggaaataacggtctagcgatgacttcagctccattcccacaggcagctcaactggggtataagccaaacgtcttctccttctggatcccttttcttcaattgaggttgattgattattgcaagaataagcatatgacatactcaacaagccacacagcaaatatgcaagtgcacaaggataccaaaggatggcataatataggctcatttgtaaaagcagcatttagcaaagatttaagagtagtaaaacaatagagtaattaatcatcaattttaatcaacactgaacagcaccccaatgctgtacaggcccaaccaaacctgaacaaccaaccccggctgtacaaatctaactccaaaccaggagctaagcaaattattaccaattatagcatcaataattattgtgagatgtgtgagactaatcacgaaaaacattgctcaactcgcccataaccgcgggcacggctattcgaatagttttactctggccagaggtgtaccactgtacctacaagacacagcctcaacatcatgtctaccatgcgtcgcgatactggaaagtacccgaatagaggctatgacaataccctctgcacaacacaactcaccacagtgcaccatacctggatcataatcaccccctctataaatacaaccagaggcatggactccccagcgacccccacggacttctcgccgcttctcagtctggtgccccgcaatgaatcatgctatacaaaaggtaaagccgttgcctatgctggcttgtggttggcacggttaatgttttacaacagtagctcgcgaatcggtccttaattgccatgagcacgaccttcacaaccatgtgctcacaacccaccattgacaaattttaattggcaataattaattaaccaatcacgattgaccatcgtgagctaccattaaatataaccataagtgatagtgtaacattagttatcccaatcatgtgctaatgtttctaagcatggctaagcaattatatatatatagcatttagctgaacccaaaccaatatataaggttctagctaatcaaattataacccataggaaaataaagccatcttcggccattaattaattgtgaaaggctcaccacccgatgacattcgaaaataatgcataagttgaaatcaaacaatagctttaaacgggttcaacatgctcaaagggttgtttgggatctttgtgacttgccttgagcttccgcaaacacttccgaaccttcctcaacgaaaacgctctcctccggaacgtcggaaactaaaacgaaagaacaaaatcaacaaaatagtacaaaaacaagcataaccagtacatgtggatatttttaacatgtagatcttgattttagaaaaatttagcaacttgaaccactcgaatccgaggtacgatgatttagttattaatttccgaagtttaatcgattttcatctaatagagaaaactaagaaaagggattaatgacgtcatcgctgacatcatcaatgtcgactcgacatcagcgacgacctcgccggcgctagaagactcggccggacttttggagggtacctacgcgtagaggagaacaacgcgatctcaccggtactaaccaatgcgacgaacgacgaccggcgacgagcttgtgcggcggcggcggctctccggtgaccggtggtgacggcgaaggggcggccgagcttcccctcttccacgcgcacccgacggcgacgtgaggaggcggcggcggcggctaaaacgacggcgcgaggcggctgttcgccggccggcgacggcggcggtttgggtggcgcggcggcggcactacggggcacgagagagctcgggacatggggcaaacgaaagaggacgactaggggatgctatttataggcttggattgaagagatcggactccaaccgagaggaatcgaagccggaaaatccgagggttagttggagagataaactcgaaaacgaattcgattccgcgttgatttcttcgtgataaagtccgattcttgggggaaaggatagaggaggataagaggaatatttcccctcaactaattttgcaaacggagcacgggatgcggcggatttggtggaggaagcggcgtcggctagagcacaggacggcagctcgggcttctgtccaagcttgaagacgacactgtagcagggaggagaattagacttttcgtcttgggctggctgaaaacaaagcaaagaaagaaagaggaggagctcggatgggccgacttgggctgcacagcacgcgcgcgagggagagagatgttgggctgaaatcagcccaacggcttaggagaggatttaaaaactttttccaattaaaataatcactgaaatgatctttgaattgttaaaaatacttccaatgctcaaatagtttcaagaaaaatcctgaaaatacttggacactcaaagtacttaacaaaattataatcagaccatttaatgattaatttaatatgtggataattactgaaatgttctttgtatggttaaaattaggaattgagctccgaaaaatccgagaaaattccagagagtataattaaccatggagaatttaataaaaaataaatccgtccatgctttatatttaggaaattttatttcccacatttaacttctcttgtaaattaatgaacatttaatataaattctaataataatttattaaataatttataaatcctaaaacgaaaatcaggatgtgacagtcatcctcctcctcgcttcgagaggcggccccagtggtggatctctacgctgccgaccggtggtggatctcgagcggcatccccggtggcggatctcgtgtgacggcccggtggcgactccagctccatgagctctcatgatgaggacatcaacaccatcgatacatccacgtctccacgactacaacctcatggtcctattacctgttgacggtcattatagacgaatttcgaccatcaatactgttggaaataatggagaactagaaatgcttgcatgcatattcatttagaaataacctatttccactagtacttgacaaagtacttgtatacaggagatcacttcataaattaagaagaaatgatggaaaatcaccaatcagaggtcgacatgcggtagacatatggatagatgggcccacaaacctattgaaacacttgcaaatgggaccaaccaccataccactgggcccaggatccatcaggagacgttcagaaggaaggactggcccagggaggcctgccaggcgtcggccgacccaggcttggctccgctggcctaggcccaagccaacgacggttactactgaccttccaatgacggttgtacctgttttggcacctccaaccgtcattctcaagctataaaaggacctcatctccttcattccaacacacaccaacaaggaatcaagtgaagaagctttttagtttacatattttgctctagtgctagtagagtcagaattagaatagtcttccttagttcttcaagtcttctggagaattcgggtatggttctactatctcttccctctcttgtaagattttatccattaatgaaatatttttctttatatagttttggtcctttactatacttgtataattattcgagtaccaaatttggtttatacttgactcgtattaaatatgtggctagcttaccaaagatatgcaatggtattggcttagtgttcattcatatggttgctctatgtcatctgcagaggtgtagagtaatatttagtaatgtaagtgtggtgcttagattattagatattattaagtggtgttatatgccacagatctgtagaggtaggccgctgatggtgatagctcagcacgggtattcctccacgtcgtatatagggctaagaaggttcttggtgcaggtactcctccatatctttaaccggttggatagccatgacggattgtagtaaggaattcggcaatatggggtggtttctcaatatattaggaggacatagttagggggtattagccataaagttgtacaatagcaaatgtatactaaaatgactatatactagaagtgcataaatgatatttttctttttttttatccacttagcctagacttatcaattatcaagagtattctaaactgatccttctgtgtgtcaacctatccttatcctaaaatgattaactcctgcaaaagactttgattttatataagtgtaatatgaatttatagcatagtactctcttaccatatcttttcttggaattaaataaatacgatacttggaaatatttccagttgaaatgctacagtggtatatccgtgaggatttattctataacccataagaataccgtctaatatctctggcaacattgcttgggattaatttcctagtaatgtcgttaagaaatatcaacattacctgcgcttgtgcacgtcaatatcaacattacctgcgcttgtgcacgtcaactcaactatcaggtgagttcattcttgagttcatgttcatcttatttatacccccagagacatgtgcactcttgttttacttaggaatgatagagaggatcaaaagggagaggattcgcgcgggctggattcaaactacaggacaactccaacttgtgacgaccgccacgacttcctacgaactccgatttgggcgtgcaagtacttcatggaaagcttatcaagtctactttgaaatggatctggcctcatgtccatatcaattctggagtggccgcaatcatcgctttatcaccgagcctttttctatcaaaggtattgcgtcaacttatttgggcccaataggctatgtatcaagttgggtccattaaggacgcgtcctatgattagagcacaaccccaacacccatgtggttgttctccccctcttcttatacctttatagccactgccaagaacaattggtttttgatgatcagagttagcaacttgctacctgcttgcagcgcgcgtgttggcgaaaccgcccgtctgcttctattcggaaccctgccatattgtgatttcctagtgaaactttcatattcatctagcagttctacttgttcttcgattgcttgcagggcatacgagtgccctctaggtcgggttgtcgtgcaccacaagttcgtgacgaccattggtgacggtatatcggttgctaaggcgcaacgtccttggacggttatagttgggccataaacgtcgtcttcatccaatcgagttatctccgcctcttattgaaagattgggatacaaatccctcgcgggttcacaacaggtggtatcagagcgtggttgatcagtgagagattatttaccctccgttgtttattttttttcctatagtctagaaaaagccaaaaaaaattagattagttagggcttgttgagttttcgattgcatcggttgtgtcaacttgttggtcttagcacttagtctattagagtttcttgttcttaccacgcacatcgccatcttcatcaccgccgccatcaccacttttgtcgtcatcagcaccatcacagccatccaccaaattcctttctgtttgtgtttgatatgttccttttattgagtttaattgtcgttgagcctgctgccaccagaaaggaaacagaaccctgattcgagtgatctaccttaaaggaaatagaaccctgattcgagtgatctcccttaaaatagtcgtatctttttcatatggactcgaaatttggcataatatatccacggacatctacctaaaaaaattacatcgccaaattccacactcgacaaaattaaaatcgcgaaattccacttgcaaaattatgtttttgaggcgagaagctttgcaaaacctttagatagaactttgaaaaaaatttacatgcttcatattttgtccgtttgagctaagaatttatgtggttggttccaatgtgctcctaactgtgaaaaaatatcaaaaaaataaaaataaaagttccatctctctcctcagcaccttccgccatttcctgttgtcaccactgtcatcgttcctgtttaggtttgtgtcttgtgatgttctttgtggttaggctcacgtctctacttcggctagcctaggaccagtcaggcccggcccgggggggtcgagctgggcctccacacagggcccacgaagtgaaggggcccaaccccatatatgctgtacataatagcccataggaactaagaagcccactagctcaggagaggaagaagcaaatgtacaggaaaaaaattgcgtcgatttggcttccttccgtgattccgtccgatcgcttcgccttcgctcgcaatcgcctgactcttcgcatgttcggctgttcgccaccctcccaggttccagccatgtttcagctacgtcgacgactgcgcgcggctatgcgtcaacggccggtgtcgtgctcagtgccgtcagcggcaccacgacagccggtagccagatgcaaatctcttatctctctgactctctgttcagttctaggagaccaggaggtaccccattgctctcccctttgatgtatgctaagtttatatgtttaaattttgggatgcaaaatgttactccccaattgctcctcttctgatttctgaaattttgatttaggatttagggatcctcgcggagtcgcggtgcagctgtgcaactagggcagtgaatagttattttctttagttctcaactaggtaatttgccagcactcatttttattataatgttgaattgaatctagtatgacataattttcataaattacttacttttttctaaatttacagtgaaatcatgtaatgtctcaagaaagattaaatggtttggcaactttatgcatcgagaagaaactattagatgaaattgatattgatgccatcgtcgatgacttcgcatcggtacatgttagaagaaaattttaaggtaagatatataacttgttttataagaatgtttttttatgcattaaatttattagaaacatagttatattattatagttgtattaaagggcccatttttctagcttcgctccaggccactgaattgacaggaccgggcctgtgaccagcactgtacaaaccttgaacgattatattattcaacttgatttggctaacttggttgctagttttctcttgagcattactttcagcccattgacaactcaaccacaaacctgactacaacttgataggtcttgttgctacggcaccgatacacctcgttccacggttgcagacttgtgggttgacgtcccctcctatgagtaaggtaagaattggtaagggcttgtaagataggctgagagtgagcatcttgcaaaagctacatcccaatagttgtagggcttatatttcctcatttgttgtttttgttgcctttgttttattagccatggcatgttcagaggataatgatgaggagggtgcgtttcattccccacgcaccaaaggcatcataaaatattttacaaggcaagttaagtagcacaaagaaggacttgatgctgatttgcaggtgacaaatgagaagaatggacaattggagtccacacagatcgccaccaacatcaagcttacagggttggagacatcgatcgcttgcattaacactagccttgctgctcttgtgaggcattttgatgatctcaatgctagaggtaatggtcgacgtaatgaagacggcattgaggatgaatatacgctgacactaaacaagatgatcgagatgctcttgatcgttgacaactacgcaataatcatagaggtatgggtggtcaccgccaacgcaaggtacgcaataatgatgatgtttttttttctaaaattaaatttaagatacctcctattgatggaaaatatgatcccgatgcgtacctttcttgggagattgttgttgaccaaaaatttgcatggcatgattttcctgagaattctaaagttactagttagttcactgatttttcttcggtttggtgaatagaacatggcaagaaaaatcctaataacatgccacaaacttgggatgcttttaaacgggtcatgcgggcatgatctgctccttactttgcgtgtgatttgttgaataggttgcaacaattgagacagggtgtgaaaagtataggggaatattatcaggaattacaaatgggcatgcttcgttgtaatttagaggaaactgaggacgctgctatggctagatttttgggtggtttaaatggtgagatttatgacatcgtagactacaaagattacactaatatgactcgattgtttcatcttgcttgtaaagctgaaagggaagtgcaggtaaatctacattatgataggcaggcaccacttctccggccggccgtactccttcctcatcttccacacccacacccagtcgagcagcacctcctccatccagtaacaagccacgtggccctcctgcaagttcaacgacaaaggctgtttagctagccgcgagtgcttcttcaattgcatccacgggtaaaacaagagatgttcagtgtcaccattgcaagggctttgggcacatgcagcgtgactaccctagcaagcatgttttggtagtcaaaaatgatggtgaatatttgtctactagtgatttcgatgaggatacacttgctttgcttgcagctgaccatgcaaataatgaggagccgccagaagagcatattagggctaatgatgcagagcactatgagaacctcattgtgcagcgtgtcctcagtgcacaaatggagaaggcggagcaaaatcactgacacacattgtccaaacaatgtacgtcatcaaagagcgttcttgctgcatgatcattgatggaggtaactgccacaattgctagcagcgagatggtggagaagcttgcacatagcaccaaacctcacccacatccatagtacatccaatggttgaacaacagtggtaaggcaaaggtaacaaaactggtgcgcgttaattttgcaattggaaattaccatgatgttgttgaatgtgatgttgtgcctatgcaagcatgtaggggtgaaatcgggtcaggttgggtcggatctcacccttcccgtatcctaacccacattttgcaatcggaatcgggtcaaatacgaatagtgtcgaatacggatacaaactcggataatatctggcacaaatatgaaatggatttgtaccaaaacatatatacgctatcggttacgaatgtttatttggatatctagtcaaaaaaacatccctatatatccctatatattcataacgtgactatattaggccattagtatcttacaatcaacgagcttctaatgtgatattgagaaagggaaatgaatcatcggcatccgtctttaactgtcctgtgtgaagtgactagtagttgtctggctgctaaccaatgaagtggggggggggggggtggagacgaggggtatgcagcgcaacgagctcatgagtcacgacggtttccagcggacttccgactgcgggtgcattggggtgtggtgaaccgacgggtgcagtggcaatggcggagactcgacggggcgtgcaggcgacggaggatcgacgtcacgagcgttgtggagcttcaatggacgcggcagcggcatggcgacaacggtgcgtagcggcagcggagctgtgtggctatgctacctatgtgttctgtgcatgcttgggttaggctgcctggctggtggctcgtgggccatttgggcctggtggctggctgggaagtagcatgttatccaggtaatatccggatatttaaccgggtaatatccacatattttaccggataatccatatccatcggataccaccctccctaactcgatacatatccgaaagaaaatacctgtattcgatgctattgtgttttcgaaagttgatttgcgtagtcgatgccaccaaattcacatgaaactaggggatgaatggaaaactgctttcaaaaccaagttcaggtgatatgagtggttagtcatgccttttgggttaactaatgcacctagtactttcataagattaacaaatgaggttttgcgtgctttcattgggaaatttgtggtggtatactttgatgatttattgatttacaacaagtctatgggtgaacatcttcatcatttacgtgatgtttttaatactcttcgtgatgcacgtttatttggtaaccttgagaagtgcaccttttgcacagatcgagtttctttgcttgtctatgttgtcactttgcaggggattgaggttgatcaagccaaggtggaagccatacaagaatgccctgttccaataactatcacacaagtgcgaagtttttttaggccttgctagatcttaccattgctttgtgaaggatttcagcaccattgttgcgccattgaatgagcttactaagaaggtgttggcggctgttaaatgccaattttataccaccaatacatgcataaaacatagattataaaacatccaacgtagtggtagggtttaattctgacattttccaacagtgttggtgtatatttgaatgtaggtaataaaccgccaaagttgggaggaaacttagaccaaagaggaggagaattctatctatacaagaatttgactcataagagtttactacttgttatgaacggtttactacttgttataattggactcataacaagaattggactctcaacacagactgtaggatcgagatgtcgactagaggagggtgaataggcgattaaaaattaaatgacacctaatcaaaactaacctaagttgctaggctcggtgagggacacgactaagtaagcaactaagttatgttttgcaatcctagggtgaaagtggctcaagtatatcactaggaaagtaaatcacactcctatgtcaatgtttagcaatcctagggtgatatgatctcaagtatgtctctagaaatgtaaattgcacaaatgtaaatccgacaatcaaaagagacaatgagacaagagatttttcaccgaggttcggaaactcgccggtttcctactccccgttgaggcgagcccaactccaccgctcaaccacgaagccaccgcacacccccttcgtcaaggggtgggcaaggccggagccggcccacggagaggactacccaagcctcgatcactcggggtagttcttccttcactccgaaggtagtgaactccaaaccactcacaaaccagcgccgggcctcctccacaatcttctcggagaggtcaccgggtaactcctccacaagccgtctaggaggcggcaacctccaagagtaacaagcaatgaaccggcgtggagatgatcaatcaagtgccacactagctctacaatggaagcaaatgcacttgacacttggctagaacaacctcaaccactataatggatgaacactaagctcaaagatgtgtgagagaggtgcaaggggtgtatgcaattgaattgggtgccaagagagtccccttgctgctggtgggggagtatttatactcgccgttgggggcgaaatcccccaactcagtgctctgccggtctgaccggaggtatgtggccggtcagaccgtgctactctacaacggctagttgctgtcattgggccccacagccgtggccggtcagaccaacatggggtggccgatcagaccggcctcggctcagtcagaccaccatcagctcggtctaaccgaatacggctctggcggctcgggatcggcacaccgagacggcaccatcctagccatatggccggccggtcagaccggcccgcacccgccggtcagaccggccttgaggtggcggtcagaccggcctagaccctgcggtcagaccggctgccctggccagtcagactggcacttgagccgcggtcagaccggccctggtcaggccgaaaacagtgagataaaagtttgtgtgtgtgtgtgatgaaatgagagcacaagtctaaatgcataatgacctaatgtggcaattaaaatcatctctttgctaggtcattaaccctcttaatagttcggcaaaactataaataaactagcacaattttgatcgcccaacgcctcgatcaatttagaaaagaaaacactagtttactgtcttctcttcctttagctttgtgccgtcaattttaatccataggtagacatccatgcgcacacataatgtgaacctaacttaaagatatagctcaaaagaacggttagtccacaattagcgcttgtcattaattaccaaaattaacaccgggggcctagatgcttcacacacctttatatgcatcgtttggggatgacaagtagtagaaaacaaaagcttagtccccaatttagcccacaaagttctccaaaaatggctatgaaatttagtgtcacgatcagaaacaattgtgtttggcacacgatgcaagcgaacaatttctcaaaagaacaaatatgtaatatgggtagcatcattagtcttatgacatggtatgaagtgtgccattttagaaaatctatccacaaccacaaaaatgctatcacgccccctcttggtcctaggcaatcccaacacaaaatccattgaaatatcttcccaatgaacactaggaacagggagaggcatatacaaaccatgtggatttaaacgtgacttagcttttttgacatgtagtgcagcgagcaacgaatctctccacgttttttctcatcttagggcaaaagaaataaccagcaaggatgtcctccgtcctgttggcaccaaaatgccccatcaaaccacctccatgggcttcctgcaacaacaataagcgaacagagctagctagaatgcatagcttgttagctctaaaaacaaacccatcattgaagacaaatttgtccctgtctttccatccttacaatatagcaacacatctttaaaatcagcatcatgcatatattggtctttaactgtttctagcccaaaaattttttagtcaagttgtgtcaaaaaaagtatatctctactagacaatgcatcagcaatgatattttccttcctttcttgtgcttgataacaaaggaaaagattcaataaattcaacccatttagcatgtctacagttcagttttccttgactacaaatatgcttcaaagattcatgatcagaatgcatggcaaattccttgggccacaaataatgctgttgtgttttcaaagtttgcacaagagtatacaattcattatcataagtagaataattcagaacagacccactcaatttttcactaaaatatgcaacaggttttccttcttgtagcaaaacaccacccaatccaaatcccactagcatcacattcaagttcaaaaagtcttattaaaatcaggaagttggaggagaggtgcatgcgtcaacttatctttcaacatgtggaaggcgttctcttgtgatgtgccccaagtgaaaggcactctcttctttgtaagctcattcaatggtgcagcaatggtactgaaatcccacacaaaatggtgataaaaccctgcgagtcctagaaagctccgcacctgtgagaccgttttaggagtcggccaactctgaattgcctcaacctcaatcccctgtggagtaacaacataaccaagaaacgagactcgattggtgcaaaaactgcacttctcaaggttaccaaacaaacgtgcatcatgcaaagcattaaaaacatcacgtaaatgatcaagatggtcatctaaagatttgctataaattagaatatcatcaaagtatagaccaccataaattttccaatgaaaggacgcaaaacctcattcatcaacctcatgaaagtgctaggtgcattagttaaaccaaaatgcatcgttaaccactcatataacccaaactttgttttaaatgttgttttccattcatctcccaacttcatacgaatctggtggtaaccactacgcaaatcaactttagagaaaacagtagagccaatcaattcatcaagcatatcatctgacctaggaataggatggcgatatctaatggtaatgttattaatagctctacaatcaacatacaaacgccatgatgcatctttctttggtaccaaaatcactgaaataacacatggactaagagactcgcgtacgtaccatttatcaagcaattcttgaacttgacgctaaatctcctttgtttcctcagagttggttcagtatggcgcacagttgggtagtgaagctccttgaatcaagtcgatcttatgctcaattctacgcaccggtggcagccccggtggtacgtccttgggaaacacatcctcatactcctacaaaaagttagtgaccacaggaggaaaagagatagcatattctcaaaagaaaacaaggcctctttgcaaatgagagcatagcaaacagtgtcacttgtatccaaattttgagtattattaactcaaattttaaaccacatataccattatctctactacttaaaaaatctatagtagtggtcttgattcctgacgtagcagagacactagacagacacgcgcagtcacaaccatcgaatcgccagatccaacggcgtggatcatccatcgcccattcgcccgatgctgtgagttttctttctcgctaaaccgctcccgatccccttcctcccactctcccgcgccgccgaaccaccctcaccacccaccgcagccgcgtcctcctcctccccaccgccgccgcatcatccccctccccaccgcctccgcatcctcctccccatctcctgtcgcgtcgtccttcgccacgacgatcccctctctccgtgcatccatcgatcccgcggcgaccaccgttatcgtcagtccctcctccacgcccccaacaccgatcgcgccgtcctatctactgtcgtcgcgtcctcctccttctccggtcctccccatcaaccgccgctgacgcccctgcctctgagtccactctagatccgccgacgcctactcctctgcccacacgcaaccaccgcccccgccgccgagtgtcctccccagcgctccctccctactccctggcgcatcctcccggcggtctctccttcgggcacccctcctccccggcagccctctggacgtcgaggggggcagtggcggccgagcaaggattgccctggggggacgacgagtccctgctccttggcatggcatcagcctcatccagcccggcgacctctcctttgggcgcccctcctccctggcggccctctggatgtcgagggggaagtggcggccaagcaaggattgggacgatgagtccctgctactcgacctggcatcagcctcatccagcccggcctccatcactgtgcctctctcttctcagatccactgtagccggagtcatcctccatcgcgcctctgtgcttttgctcaccggcgccgcctaccagcattacatctctgaactctcaccctctccatcgagagtttgcacaaggtacacgtaggcctgataacagcttgctcacttaagtctgtttatgtcttttttctttacaattttgcatcattactttgcctttccatcttccatatattccttaagagttacgactgtgtgtatttcagcctttataaacatattcaatcacctagcaatttggttgtgggagatgacttgcattgcataatggaggtaaatggaccatcagctgtggtaaatgaaaatccaacacaatgtaattccatacagggcactatttgaatcgcttatctggacaactatcttttatacaaagtcgtccccaattctttaccagaaatcttatgtttagttattggcaataattggtgaataattgatgaaatatgtggtacagttaatgtgcgtggcatgcaggaaagaatagccatcgatctggactaaaaatgttgccaccatctggaattaaaatactgccaatgaagttgctcagtaatattcccagggtatgtgccctgcagacaataaccatgcatttttttttcaatatactagattcaagctatcacatatcattgttgtcgcctgtcaaacaagtatgataatgtcatgatctggctctgaaatatcttgagtactgtttgaaggtaaatattcctgaaaggattatagtaatatgtggggcactttgcttaaatttctaagatacgcctgtcgtatgggaaattttcattattttgggtaagataccatgttttgctttataaattgcacatctactttttaccaatgcttgcaataaaatttcagaagttcatcatctcttggtgctactttccagctatttatattgcattatctccttctgtagccttttttattcgccgttatagccttctatgcctgctacaatatattgcatcatctagcaaggtttgttttaatcctcttcattattacaaacactactagaaaaataatttatcgccacgaaaaaaatcatagcatcaatgttaaaattgtggcaatagatacatgttgccacaatcttcaaatcgttgctagccgtggtaataaatagcgtggtaatagtttattgcaatgatttttatttagttgtaataaattttgatattgccataaaatggatgtggcaaaaaatatatattgcaacacttcacatcgttgcaataaataactattgccaccactccatgtgtggcattagttctacataccaaattaaatgtttcaatattaatttatcatcctaactattttcttttgatatcttgtcatggccaggattcgaaccaaagatctctccctcacgcgcgctctccatgaccaactcacctacgcatcaattttatttaaaaatgcatataattctatttgagactgcctaacgagatttgaatcatgaatttgagtatctaaaatatttcaaatgaaaaattgaagttttagatctcatcgagaactataaatttcatataaaatttgtcctaatccgtgtccatatgaaaagaataagttaaattatgagataataaattttttattacaacgaatttgttgatcatggcaatagaaaatagtgaaaagtaccatgtactatgcaaattgccacaaaaattaaatgtgtggcgatagaacatgtttttttttgcaatagtaatgtttttttgtggtgataacttattttctattacaacaaaaatactgaataaaacaacgatcataaatcgttgcagcaaagtatagttatttgccacagaaaaaatatcattgtgatagtacaatatatcgccacgaattattttttgttgtaataaattggtggcgatagctaaattatcttgtagtgaaacggattcacctagataggccagataacctgaacatgatcccatatttttcttcgtcagataagcagtgggaagcagttggaggaatttctggattacaaggactcgattgaattcatcttttatgagtagatagagtagtccttgagcatgagcctggctatttttacattatttgcacacgattaaaaaaagatggataaagaatatgaggtcccaataatttctacacagtttgatctgaaattcggaatattcatatcctgagactcagagaaccatcaagcatgtctacatgtaggatgtttttctttgatgctgtagtgtcatttgcttgtagtgctggagggttatatctattgacgtgaactgtacttcaaactttagagagaatctaacgtatcaaaggtagccctgtacagctgtactccatacatcacttcagtgtcttccttggttgttcgctagcagctgaaagtgttgtacttctctgaacgcgcatgcatgttttgagaacgaacataataacactgcagaggattatcttttctaactgcaaacatgagcgagttgtatcacagtggtgttgtttggatgcttctgccgctcctcttcaaaactttagctgaatttgtttcatgccattttgcggtttggaagattgtgttacttattattgttgttggtctatttaattgtatgttttggtgatcagtgctcaatatctcgacctgcctaaaactttgttcgtaatctgaattttcgctctcctttgattctcatgttgtatgtaattttaattttcccgttgcgaattaaaaccacttggctggttgaataatttactctttgactgtatatttagtttttcaactaatcacatagtcgggggctacacctattagtcgatgcacctaagtatatattccttattgtttttaatttttttaacccttgacagcctcatgatttggtaaaagcactcgggagaccattgttaagatgattgaagcactcggcttttgatgatttaagttcgggagaagattgtcttttcgactatgaaagtctcagaggctattgtggagattatggtaacatttacccacatggatagcttatccgactggagataggatgtgggccatattcgtatattatgtaaatatactagactttggaatatatattgcggtgtttctcaaggcatattccataagtgttactagtatacaattatgtaaatatatagaggatccgagtcatgtccgattgggtcttcttcctcgtaaccctgccccccgacctatataaggtgggtagggaactccctaagggcataaccataatcagattgtcagatcaataaaacacttgacggatacaatatctgaaatattaataaggtattacttatcgtcaagaaggcgtggaccgtccctttactcattcattttagatctcgtgcgctaccctcttttctattgccaatttcattaaattttgatttataagtataacaataagtgaagagaggggctacaaaaggtttgtctagggagaaaattcgatctatagcataggaaaaaaccgggtaccaaaaaatagcacaacaaatttcttacttcgatcagaagcacaggccactggtttttcttcaattcgtagcactcctgtctttgcgatccaaacatattagttgggatgaggaaagactaatttttcccttagtcctctctattgagccgccacccgtcgccccgccgcctcgcctccgccagtcgcgccgcctccacccgttgccccgcttctgtccgtcaccccgcctccgcatgtaagtcatcgtccccgcactgaggtagggcatggggaagggacactagtacgggagggagaagggagatgtagtatgggtggaaaaaaaacaggatggaagaaggttagttgaggctaaaatatgggtcctatttgtcatacttgtaatagagatgatagatggagaggctgttggagtaactaagagtttgacttgccaaattagatggagagttggtcaaatagacatttggagagttaggtttggagagactgttaggagatgctcttatattggatccttcgctcctccaatctcactcctagagcctgtttgggagagtttttagctgctgcagcttctcccagaatcagaagctcccccaaacagtccagcttttggtatagattctgagaagctgtagttgtagaatccaaaaaatgaactagacccagcttttccagactcacagaagctggctttcaaccagccatttcttagaatcttaggtggtgtttggatccagggactacacgtcagatgtttggacactaattagaattattaaacgtagactaataataaaactaattgcataaatgagagttaattcgcgagacaaattttttaagcctaattaatccataattagcacatgtttactgtagcattacatagactaatcatagattaattaggctcaatagattcgtctcacgaagtagtccaaggttatggaatgagttttgttattagtgtacatttaatacttctaatgagtgtccaaacatgggactaaaattttagtccattatccaaacagcctctcaagctcccaaaacagcccctagtatcggagaatgccccggatcggtctaccggcactcggcgcacaggatcggtcgctgccccagcgcgcacgtgtctctcccattgggccccaccacgtgtccctgtctacctaccacgtgtctccaccacatactccattgtaacaaatcacccatatattttggaaccctctattaagggaattcgtttcatttttttttccacaaaaaatatttcacttagtgtactcacaatgtttcactatgtatagatctaatgttgcagtgaacgaaacattcttttgcaacaaatcatccacatattttggaaaccctatattaagtgaattcgttttatttttttttcaccaaaaatgtttcacctagtgtacttataatatttcactatgtatggatcaaatgttgcagtgaactaaaatattctttcgctatttgctgaaatattatttttatataaggtgaaacaacacccgatttaaacgattgaaacattttcgatctacttatgaaacaattccgatatacttggtggaacatcatgcaacatttaaaaataatttaataataaactaaaaattgttttcgtcggaatatatccatgtgtggtcttgttttgaaaatttaattgtaatgaatttaatggtgcaatcagattataattttgataaataatttaaaagaaaaaatagtttaaagtggttatgtacgcatgctgtgactgaagtcagtgcccaatcggtagtctcctccccccgagaaagttgcatatctaccattgcaaaagattggattcgctagaataccatcacttaagttggcttcaaaaaaatgccacactcaacaaagacggattcgctgaaatatcatcgtagacgatattgtccctggatcctcttcttcctccttcgagcgcaagaaagctcgccggcgacgatcgcacgccatggcgagcaacaaggtggagccgtggaggtggtacaactgttgtctcccaagatccacaccattcccatccccaaataaagcaagcagccccacaccattcccatccgcaaataaagcagagcactggtggtggctccgacgagctagcgcgtgatgtgagtgcgcgggcggcggcgggggatccttgacgcgatgacgcgagcaccaggcttctgcagcaatggttccttagtatgatgatgtgagtagtaggccccggcggttgctcgacgcgagcaataggcgaaggcgctggtagcggctggtcagcgcgacgagcatcaggtggcggcggtggcgattcctgtatgcaataaaacgagcaacaagcgtaggcggccgttcctcgttggggcatcatagaaggtaaccggaggaaaagttttgcatcatccggctgaattgatttttttgtcatccctgagattgattcctctttcgctggaatcaatttccattgattcatgccatgtaatttgcattcatcactgctgattgagacggtgacaacttggatgattttgccatttttttcattgctggtgcggtggtgcccacgacgtgcagtcgttgccgtcgagcttcttcggcgcacgaaggagaaagaagaggagctaggggcaatattatctagaagggcattccagcgaagttatttgtattgagtgtggtattttttcgaagtccacttaagtgatggtattatagcgaaaccaatcttttgtgatggtagatatgcaattttctccctcgcctggtatcgctgctgctctggttgtctctcgtcctgagtctccgactgagcgcctccaatctcaacagccacctcccacctgttccggctccggctagacctcgccgccggcgatccccagcctcagcgcatccaaccgacggaagaacacaaggcgccgcaccgcaccgcagcgatgacgctgatcaccctcatccgcgactacatcgatcgcatgctccacgacatccccgggatgaaggtcctcgtcctcgaccccgataccgtatgcgctccctcgaaccctagcctcttctcccctgcggggatgggatccgatcaccccctgaccagatccgtgctgttcgttccaggtggggatggtaagcgtggtgtacagccagtcagatctcctccggaaggaggtgttcctcgtggagacggtcgacaacgcctccagctccagggagtccatggcgcacctcaaggccgtctacttcctccgcccctcctccgataacgtccagaagctccgccggcatctcgccgccccgcgtttcgccgagtaccacctctgtgcgtaatccccctacatttacccgtacctatatgttttttttgagtgaaatacatggctggtcccttgagtggtgtcacttagtttcatgaacttgacaattgtacgtttagatccgtgaacttggtttaatgtaccaccctggtccaaacatcttttgactacgtttgaccgccaacgtggtatgccacttaggcaacacttttgctctcagccccctccacatcacaacatgtcgcatatatctccttgtagctatatagacaccagaatcccaaaaaaaaacctcaaatcgttcttccctctcattcttctccctgcatgtacagaaaatgtggtcccgattagcaattgccgttgctctgcgctccaaaatgaccttatccttgcacaacgggcacttaatcaacaacaccttcttccggcgacttcaagacaaggacaagcttggagaatccatggggatacctagcgtgcaagccgcattgagctacctcccgctgctaatccaaccgcactgtgccaccgctaaccccgctgcactgcgctgtctcctgccgctaatctcaccgccgaggccgccacaactgctacctctcagcctccttctgctaacctcaccgtcgaaaccctagctgatttagggatattttgggggatttgggttgaaacgcactggtcagggcaagttatgtgtgaacgtatatgtggagggggctaagcacaaaagtgttgtatacgtggcatgccacattggcggtcaaacatggtcaaaggatgattggaccgggagtggtacattaaaccaaattcacggatctaaacgtgcaattttcaagttcacggacctaagtgacaccaccctacaaatttaaggaccggccatgtatttcactctttttttttctttcttgcatttctgtgcgtaatcaccctcttgcttgatttcttgtatgagtttcttaagacttaagttaggttgagaggtgcagacaatttggtagacagactagttgttacgtgatcaaacccaacttgaccaccacctcctcttcgctggttgaaactctgctaattgaatcttagatgcttttgtgtggtcattctccaagttatgtgcgtgtaggtgttaggatttcataatctctagtttcattctatgttggggtttaatggtgtgcaaatgtaatgttttgtgtagtgttttttttttatttgtttgttgattgattgtctgcagtcttctccaatgtattgaagattccacagattcaggtgctcgcagattccgatgagcaggaggttgtgcagcaagttcaggtatatgatatatatggtattatatgcttattgcaacgaactttttgtgagtagagtgaggagatgggatttttatattaatgttttgctctcttattccaggagttctatgctgatttttgtgccatcgacccttaccatttcacgctgaacatacgcaataaccacgtctacatgcttccaatggtggtggatcctcctggtatgcagagtttctgtgatcgggctgttgatggcattgcttctgtcttcctggctctcaagcgccgtcctgttattagataccaaaggacatctgatgttgcaaaaaggattgcacaagaaactgcggtgagtctattgcccctgtaaaatatgtctatttggatcctatgaacatataaattgatactgataacttttttatattgtgtttatttttagagagaattgtatgcatgccagactaaaaaaaatatttggaatgccactctaaaccttaaacatttctgttttgttacttcggcatattttttggtgttaactcaaaaaataggtacaatgtcccttgacacaatgtcaattattccctggcatttaaacacaatcttctctttctatctctcatctcatgactagctgttcttagctgctttctatggcacaatcctggagcacttccagcctcctgattgaattttcatcagtcgctaggcttatcttctactacctccgtcttgaaatataagggatcttggcaacggacgcggacaagcttgtccaggtgcgttgccaaaatcccttatattttgggaggtagtagttacaaagttatctttagagatcatttgttaggccagcttctcctataaagaacgtacatcacccactttggaaatcatgcagtctttacaaaatacttctacctgtccctcatgtcagcaattcttcctgcctaatctctcttctacctgcctcctgttcccattcattttactatcaaattcttatgtcctacccaggtactcttctagacttctactatccaagcgcataacaccaacttattatgcctaattagataagttatccaaaatgttccaataataaggatcatattctatcagtcaaactgctaactattcaaaatagccactaatatcgaacttgccctgaatcacttacattctgggtcctgcagagattgatgtatgagcaggaaagtggcttgtttgattttagacgaactgagaactcttccttgttgctggtgattgacagaagggatgatcctgttaccccgttacttaaccaatggacatatcaggtatcataaaggaaataaacaccgttatttttcatatttcagttgtacctgtgttaactttcttgcaattttgcatacacaggcaatggttcatgaacttattggaattgagaacaataaagttgatctaagggaatatcctaatgtccctaaagaccagaaggtctatcaaaatgttgaatttatgttcatattgtgataacatgcatctttttttgaatgttgatccatctgaaacatacttacacaggaggtggttctatcatcagttcaggatgaattttttagggctaacatgttcgagaattttggtgatcttggtatgaatatcaaaagaatggtagatgactttcaacatctttcgaagaccagccagaatattcagagcataagtaagaaacttttgcctttcttgtttcctacgaaagaaaggaaaaaacaattatgtcactggaaagtaggcagtgcagatttgcctttgctgtcactgacatgtagtcccaggactcatgtgagtcacacatacaatggagaataagtgaatccccctgaaagtaatgtttaagctagccacccttctttatattgttacatttggcaacctcatgcttccaatttttacttttcactagcattcgtaatacatacttacatatgtttattttggaccacttcagctaattttgtttctcttgccaatgctgctaaaattccatttcttatcatgttaggttttggttctgtatatttttgtgtatatgtgatgtgcatagttggggtaagggcctttagacctattcgaggtgtcgttggacccaagtagcgcaatggtgccgttgaggctgccgtgccacaagggcagggaagaagaggaagagtctaaagcctagtggctccgtttgatatagattattgcagcagattatcgatttaattatagggatacattaaatataataagaaataaacttaacaaatagctcaaaacaagtggtccaagcgatgaaatagaagaaagttttttttttttttgagaacgtatttttcgaagcatggagcaaataacccacttcagtaatctggtgaataagttcaatagaacatggagttcatttcttgcttaagatactatcccatcctcatgggatgagtgatgacttgactcttaagaaacatatcactgagattaaggaaatagctaagtaaatctcatcctatctagtttaaacacctgcctgtgccatgtacagtaccacgcgtgaacagtagcctcgtgtgtactgtttacggtggagtaccactagccctagggaggctgattgctcttttgtccctaatgggctgcacatgcagtataagtacatatctctgagcagtggcggagccagggccagttgcctgggctccgccggctgcacgtagccattccccagtagattacacctaatttccttgctaatcgtctttcttagtcaccgtatgaactgaagcagcagcaatatatatagtttacatacttaattaacgtgcttagcgcaaactagcaaagcaaattcttacaaaatgatatatggatttgaatagaattgtgtggactatatttgttgttaggcttgcccaggctcataaaaatttctggatccaccactgtccctgagtgagtattgacctttatgtgttctttcctatttttgtattttatgtctttcaccaatttagattttaaaaagtaaatttcacaaaatcccaggtattatggttaaggttgtataaaatctatgtaccacataccaaaacctatgtggttttgtgcaacatgaaccataattaatacctagggttccgtgatatttaattgattttaatgcatgtgcattgttgtcatggcaagctgtgaccgtgattgggctgtgtgcacttggattgaagtgttgaatgggttgctgacgatgcttgcaagctggtcctaggaagaagcattcatgagtaggcctgctaatggtttgggtaggaatgggtttatgcgtcaatttaaatttttgctggggtggtttgggtgaagctggaaattgtttggtagtggttttgtcttggtcgctaattttcaggcccaatacagtttcataaatccatggggacatgtggtttcaggttggcagccttgatcagactcctggaccttgctgccatcctcctggggattttgttgtcctgagttatcagtatcacttgtggttacgggcctccatcgctgattttgtgcccctagacagcttagagggagagggagggagaactccaaatccacttcttctccatctatgtcgaccactggagcccgcctgccggcacttctgggcccaatgcaccgctgttgctgtcttatccacctgtgccttcaccattggtggccctgttggcttggcttcctaactcatactcattagacactgccaacacgatttggttccaaattccaccgacatccttgggcagtgccccaacaggtaggggctcgctgtcgtccttgaccagtcgatatagagctgccactcacagttgacgttgctgctgctggtttccctctatcgccatagacagttcttgtcctcctttccacctcagcagcagtggctggatctggttgtcttgcacgtggtggcgagaccatggccgatggtcacagatcaggttattggtggcaaatgggccaaatggccaaatgggctgagtgtttaaggtggatttagagtgagctgaaatggtctgggaaagtggattctaaactcatataggaggaaaatgggctggttcagtttgggctcaggtgg

SEQ ID NO: 10827 - DNA, 1263 bp, Oryza sativa
ttcatatcatagcacagtccataattaatgccatagtgaagggactttttaatcctggtattttaatcgacgtagattagcattaataaaattaaaatatattaaaaatcggtccaggagagcaacgagagacggatcggccttagactcgctggctctgcctccctcgtccgacgacatacgtccacgtatgtatatactactcgtactcgtactagtatagcatatatctatgatctctcttattaaatcaatcaatcaagactaacgcgcgtcaaccgtagcggccatgcacctcttacccgacgacgtcctccgccacctgccgcgacgcagcctcgctgcctcacgctgcgtctgtcagtcctggcgcgtcatcatagacgaccgctccctgctcgccacggccgcgctcctcccctgcacgctccgcggcatcttcgtccagatcggcgtgccaactctgagcggcttcttcgcccgcccctcgccggcggggacgaggaggccacccatccccggcgtccttgacctagactacctcgacaccaatcaaatcgaaaaatcccttctcaccataatcgaccactgcaacggcctcatcctgctcgaccaccacgtcgtcaacccagccacgcgccaatggacgcgccttctcccttactcgccgccggagtcgtcgccgccgggcagcgaaatcatcctcgacggctatcacgccctcgtctttgaccctcatcgtgtcgccgccgcactaccagttgttcttgatgccctacgtcctcggacgacgagccacggtgttttctccatgtcttcgccaatttgaaagttttcaaatcttgaattgaaagttttaaaattttgtgttgaaagttttcaaatttaagttgaaagtttttaaattttgagttgaaagttttaaattttgacttgaaagttttcaaatttgagttgaaagctttcaaatctggattgaaaattttaaatttgagttgaaagtttttcaaatttgagatgaaatattgaaagttttcaaattttaacttcaaaaattcaaatttcgagttgaaagttttccattttgtgttaaaagttttcaaatttgagttgaaagttttcaaatctgcgttgaaagttttcaaatatagggtgaaagttaattttcaaaatttgacttgacgtatatatattttttaacctgttacttaaaagatcgtgaaaaaattcatccgtgcttgattaagagaaaacacgaaaaaa

SEQ ID NO: 10828 - DNA, 10710 bp, Oryza sativa
  unsure (1)..(10710): unsure at all n locations
aagcactactttcaggctcacaaagtcatagtgccatcacagtaccccttgggcgaaatactccgaggcaaggaggtcactggccggcttagcaagtgggcggcagagctatctccgttcgacctgcatttcattgcacgctttgctatcaagtctcaagtgctagctgacttcgtagctgaatggacaccggcacttgccaccgaccgcgagcccaccgaacagttctaggtgatgtgctctgacggctcgtggtcgcacaggagagcaggcattgcggcagccctcttttcgccgaatggtgtgccgattcggtacgcagcaagactgcagttcgacacaaccaacaacgcgacagaatacgaagccgttctcctgggcctaagaaaggcgaaagcactgggagtccagcgcttgctaattcgaaccgattccaagttggtagcgggccatgttgacaaatccttcgaggcaaaagaagaacgaatgaagaggtatctggaggctgttcggtccatggaaaaatgcttcaccggcataacggtcgaacacttacctagaggtcagaacgaggaagcagatgccttggtgaaatccgctgcttgtggtggcccatattcgcctggcgtctttttcgaagtcctacagctcggaagtcatggcaatcgaccagcagaaactgggcgaagacccatatgactagcgaaccccatttgtgaaacaccttgaaactgactggcttctggtagacgaagcagaagcaaagcgtttgcaactcagagccacgaagtataagatggtctcgggtcagctttaccgctccggggtgcttcaacccttgcttcgttgcatatcttttgccgaaggcgaagaaatggcaaaagagatacaccaggggctatgtggtgcgcaccaggctgcaagaacagtggcctccaaagtattcagacaaggagtttattggcccactgtgttgagagtctgcgttgagcaaatcaagaagtgtgaaagttgccagcgtcatggctgaagccagaccgcaccccagtatgatctgcagcccattgcgccaatatggcccttccccagatggggtctagacatcatcgggccgttcccggtggcgcgaaacgggtataaattcgcaattgtatctgtggaatatttctctggatggattgaagccgaaccccttggggcaatcacttcggcagcagtacagaagtttgtatggaaaaacattgtttgccgtttcggagtgccaaaagagttcattcctgacaacggcaagcagtttgactccgataagttcagagaaatgtgcgaagggcttaacctggaaatcaggttcgcgtcggtcgcgcacccgcaatcaaatggggcggccgaacgtacaaatggcaagatcctagaagcactaaagaaaagacttgagggggcagcgaaaggcaaatggccagaagaattgctatcggttctctgggccctctggacgacccccacaagaccaagtttagcccgtttatgcttctttatggcgatgaggcaatgaccccagcagagctaggggctaactcaccaagggtgatgttctctgggggcgaagaggggcgcgaagtatcgctcgaactcttggaaggggtaagattcgaagcgctcgagcacatgcacaagtacgccacaagcacttcggtaacttacaacaaaaaagttcgacccacagtgctgatgcctggtcatctcatcctaaggaagaaggcgaacccagtagcggttggcaagcttgaatcaaagtgggaaggaccataccttatcaaacacaagtccaggacgggatcttttcgcctagcgacactagaaggcgaggagttcgaccattcctggaacgccgcctctctcaagcgcttctatgtctagaatgggtggcacccaaatcgccaaacttgtaaaaatgtacataccgtcatgtaagcccttcggcactatgtaagcctttcgacaaaaaaaataaaaaaaataactggatgtagggctattatccaccatggaggcccgaaccagtataaaatctctgtgtcctccgccttctttctaattttcgtgtgattgacaatttgtggaaaaaccccaaggcaaacgcctgatcagcgaaaaaggcaggagggcgaaacgaatcggccgaagcatcgctcgccgaacgttgaaaccgcaacagcttgtctcggaaaataactagccgaacgacgttacgttcgatcgacataaaagcaaaagcgtttctttcagcacagaatgctacagatcgaaaacaaacgacaaaaagctgaaaagtcagtacacctatttcgctaatatacgcaaaggggccgacatgttccgacctaacaaaagcacgaaatgtgacgatgcgaaagaatagcgaaaaggaaataaaacacatctttattaacttcgaaaaaataatcgaagaatagaaggttcacaacatgatacaattcaccttacaagtaaattacatcttcgcccccataatcactatccctccctaaggaatggtcaggcgaactaggttcgtcttcactactaatatcatacacaaccttaagaggagtagggggcgaaacacagactaaactgtaacgacgctgaaagatcgtttcctgacgtttagtcttctgatggtttcgccaaaagcgagccatatcctccaaacgtcttgaatgaacaagatcgtaatcttctaaggttcgcccggggtgcgcccgcagccagtcggcaaccttgaaaaccttgtagctgcgaccgtttatctccatttcgcgataaacaggccgaaatggacatcgcaccttcggcagacccttcaatgccacaaatttctcgttttgacttcgccagctccctgaagggggccgaatgcacgactttcggtgaaccccctagtagacagtgcagaaaaggcaaaacacagtttacatagtaagaataggcgaaggaaagggaaggtgtggcataatgcgaaatggacaagataataatacgccaaagacttcgaccatccaaaagtggctaagattgtcatacattccaaagtataccaaaggccttcttcggctacaataaggagggttaccgacggcctgccaaatatacatcatttgcctctccaggcaaatgcaaaaaagaggaaggaaaactacaaaaatctaaggaaagggcggagggcctcacacctctgggtgatcctgggcattgcctccaccctcttcgcacgctgcgtcctctccttcgccccggtctgccgcctccgccttcgccagttgctccagaaggcgcgccttggcagcggaccggccgtccttctgccaaaattgtattcgccacgcacgaagagcgggtgaaatgttctgtgcactaatctcccagtcccccttcgcataggtagggaactcggcgacatgctcgcagccgaactgttgcaaaaggcataaggtgaaggccgccgatacacgcgcacaacaatcaccgtacgcggtggcgcagttcgaaaccgatccgccagcctactgggtccactcggagaagtcgaaggctgaggcatccttggaaggaaccccccgcaccttcgtgcccatgtcggtaagggcaaggcggagcgtttggcaagccgttctcgcagattcggcggtcttcgccatctcccgcaaaaaccgctgcgactcctccacggcgctcgcttcggccctgctagccttcaggcgaagagcctccatcttcggctcagtaaggttatagtaatcaaccagcactgccgaatgggctttctccttctccagttcggccttgaggcgatcaacctcggccctagcctctttccccttatccagttcggactgaaggcgttcgacttcagctttcgcctccttgagggtttggccagggcctccacctccaagttcttgcggcttatttcgtcgtccttggcccgaagacggctcttaaaaccatcaaaacgggcccgcacggttcgctccgtcgaacagtgagccgcaagaatctagaggaaagataggagcgggcgaaaagaacaaaaggttaattgtgagacgtaaaaaaaagggggatgaagaggaaagcgaagaaggaagaaaaagcgtacccgaactgccaagcttttaatggcagaacacccctcatcgaactcatttagttcggtgaacaggctcggggtgccagcgggcaagacaaggttgctcactccctccacaaagggaacaaggtccgcccgagtctcgaaatcaccaggggcgaagtggggcgccgcaagggaatattccgaggcagatgcttcggcgcccgcacacttccctttcgccttgactaatggcgaaatagctagctcacgcagagggctcccgaaaaccctcgccacagccgacacgatccgttcagcggaggctgaagccccggccgcgatgctaccgcctgccccagcaacaccgagcggaacaaggggagcagttgaaaggtccaaactgcggccagcgggcgaagtcggagtcccgtcagaagactcgtcgtcgctgaaaatgcgggcgatgtcgacgagttctttctttttagagatcttcttcaccggacctccttcgcctccttgcccgaggagaacgcaactagagccttcgctccttccaaatccgtccgtcgaagaggggagctgttcgactccaccccggtctcgttgtgacctggacttggggtaggagtgtagccgggggtgtcgatgcggtcttcgaccgcctcgttcgcggccttatcggccacaacctcctcctcttcctcctctccttcctcctcgccgtcgcgttcttcggcatcgtcctcgtcgtcggcatcggagtccgacgaagcaggagcccttcgtttcctaggggcaagcttcacttgtccgcgcattcgcttccgtgaaggccctgcatcatcaccggaattgtgggggtttgcccgaggaggcaattcgccgttataaacccagttcgcccgcccagccgcttgtcgtgttagcagctagctatactcgacgaccgacacgtcgccgatcatcctgcgggcttcggtttcagcctggtcaagggtcaacactgcaaaagtagagtgtgaagctatgtcaaaagtcagataaggtgaaataacaaagcacagcagtatatagcaaaagaacagtcttactgttcgccccctcaggaagtatcaggttcggcaaaccgtcgacctcttcgccttgatcaaccgtgacttgccatgactgggagaggggaaagatgcgaagcatacagaattcctccaccaagtcatggcagctaatgtgggagcaaaccttgcgcagcagaacgaaccgcgcctccatagcaccgtccacggcgatcttgggtttccggttcggcgcgatcgccctacgccagcaccggagggctttcgccgggtcagaaccagcctcgaaggggatggtgtgatagaaccacctagctatccaatggcggtcccacttcgacatggcagcgttcaccggccagagatcggaccgctcgggacgaacgttaaagttcacgctcctgaacactgtcttcttcgttccggccggggtaatcaccgcttcgagttcacggtggcgaaaatatggcgccgaagagctcggcgttaggctcaaacccggaagtccggcacgcccagtcgaagatagagatccgaactagcaccgacgagctcagctgcggaagttccacatggaagaggcgaaggatctccggcaacaacacgttgcacggaaaccgtagccttgcctcaaaaaagacggcgaacaccaccgtccgattgtcgacaggttttggcactacggctttccctggggcgaaagcctgcccctcaaccaacgccccagagttgacctacttcgccagctcgacgtcgtccgcgagagaaacccccaaaaaggcggtgttgtcgtcatcgactcggccgggatccggccctttcgccgaagcagggtttggtttgcgaggggccatggtgatcggtgcgtttgcagcggcgaagtaagagaatgggcgaaacgcttgaggggtcaagagatgctgtggaagaaagaaacggaggaagagagtgcacgcggtaaaatggcaagtgtggcggtgaaaaggaaagagcggtgggaatatatagctcaccgggcgaccgttcgcctacccaccagtaataaagcgccacgtgtcgcaaaggtaggcgaaacggtaaatttccatcgtccgagcggcacagtaaaaaagtgtcacgaccggaattaacccaacgggcgttccttacgtgcgtgtattattccttgtcccaggaggcaaggtacaccaaaagttgatacatttcagagtttatcaagcggaagcgtaaatagttaatttattacatgggcggcgaaggcccatcacacacaaagacaaacgggaaacagcggaagactagggcgaccaccacaggcgcttgacggcaggcacgagctagacaccaaagccttcatcttccaggggctcctcttctgggtttgggaaaaaaattgagcaagactgagtacaaccaccgtactcaacaagacacatccacaagtgcaggataaatgcaagggagtacaagggggttataatataaagggttagggtttgcagtaaacagcattaaaagacacttagttgctcaaagctattttgtaaacacgattccagagctatacaatattattaatcaaggccgtgaacccacacgaacctgccttaacccaaggcctacgatgattcagaccgaactggcaacccgaccctgggtcccagctcgtcccaagccaacccaggccaaccattccacattttagttgttaagcaggttttaagaattaaaacactaacttgggtacattgctcggcttgcccataaccgagggcgcggctattcgaatagattatactctgatcagaggtgtacatctttacccacaagacacatcttcctcacgtgtaaccacgtgccacataccaccacggtatacggacggaagacgtgacatagtttccaacccatcctagccatagacaagagtaccgacccaaccccacctacggccggaacccccgggacaggtaggcaggactgagcccctagtagcaggacaccggccctgtgccatgacatctcgactaccgggccgcagctcgtgtagccttcatttgtcctagagatgtccatcgacccctgcttcgtccatctccatccgtgtacttttgtttataaccagactgagccacaaactaagccttacccactagacatgtggaagtacggtagtgctttgcaacagaggcccgaagaccggtccttatatggccgaggtgctactatcaaaaccatgcaccccgagcccagcctaaaaccattttgaggattttgaatagagggggaggtgtgaatccaattccacaataatccatccattccaaattgtccaggtgatgagaatattcccaaagtctagagttgtaaaaccacctaatgttgcctaattaaccagcgaagcatctacctaaaatcatactagtggtaccatgagtagagtgtccactagttggggttttgtttagtctagggggaacaaggaaataataacaataacaataataaggtcataacaaaggtaaataggcatggctagataaaacagtgataacgcgggaatttaaataaagcgataatgcaataatttaaatcaacataattttataaactgggattcaatatgttcaaggatgatgtgacttgccttgctcgctttcccaaacgtcggcttcaacttccacgaagagcggatcttccgaagctgcggcgtctacacgaccaacggaaaagaaaatgcttttactctaataaactccatataacaagctggaacaaagcacaaaaatgggttcttgacttcttaaggaaaaattagagacttgaacggtccaattccgagttcaaatggccaagttatggtcatttgaagtttatatgctctttaaatgaataattgtgaatttcttcatttaaattttaattttaaaagggcttattgcgtcagccgaggggagggggcgcgcggaccgggtccacgggagtggggcccacgcggcagccttacggtccacggtggaccgggtgcacccgggctcacaccgaccggcgccgtgggtcccacgcatcagtcgcacccgcgggcgcgggcagctgacggccgagccccacgcggcagccactcggcgcgcccgagggcggccaagccagcgcagccggcgggaggcggcgcccgcgcccctatggtcgccggcggcggccataggcacggcggagcggcggccgagagaggggaagggaagggggaaaagaagcggcggtccacggctcaccctaggtcgacggcgacgacgaaaaaggcagccggagcggaggaaggcggcggcgcggctcgggtcgacggggtcgacggcgttccggcggtcggcgagcgaaacggaggggtggacgaggtcggcgaggatgcggcgaagccgaaggaggcggcgccgaggtgggaggtggtccggggcgacgacggcggcggtccggagctcgacggcgacggcggatagagagagcgacagcgcgagctcgattccggcgaggaggaatggcggcgagaggcggaaacggacggacgaggtgcggngagggtttaaatacggttgaaaggcggagagagcggtcggcggggaaggaataggcgcgggaggtccggccgccatcaatggcgccggcgatatttgcgggggcaaatccgcccgtttgaacgcgagagagagagagggaaaaatgggggaaaagggagaggggatcacggggagtgatttccccctctttatgccacgcggagacggncgggaggctggcgggattcgcggcggcggcggcgctagggcgcgggcgaggcggcgggagcggcgggaggaaggggatgacgggtgggccccacccgtcagcgagggtggcgggcgggcctgcccgtcagcggtgcgcgcgcggggagaggccggatgggccgcggggagaggagagggagggggagggagatgggccgagccggcccaagagggagagggagggaaaggggactttttagagcttttctttttataaaatcattttaactttgtttatttcttaataattattatttgtgctctgaaaattccactaaaatttatttacgcattttaggcttttaggaaatatacaaaaatcctccaagccttatttgacttttaactttgcacattttaattgttggaggctttcacatggattttaattattctaggcataatttagaggatgtattttagagtcgttttggggcgtgacaaaaagcccgcgaaggtaaagcccaatactgttcctttcggcccgggaaaagaaaatatataaaaaatatataatatatatatatatatatatatgtatatatatatatatatatatatatatgaatattccaccaatcgcaggaggtgaagcgcggcaaaataataccagccgcacaaataacaaacttcattcgcaggaataaggttggtttcggcaggagcatcggtcgaaagggggcgccgcataccataccacatggtttgcatggtctcggccgaagctccaatctcacccttgcccgtgaggggcttgttggcggatgacatgaggcccttcgaccaaatctgccgaaacccgtggcgaaaactatggaacaagaacggtgtgaggcgaagagtcgtacgagtgctttgccaggccagaggcgtctcaggcgaagagtgcaaggcgaagactatctgccgaaggaagacgacttcgccatggcaagttcgcctccccccccgagggccgaagaagcctttccggcccatcaagcctaggggctatagggccggtgattgcctgacggcccatcaggggcccatgagcccctataacattatgtacccctgtaaatgtccctttcgtaagggtaatcatgtaaattcccctgtataacctaaaccctagtagtaagaacctgtaatggggctataaatagccccctagggccatgtaacggggggatcccgagtgaaattcaaaatttaatacacttcgtttttccaaccactgttgagtaaccacgtctttcgacgtatgtggttgtcgtttcgacaacagtaccattttatcaaccggcaccacggaagcagcattggtaaggaacctcatctgtaccagattgacaaccggcacgaataaaaacgcgacacatgaaaaaaaatcgggtcgatgaatcggctaccgatcacactactagaaaaagcatttttcccgacgtggggggtctttttttcgcaagcggacatgactctttgagccaaacgaccacctacaaaaatataaatctggttgaagttcgttgtccgcctgcaaaaatctatttttgcatacggactcctgcgaaaatcgtacctacccaaaaaaaatctaagtccttatcttctcttcccaccccctccccaccactccttatcctctcaactctctctctctctccctcaacacttctctccccatgccggtccg

SEQ ID NO: 10829 - DNA, 2102 bp, Oryza sativa
  unsure (1)..(2102): unsure at all n locations
gccgcccgtcgcctcgccggtggccggtgggtttcacgcacaaggacgtcctcacggaggcggcgcgcggaccgtgtcgcgtggcgcgtaagctagaagaattttgtcccaagggtagcaatggcggtgctagcccgaaggctacagtaaagcccagggacacgtgtgagtatctcgaggtcgcccatggcggaggtagcccattggctacagtgaagcccagggggatctcgggagcccatccaaggaactcgaggacaccccaatttcctgaagcgaatctctcgctggaagatatttttcctcgtgtttccccttctggatcgcagaattggatctgggtgaggcgtggagcgacacagccaaacctagggtttccagcgcaagcggaagaaatccgatgatttggtggcttagctcgtcggatctggagagttccggagcggaagtgtgatcaccgatcatttgcccaagtcgtcatggagcggcgtccgccgattcggccggactggcaagctaacaagcgtcaggcgatggagcaaggcggaggtgactgggggatccgcgacgtccgggaggaggagggcctccggcgtccactccccaatcaaccaagggtgaatccaaatgtcaagcctcaaggtcgtcaagctgcggagatggagcgtggggctggtacgatgaagatcaagtgcttcaaatgtggccgtgaaggtcaccaccaggcaaactatactaatccccccctctgttactcttgccacaatactggacacattgcttctcattgcccgctgatttctgctaaaagatgtgttaagctctgtggatttgggatcccagggcaagggttctatagtttgcaagtagagatttctgacgcagaggtggctagagctcctgtgagaggtattttgacagtgattcagggggaagcttctgtgagtaaagtgctagctgaactgaaacacttgtttgtaggtttaacttgggattggaaaattaagcagctaaatgctaaagaatttctcaaaaaattcccttcatatgaagttaggagtcagatttcaacttgcaagagctttgactttgagacatcccagattaaagctagtgtggtggagactggtataactgaagaggctgttgatgaattagtggctgtctgggtgaaaatctatgggattccaaaaatggccagatcagaagactatatcaaatctattgtggagctggttggggagtttgaggctgtagaggttgcaagtatcaggagagatggtccagtaagggtgagagttgcctgtaaggatcctagagagctatatttctctattcatctgtacataaacaaggtgggttacatgattcgttgggaacctaaggggtacttaccttatgagaatagacagaatcctccagatgatgatgacaaagatgataaggatgatgaggggctagaggatgatatgaatctagatgacgaattcaagaatcatgacatctctagaggaagacctcttaaaggcgagggaagccaacatgagagtagagcagagctttttctgctccaccacttacaagggcaaagtcagttctgaacagggaggaagtataaaaatgatagcctctaagaaaacctctcttttgaaacaccctgacttatttgagagttgtacttctttagtgatatggggagacaaaacccaagagatgattgcagagcaggaatcncaagagttggaggcacctgaattgtcccaaaatgagactagacccgagttctcaacactgttagagtttgatgaggatcttgagagatgccaaatccctactgattctgacattgagaggctgagagaagaagaagatagggaggaggaggacagtttccaggaggtctctaacaggaagaaggggaaggctaaaaggactgaacctgcagttcttcaagaatgagcttaagacatagagagttagnctgttgttccttattccaaagagagctaagctcctgacccaaaggaaaaatttggagcaaccaggtaataattctaatccctttgcggtttttcaattattagactctgttgaattgaaaa

SEQ ID NO: 10830 - DNA, 3724 bp, Oryza sativa
tggcggaccgggggaggatgaagggggtggagggtggcgagggagggagtggtgccggggaaggggcggaggggagacgggaggcacgggaggagctggagctcgcgctgtcgctggggcggcgagggtggcatttgccggcagcgcggcgcgagccgccgcccccgcccgcggctatgaggtggacgatgcctcctcattcatgggaccacgacgcagccgggagctcgcgggctgcgacacacgtccctccgcttaggtgtcgcgacatttggcacggagacaatgatgcagggggcgctatagagggcgcggaggagggagacgaggaggacgaggagggagatgaggatggagacagggatctgcagagtaaacggcccaaagtgcgcggcttcggcgagtaagttgcttcgaccgttacttttcctattttgctgttttgcatgcttgtttgttgtgttcagagttttagtggagttttattgctgatctcatgtaaactagtagtttgtagttaaaccctatcacgtcgatattgtaatttggagcaactcatggatgccataagtaagttttttgttctgttcagtgttttagcagagttttattgttgatctcatgtaaactagtagtttgtagttaaaccctgtcatgtttatattgtaacttggaacaactcatggatgccataagtagtttgaagtcgcgttgggagttttttatcaaacacgcttattagaatgaaaataggataagtccaatttactccccagaactataagattggataattaaccccctgaactattaaaaatggttcactttactggttatttacatttcttttctttgtttctctctatatcagtcgtattttaagcttaaattttgtagagccatagatgacacctttatcaaagttttaaaattgtcccaaaatttttcttgactatctgcttgaaatttaaaacctctatgtttaaattagtctcagtgcttccaacctatgtaaacagtgattaaaaaattgaaaaaatgttgagagataagttataatgcatatatcaatcccaccaaattttattgcaaaaatgacctatatagagagaaatgaaaaagagaaatgtcgttacggagtaaggtgaaccattttcaatcgttagggggtgggggggtgtaaaatgagccgaaaatttgtttatggggttagatgctcaggtgaaagtttggggggagttaaatggacttttttcatgaaaataatgagggaaacagtatataattgcacttgtagatgttttattctggttattagaaatactgataccccttggattggtaattgactgctctgcctgtggttgatgcacttgttccctattcccttaaattcatgttagtacgtattttctgctgcagagacagcctacataaacttacttgcctaagtatccttctggaagttttgtaagattaatgtggacatctagtattccttcttttcaccattcttcctttctgaactatgacttgcatcccatttacgtccttcagataataatacagtagatcaatattgattgcagccatgctgccagaatgattggcaatcaattttttgtattactgttttacaattgtgaaagaagcaagatgtttgcctcccccctctctcttttgtgaaagaagcaagaagaggtgctacctcataagtaaaccttgcatagattatctgatattttagtattcacattatgtagattattccaggtagttatatcctacatgattttcatactgttgtaggttagggcttatctttctctgtggttggcaatgggtattgataaccttgttttgctgaacagtagtggtattttctttttatgtggacttggtcatgaagtacttctttttgcttaccactcttcatgtacatagtgagtaaacatattcttcctttttgcagagaaagcccacaacattctggtgtaaatgcttccttctttggcttggaatcaacacatttccctggttctgatgaacatggccatttcaagctctcacactgtccagaaaatgaattagattttggtttgtcgcttttcccaaatgatggtgttaatgagaacccaggggatggcaatgttggtgatgtagaaatctcaggtggagaaaattctgaagatgttgaaataagaatggatctatctgatgatctattgcacctggtgtggcgcttgtttcttttgcacttcctctatatgcaaaatgcttggttgaagtatactaatttgttaaatatgctattacagatattctctttcttgggtcagagggatctatgcaaagaaggtgcctcctgtaaacagtggcgctctgcaagtatgcatgaggacttctggaaatgcttgaagtttgagaatactaggatatctctgcaaaactgtatgtcatttggttggctcttttttattctttttaaatactataattcatatgtgaaattatttaaatgttgtatggatttcaatggcatttaggcgtgagacagccagatagggattgttgacagagatttttcaaactattacccaattatcgtattcttttattacttgcttctttggttacaaggaacacaacttctttacctaatgctacagaggcttggatggatctaagagctttgggatcatgttatctagctctccgaatggacttccatctatgttatacttacatgatgttaatgattagacatactttaactttgctgataaaagtacaaatatagaggtgatgatggagtctggtatcaactgctagaaatttgcatttggctgtagtgaaaaccatcaaacaaatacaattttatttggattgaataaaacatgttgattgaaacccattatttgtgatttataacttctatttactaaaatggaattgttctctgctgttaagctacactaagcatatgttctttttctagcatatacactacaactgtttagtcatatccatttcatgtctgattgtatccctctgaattattactcgatattgctgacatgctttatcaccctgttgttgacatttgcagttgttgacatttgccatcgttaccaaaatgtgacatacctaaatctgtctggtgtcccacatgcagaattactggtgatggaagcgataacatgcttaaggttttcttccgattctatttcattaacctttgatgtgataattttgtcctcgtatttatcaaaaatggcacttttctaggcatctcaagacactaataatgggcaaagggcagctgggagaagcattttttcagttgttgtctgagtgcccattactgactactctgacagttagtgatgcatccctcgggagtggcattcaagaagtaactgttaatcacgatggattacgtgaacttcaaattttgaagtgtcgtgcactcagaatatctgtcaggtaacaagcttgttgcaaatacttcattatatataatatgttcatgtgtcttttgatcttttcaatatatgttgtttatcatccagatgttcccagcttcaaatactctcattgaggcgaactggcatggctcatgtatcactcaactgtccccagttggttgaattggattttcagtcctgccataaactttctgataatgccattcgccaagctgctacagcttgtccgctgttag

SEQ ID NO: 10831 - DNA, 1330 bp, Oryza sativa
aggacccagcccaaaatgaaagagatggaatgaagttcagcaggttggttagtgattccaagacgcctctgtacgctggatgcaaagcaaaatacattaagttgtcagttaccttagacctaatgaagctgaaggcaagtagtagatggacggacaagagtttcacagatcttttaggaattttgaaggctatgcttcctgttgagaacacattgcccgagacgacatccgaagcaaagcaggttctgtgtccactggggttagaggtccgtagaattcacgcttgtccaaacgactgcatattgtaccacaagcaatatgcggacttggatgcttgtcctgtatgcaaggcttctcgatacaagcgaaagaaaagtgctgacgaaggaaagaagtcaaagaggggtggtctagcaaaggttgtgtgttatctacctatcattgatcgtttcaagagaatctttgccaaccccaacgaagcgaagttagtacgttggcacgccacggagagaaagaattacgatatgcttagacacctagcggattcgattgaatggaggaatatcgatcgaaaacacaaagactttgctgccgaccctagaaacatgaggatatgtctgtgtacggatggcatgaatcctttcggtgacatgagtagtactcacaacacttggccagttcttattgcgaactataacttcccgccatggttatgctttaaacggaaatatattatgttgtgcttgttaatccaaggtccgaggcaacccggcaatgatatggatgtattcctggagcctgttatcgacgatctggagattctttggaaagaaggtgtggaaacttgggatgcatatggtcaggagaacttcaagctaagagttctattgttgtgcaccattaatgactaccctgcactcggtaatctttccggacaaactataaaaggaaagaaggcatgctccaattgcaaggaacatacacgaagccggtggctgaagaaatcacgaaagatggtatacatgggtcatcggaggtggctcccgctacgtcatgcatttagaagaaagaagaaaatttttaacggtaagagagaacttcagcctgctcccaaagatttgtccggagatgaggtccacaatatggtcaaggacataagcaatgagtttgggaagaaaagaaaacgtagcaagacaaaggagaagggtatgtggaagaaaaaatccatattttggcggctaccttattggaaagatcttgatgttcgtcattgcattgatctcatgcatgtagaaaagaatgtgtgtgagagtttggttggcctgatgtt

SEQ ID NO: 10832 - DNA, 5382 bp, Oryza sativa
gcgcggctcccctcccctcccctcccagatccggccagagggaggccgggggagggcggcggcggtgaggcgaggcgcggggcgacgacgacgacacgcggggcggcggcggcggcggtgcggctcccctcccctcccagattcggccgaagggaggccggggcagggcggcggcagcggcggcgaggcgaggcgcagggtcggcagggcgccaattttttttgttcgtccagtggattttcgtaggcgggtgattgtgctgcctgcgaaaatcatcaattttcacagtcattggtatacaggtgatccttctcccgtctgggaaaactacttttggccgcctacaaaaatgtttttttatagtagtgttactcccaataccattgccccccaatttctaaaaggaaaaggtatgaataacacacaccccatcccgcagagctatcgaggtcgatcgaattactccctaattaaacttgaaagccagacactttggttggaccgaaatttatgaaatttcatgattttcggtactttcagactgaagtttttgaaattttaacatattttgattggatttgaataaactttgactaaatttaacaaacatttgagaacatctgaaaattttggtcaatatattgatttgacagtggggtccgaaattaccgaaattgcaatcattggggtgaggtgaccccacctacaggaatcggaaccagggattagagaaagagagaatagaatcaacaaacacgtacgggtcacatccacttatctatctccattatattaagccttctgcatcttcttctgctgctgcggtggtgtggttgttgttgcgagctagacgctatagccgtcgacgctgcattgcttgtatgtcactgtcagtgactgcctcctcagactgaaactaattaaatatagactactataaaactaattatataaatgaaagttaattcgcgagacaaattttttaagcctaattaatttataattagagaatgtttactatagcatcacatagactaatcatggattaattagactcaatagattcgtctcgtgaattagtccaagattatgaatgggttttattaatagtctacgtttaatatttataattagtgtccaaacatccgatgtgatagggatctggtctaatggcgattgcccaatccaccgcacctggacggttcgttcacacgcagcttacacgatcagggccctgtgtggaagattagcccagggctaatgttgagagctaatatttagtcatgaattggtaggctaaacattagcctagggtggtatgtttggatccatgggctaattcaaggctaaaagttggagagagagtagaaaaagaggagagagaaggagaaagagaactgctttttgatggtccccacacaaaattagccccatttgcaccccttggaggagctaatgttttgaggagggttaattcacattagctcaaaattagccctactgtttagattcttgagggaatgagggctaatttgaggctaaaaggtaagggctaaacattagcccatggaatcaaacagggcccaggtctaatcggctgcttgaggtggaggtgagaggaagttggtttggggaggcggaccagtttgcctagctagacttttggggaggagacgccgagcacgaggatctatgcaccgacgtcgccagtgatgcgacccgagcagcacgagggcatcggcctcggagcacgttgaagcggccgacgatgatgcgggtccggtttcggcgccaccgcatctagatcaggtctctctgcggcggaagcagttagcatggcgggggtgatggccatccgggcgagctccacctctgctgccggccacccgggcgagctccgcctcagccaccggtcgcctgagcgcacgcgagagatagagcaagggctggggagggattgggttgagggggatggttgactggtggcctccgggaggatggtaccacgtatgcaagctcagatcaaaacggctcaaaacagtgtttagaggggttatttatccagtatgaagagttaaagagtggaaaatgtatggtatttgagtttagggggtaattcggtcgaccgcgatagttcaggagataattcatactttttccttcctaaaataaacatgattcccgaatcacaaaatcccaaaaaaaacattcacaaattacaaaatcacaagaactattggagcatggaagcgggagagaaccaccgccaacgccacgtcggggaggggaagtaaccgccgcttgggccggtgtcgtggaggataagggtggcgagcgtgcaggcgacctcgcccttttcagagtaggggttggaggcggagacttgcgcccagtgataggaggaagggatgggggattgtaactctggactataggaccgtacatataatatctggactaccatttatccagatttattgtcttaaaagaggtcatatcccctcctaggattagttttttttggatggagggagtagctaatactaaatgacaaacccacctgggaaactgttttaaacactcgggtggatctagacgtcgatccacccgagtcttgcatatcatctaaataattatgaaaaattttcaaaaaaattaacatgataggttaatatgtaatatatcatttcacaaacatgcaagttcaaattctacttctacaagttataaaaaaataacaaatttaactgtgaatatatgtatactagttagagcttaatttgctatttttttacaacttataaaagtcaaatttaaacttgcatgtttatgaagtgatatattacatattaaatctattggcaaaatttgctataggacactcaaaaaatatgtaattagtcatgatacaccacaaaaatatgaattggctataggacaccacaaaagagtggtaattagtcggaggtggcagctcggcacgggcagctacggtggaccaagaaaaggggcagtgtggccaggcgacacgtccacccgagatataaaaatctatcttcaaacctacctagctaattctttagtttgtctacttgcatggttgttgtaaagtcattgtcaatagaaagtaaaataaggtcaaaacccagctatctgccagttaaccttatactatatgcaatcggggaatgatgttgcgcattagttaacttgtctccaattgttttccaaaatcatgcgagttagccgcccttaactaacgatcacgacgttgacttcaatccacatatatatatatatatatatgtatgtatatatatatatatatgtatgtatatatatatatatatatatatgtatgtatatatatatatatatatatatgtatatatatatatatatatgtatatatatgtatgtatatattgtatatatatatatatgtatgtatatatgtatatatgtatgtatatatatatatatatgtatgtatatatgtatatatgtatgtatatatatatatatatatacatgcagtgacacttcatcgaggtatcgtactatcgtagtagtaagtacatattcttctgtttcatgaaacagagggagtacagtgtatcgttattacatcttctccttccaaaggcaaattaaatcatggcgccatcgctgctcgcgccacggctagccgtgcccttgctcctcgtactcgcggcagcggcggcggcagatggcgtcgccgacgccggcgccggcgccggcatgacgcacctccacttcttcttccacgaggtgttcacggccggcccgaacggcacgacggcgacggttgctccgccggcgcgcagcggcgacgggagctccttggggttcgtcggcgtggtggacgacatgctccgggagggcgcggacccggcgtcgcgcctcgtggggcgcgcgcagggggtcaccgccggcacgtcgctcgccgccgccgacggcgcgggcgcgatcacgacgatgctgagcctggcgttcacggaggagggcccgtacgccgggagcacgctgcaggtgttcggccgcgcggtgctgggcacggtgatggagcggccggtggtgggcggcacgggcaagttccggatggcgcggggtcacacgctcagccggcgcgtgaactcgtcggaccccgacaacctcctcgtcatcgagtacgacgcctacgtcaccacgtctcccatttagctagctagctatagcctagctaccatggatgggtagctttgatttgtgatcgatcttgtaatgtggtttttttcttgatcatattctaaataaacaaaatcgtgtgttttgtgatatctgcataaacaaattcaatgttgtatgcgtctatcttgtgaatggctactctacgatcgccggtaagcttgttagcttgcagggcatgccaagctaagatagataatttgaacaatagattaatcatctaatgactaaaacaattgatgcaacataaactaagtgaaaatgaactatataaatatatacgatattataaaagatgatggagagatatattgaaatattatatgaattaattatgtgtgatgatttaacatgcttacattttaaatctttaaactttaataaattattaaattatagataatatagtatatttgcatgatgattaaatgtaaaaattattagtgaatgatgatgtggcatctctgtatgttactaatatttaataattggtgggctatactttacactttacagtaagagagtaagagaggatatgtggggaacacaaaccaaataagagccaaactagttcccaagacgtaataccgtatttaaagtttagcaccacacaattattttttatcaacatttaaaatgagttgctaagcacccctcaaatagctaagccaacaagcacaccggccaaatagttaagatagggatcatttgccatttgccacatgagcaataatgtgggttgcacatgtacgttcagcttcatctagagattttttttttcttcagattgtagccattgcgattgacctttgctgctatccatggcattagagatctcctgtgtaatgagtaaggttgctaagcaaacaatactaaatggttatttaaattatgacaaaattgtgttaaggataattcatcacctgtaaaaccgttcacattgctagagttttctgacactgtagatgaagaaggcgaggcacttcctccgtttttcgatatctgatcatccatagaaagttcaaggggatgttctatgctaataaaccgtccgccttttcctctatgcctcaattttgcttgcttttggcgagcctcaacaaggatcctctaaataaataaatgttatataac

SEQ ID NO: 10833 - DNA, 1549 bp, Oryza sativa
ccctaataagccgttttggcttattaaaaaaaagcgaaacgatgggtgcctaaaataatagctagtagtttatttttgggctagcaatttgatttgttcaggaaccctcgtttgtaacttttaggaactctgatttgtcagataaccctccttacaaacatctatgaactgttttattgtggtcgtcccgtaagatagggtgagtgattttgcaaaatggattgtggataaaacgaatgaaagtaatttttttctctgtttatctatcaattccttctgacactggcatcttttaggttggtcttgaatccctaaaccttggaatatgtccaaaattaagtgatcttcacattgaggccccaaagatgtctctattggagctgaagggttgtggtgttctttcccaggcatcaataaattgccctcgcttgacatccttagatgcctcattctgcaggttgtgtcatccttcatatttttcttctaaacatcactgactggtgctaactagctattttgtgtcttcaggaaactaatggatgattcactgtctcaaacagcagaggcgtgcccgctaattgaaaatcttatcctgtcatcatgtgtatcaattgacctcaatggattgtcctctttgcattgccttcataagctggccttgcttgacctgtcatacacatttttgaccaacttgaagcctgtttttgacagttgcccacagttaaaggtgtgtgtggttagtttgttgtactatttaaatcatttttttagtacatgtcacatagcaaatgaaaaaccttggcccagtatgtttactatgtgattttaacatatcactgctggtctgctgcatattttagaattgttgtgttctgtaatactgtttgaaaatacttgcgatgaacttatacaatgtattgcatttatttattggggtgtctgtagcagttcattttcatgctatctttcaaaaattctttattttgaggtttattctacgagaaccattggaaatacatattttaatgaatcattgaaatggctattttctgaccttatgcactcctattggcagatcttaaaactttcggcttgcaagtatctcagtgattcatcattagatgccctatacagagagggtgctcttcctatgttggttgagctagatctgtcctactcatccattgggcagactgcaatcgaggagcttctttcatgttgtacaaatttggttaatgtgaatctgaatggatgcacaaacctgcatcagttggtgtgtgggtcagatgactgcagttctggtgacatgcctgttgatgtttgtccacctgattcagcaccagtgaggagtgaagagatcagtgaaaggtctgatcgtctgcttgaagttctgaattgtactggttgtccaaatattaagaaagtcatcatcccttcaatgacaacctatctacgcctgtctaaaatcaatcttaatctgtccacaaatgtaaaggaagtggatttgacatgctccaatctttatactttgaacctgaggtattatcat

SEQ ID NO: 10834 - DNA, 1269 bp, Oryza sativa
tgtctaagcatatcgtaattctttctctccgtggcgtgccaacgtactaacttcgcttcgttggggttggcaaagattctcttgaaacgatcaatgataggtagataacacacaacctttgctagaccacccctctttgacttctttccttcgtcagcacttttctttcgcttgtatcgagaagccttgcagacaggacaagcatccaagtccgcatattgcttgtggtacaatatgcagtcgtttggacaagcgtgaattctacggacctctaaccccagtggacacagaacctgctttgcttcgtatgtcgtctcgggcaatgtgttctcaacaggaagcatagccttcaaaattcctaaaagatctgtgaaactcttgtccgtccatctactacttgccttcagcttcattaggtctaaggtaactgacaacttagtgtattttgctttgcatccagcgtacagaggcgtctcggaatcactaaccaacctgctgaacttcattccatctctctcattctgggctgggtcctcaacgtcacgtaacatgtcttgcagcaaatcgtgatccacatcaaccatttcaccgccaaatggagaaggtataaacatgtcatgctcatcttcatcttcctgattatgcgcaccacttctgtctgctgctgctccacttcctgattcttgctctccatgcttcacccaacatgtatagcccttcatgaatcctcgttgtatcagatgactatgtacgtcctctccgctatcaaatatattctcattcttgcaatctgcacatggacaacacatgtaatcactgtttcttcttttctgatcctcatccgcggcgttcataaaatttattacgccctttctatactccgtagaatgacgtttacatccaacttcgatcaattgctacaaaataaaaaaaacaaattacatgcacatcttataagatcagtaatgctaaagtaagacgtgatgaaattgctcaattaatgattaatattactcacttgattgatccattttgatcacttttgggaattttctgttttccttggaaaaagacaaaaaatcgccccctacagcctcccaccaaaatagtgaacagtgagatacatttacactaggtggtggggggtatttatactgtgcgacaaatatatgtaacggccctaaaataatcaaccgtgacaggcatacaagtaatctctatcgggccttaataaaagcccgtcaaaaagagtgtcatctgtgacgggca

SEQ ID NO: 10835 - DNA, 1052 bp, Oryza sativa
tagcttggtctctgaatatggtttctttgtttatttcatgtgtaggtgactcgatgcctcgggagagtatttgcggtgatggaccgggagtcggcttggggataagacgacgtccgtggtggtcaaagatcatgcgggatacttaggctagagttgatgcacgtggttggtgaagattatatatggcatacgatagaggtattgtgtgcgtatgggatgcggagtcgaatttggaaggagtccaaattttggtatgattggttatgtaaagtttgtttcttgtactagagggtttcctaaggcgtttaggactcctagtatgagtttagttcgtggctttaggctgcttacctcgggtataaatagagggggagcgtgaggcttcctggtattgcttttgagagcaattgagttgagttttgagttagggtttcaagtttagtcgaaatttttgtaaggagtgctgttggtgcactttgtaaacacagagagaatcaataaagtcgtcatccactttaagaattcttcgatttgtgtttcaccgggtttcggtggtctaaccggcgacccaccggcggttagaacgacggcatcgcggcggtcagaccggcaggtgcaaggcggtcagaccggtgtcggcaacaggcgacaggagctgatctcggcggtcagactggggggatccgatcttgagtcgaccgacggcaaccaggcggtcagaccggcaggacaatctcggtcacaccgcgatccgtcgaattagagggtaacttttattcccgctaaaagttttcggtttttgggtataccaaccattcacccccccctctggttggcttagttattgtgattcgatcctacactaaaggcaaaaatcagatatgtttccaacggatggcttagatttcggccgagttagggtttcagccgcccttgggcctaaaaaacgcctggaagggctagtgtgtgaggagcccctttgagttcctttggtggctcctgtgctttgtgcgtgagagaatgcctttagggctttggcctttgggcgagtt

SEQ ID NO: 10836 - DNA, 2498 bp, Oryza sativa
  unsure (1)..(2498): unsure at all n locations
aacatggaagacgcaacgacgacgatggttgtggtgatgccgtcgatcaacaacaacgacaaagtcgacgaacaagacgcggtgctgccgccaccggttgcggttgcaggtggcggtccccaacagcagccgctaaccatgcatccccggctgttaatggctgcgcgcaacggcgatcacaaggcgcttatgaggtgcagcggcggccaccacatcacatcatccatatgcacgagggagctcctgcaccacctagcgctcatgtagttgatgaagaaggtcgacaagaagtttcagtggaagacgatgcagatggtcatcagcgttcaaagtgcactgatggagtccctgcagcgccgcaagcatctgcggccgatgttgaagaagactctgttcatcatgaaaacatcagcaagctaatctcaggtatagcattcatctggattaattatctgggctaagagttttcagcaatttatttttcccctgcctctctagtgtacaatacaggtcaaaacaatttgacgaggttaaatatatataggtataacaatttgattcatacctatagctaccaacanaacaattcaaattcaactttatttcacaatccatttggatactatatatatacctagagtcaaaatatgactaaacacatacagatttagttcaaacttgtttgaactagtttgccaagaagttaatgctcgtactttaacatttcatactcatttgaattgagtatatactcaatttcaatcttggtgctcgggcaccatggtgccccagttaattttaatatatatatatatatcctatatatacaagtttttcgtgtacaccaactagcaaatatcacgaaaattctaaaaaaaattcggcatttactcctaatagtattacacatatatacaaggaaaaagtccaaaatacacctctaaactgtagatagaagtccgtatatcactttgaactgtaaaaccgttcatattacccctaaggtggttttgtatatatatagtggttttatctaatttgtatataacttggatgagtttgatcatgtgacatacacattaaacatatatatatataacccttcacttaaatctttctttgtaattacttgttagctctcatttataaataagtaccaacataataaaagcatggtatcattgtataagtataaattaatgacttataattgatgatatgcaaacatgctatattagttatttaaaattgttcgtttaagcttgtaaaatatgcaaaaccactatccaaaacaacccttaggggtaatatgaacgggtttgaaaagtccagcgggttaaatatccagtttaaaggttaagatgctagctgcactttcctccaaagtttatggggggtatttggactttttcattcaaatttattatattttagccaaaaaaatggtgaaaaatctaacggttttaaagataaaaaatgttagaattttgtgtttttttgttatggctaaaatataatgaatctgaagataagatttcacacgttggtgtaatactattagaagtatgtgtccaatttttttttaaaaaaaattctatgatatttgttagttggtgtgtacggaaagcttgtgtacatatgatatattcctatatatacacttacgtttcccaaaactgtataaagtctgaaaacagacgttatgcacgcaggtttcgtacctccggctctgggagcgccaattctagatgaagtgactacctacgatggagactccgcgctgcatgtggtggcagcctgtgctgacaccgaggactatttgaagtgtgcaagaatgatatacaacaaggcgagtcgcctattggatgcgatcaacagcgaaatggacactcctctgcactgtgcggttagagcaagtttaatagtatacccaactattagctccaatttatctatagctaatataatagctcattaatacaatagttacatactacactattaatatttggtcctacttattatacacacactgtgtcttggagtctgtgctacagctggctataaatctgtagcccgctattcttctctctcatcatttaactgcttaaaatatatttacagctggcttatagcttgctattatacatgctcttagggctgggaacattggtatggcttcttgcctcatcgagttggcggcaggcgagcagaattatcatcacggtgcacggtggaaggtcaaggatcttctccgaaggatgaataaacatggggagacggtcttacaccgcggcgatccgcaacggtaataaaatgttattggagaagctgatgtcggagggatccagaactagtatgcgtcccaaggatggcacatcaccactagaccttgccattgcattaaggcgttgggaccttgtgttcgaatcggagttgcttgttgcaagttttaagaagttctcttatttcggcccgtgtggacaaaatgtcttcca

SEQ ID NO: 10837 - DNA, 751 bp, Oryza sativa
gcggcgatccgttccacagctcgtatggtgtcttcccaccaatacttttggatgacgacctgttcaggagataaacagctgtgtgactgccttcccccaaaacatacctggcagccctttggctttgagcatgctccgcgccgacccgaccaccgattggttgcaacgttccacgacgccattttgttgcggcgagtagggcgccgtcgtctcgcgtcggactcccagctcggcgcagtaatccgcgaagtggtggaccaggaactctccccccctatccgtgcgaagagcacgtagcttcttgccgctcttgcgttcagccgcggcttggatgcgcttgatggctgccgccgccccatccttggaggggagcagtgacaaccacatgaaacggctgtaatcatcgacgagaaggagaaagtaccggttgccgctcggagttggtggcgagatcgggccgcagaggtcgccgtggagtagttggagcggctccagggagcgctgttgagcctgctgtgggaacggcgtccgacggtgcttgccggcgaggcaagcctcgcaaagctggtcaacttgcgacacagccggaagaccgcgcactagctgctctctgcccatttgccgcagcgcagtgaagttaatgtggccgaaccttgcatgccacttccatgcttcgtcgccgatgcgtgccgtaaggcagaccgggcgcgcgagctcgacgtcgaggacgtagagacgtccaggattgcgg

SEQ ID NO: 10838 - DNA, 2965 bp, Oryza sativa
ggacagcctggtgtcgctgggcgtgctcccccgcctcgtccacgtgctccgcgagggctccgtgggcgcgcagcaggcggccgcggcggcgatctgcagggtgtcgagctcgtcggagatgaagcgcctggtcggcgagcacgggtgcatgccgctgctggtgcggctgctggaggcgaagtcgaacggcgcgcgcgaggtggcggcgcaggcggtggcgagcctgatgagctgcctggcgaacgccagggacatcaagaaggacgagaagagcgtccccaacctggtgcagctgctggagccgagcccccagaacacggccaagaagtacgccatctcctgcctcctcacgctgtcggcgagcaagcgctgcaagaagctgatgatctcgcacggcgccattggctacctcaagaagctctccgagatggacgtcgccggcgccaagaagctgctcgagaagcttgagcgaggcaagctgcgcaacctcttcagtaggaagtaaaaaccgaagcgaacgaccaccagtagcagtaagctagtagccttcctttttgccgtaaactgtataaaaatcccgtgctgtttttcatagcctctatgaagtgtaagtggggtgcagagagcatcggcgtttatctgatctggacataaacccgttgtaatatcgtcgccgtctaattccgctgtgtatggaactctgaatcattgcagtttccgtgtcagtgctaataatcatttgcaatgttcagacataatcatttgcactgtctttgcagttacatgaccacattgtcagtgttcatagcacagaaacacccaagctcttgtaagcagattgcatggttgaagtactgctactaatcactgtcaatggctgcaggtatcttgttataagcagattgctgggtgattatttcagagtaattggggcatgatttggacaagtctcaagcaggtgaccgcaccgcacgcacgcgccaatgatcagtgtactggagtactggtgaatgggtgatgattgtgcaggtaaacgggcgtaatccgcgagtgttacgcggctggtgatcggtccccttcgccttttgctacaggtgacgggcgatcaagtgatcaacacatgcgttgttgatccgggaaaaggggtttgcttggcccagcgagaagacagatgagcgagtgatggctggtgattgagcaccgctgcgtgcgtcgattccgaatgcttgtctcatctgccacggcagtaaaagccaaaggtaaatatacctcatataataaccagagatgtgatatattagtactatcataaatttgtttttcacaatcccacgtatatcaatataaaaccaaaaagacttagaatattcatactctatcaaaatctcaatgcaattattcatcactttgtatactctcaatacaatgattttctactttcacaaactccgatacaataattactctaaaaataatcttattttggaacaaatgaaatgagcttaaaaataaatttatcatgggacaaggaagtaacatttaggtaatatttttttagatgatttattgaaagaatttttgaaaaggcactattttgtcctaaaaaaggtcaattctaactataaacctgaacatacatgtatccaggttagctaagattggattttttttatagggcggtttggtacactgcaagatgtaaaagaaagatttgcaatgtgatcgagtgtagtaaacgtataaaagaggataatatgatatattccctctgttcttaaaatataacaatttttaatattttaagtttgtcccaaataaaacctcttcactgttccattcttaaccagtcacagttttcacaattaaaattctccatcactcttctctcctcaaccatcataaacttattctatttaatttcacgtattttcttaattaatatttgtatccttacctaaaactccttacattttaagagagaggtgatattatgtacttcctttatttcaaaataaacaaactatataggatatgccatatttttattattattatgaatgtttcagggaccacctatacatttgtcgacaaatttttttctaaaaatttgacagatataattatagtacaatcgtagtgtaattacactgtaacttgcatgtaactacagtgtaacttgtatataagtttcacgtaattttgaatcgttagatctattacaatatttgttctagtgaggaagaaaaaaaatcacaacacacacatatgtgaaaggatttgttcccatgacctccattttaccgaaataacatgttacggagagatttttgatagttacatacaagttacattatagttacagtgtaattacatgcaagttgtaatgtaattatactacgattgtactgtaattacatccgtcaaatttttggaagaaaatttgtcgacaaatatatagcaaaattgtttcacaagaactaccacacgtgccgttccatcgaagcctttttagcatctgaactaacccactacgaaatttcagggcccaaaggccagcaaaccgcggggagatctcgtgggctagaagaccgtagctttatccggcccattccagaaaagccctgcaatacgacgtacgcaggtctccgtgccggtgtctgtcctcccgcgacggcggagacgtccggccgccgccggcgaccgaagcttcaccgttttccatcctaacccaccggtaaatcgatgcccttttcctttttcattctaccacccaggttgcttgcccgtttgaaagggctgaatagatgaatggatgatacattttctgaatttgttacaatattttagagtataaaagcatgaattaatacaagtttaaaaggttatcttagaacaacatattacaaacaatatatatatatatatatatatatatatatatatatatatatatatatatatatat

SEQ ID NO: 10839 - DNA, 5230 bp, Oryza sativa
  unsure (1)..(5230): unsure at all n locations
gtatagttaagagcaggtgagccattctcactgcattattgtcccgtgacatgagctgcagtgtttttcttgtggatccactttgtgcattcaaatcccatgccatgtagcctcaggtgcacatggatctcaacaatcctctgttttgtgtagaagcctgctgctgcgtcccgtaattaagctcagattgaattattgatctcctctaccgccaaaatgcgtacaccggtgtttaaatgcgtgcagccggatgtagttgatgcagtctgtattgggtactctgcagtacccggtttgccgtgtgtacaatgtcacgctggacattggttaggccctctttgtttaggcttaggcttattggcctagacttttaagttagcttattggcttatatgatttataagccggtggatttaatgtcctaagtttagtggttgagccatacatctacctcacataagcaaaaaaaagcttctccaacctagcttttggcttaatagtgttagagtggcttatggcttcaaaaaagacaaacggaaaagctgcctgtttgtttaggcttagacttttcgacttataagttgtcttataagcctagccgatggtcctctcctcccccttttttgtgaactgccagcaggtgacctatgataaagagaggtcgatgcatcatgtcctgtttgcatctccatgactccatgcgtatgtacagtttctgcttcaatgctgcaacagataatgatggaagaggtagttggaaatgtcctgttattaacacgctgataatgatatggttattggatcggtgagacctggttggctggttggctcacaaggctcaactgtcaaatgcaggtgatctcaacggtaactgatcgagtgagctcgcgctgcactgcaactgaaagcctggggattgttactgattggcgatggacctggagacagagacagtgacattcgcgtgcaacgtactactcctgcttaacctctggagtagggcatcatcaagcattaatcgcctcctttccaacacgtacaattacccccttggaaatcaatcagctggggcattcagatggataaaatcaagaattgtttggctgaggaatttcacgaagaacaccaaatgtttgtttggattaggagaagtacagtactacgcactatggagactttggacaggaaaacaaggttcgccttggaatggacggcactacggtctacgacaaatctggcgtggcaccatctccgatcagccatttctgaattcaaaaaacacatagccatatgtccgggtgtttttaaggttgtgtttggttcacactgaagtttgaaagtttggttaaaattggtacgatatgatagaaaagttgtgtgtatgaaaggtttgatgtgatggaaagttgaaagtttggaaaaaaaactttggaactaaacagggctgttcacgcaaaaattgaaagtttggttgaaattggaacgatgtgacagaaaagttgaaaatttgtgtgtagaaaaattttgatgtgatgaaaaagttaaaagtttaaagaaaaaaattgtaactaaacagtcgaactgttgaagttatcatcggaatagcagcaaaagcctgaattcaaaaaacccctctagtcctttccactatccgtctctctctgactgcagcggatgtcagccaaaaagccgtaaaaaagtcccctgctggcacgcagacgcagccacgcaagcccggcccaattcaaaatggctgccaccctcaaacggtcggatcccaccagcagccaaagcagcgatccccaccacccgctcccccgatccgacggtccagatcttcccccagaattcaaaacctcgtttgaaacggcggagcacaacgcccatcggggccaatccagctattgagtgagtcctcgtctcctcgggaataaattccgaaactcatccccaacgcgagggcagagggacctgtcgggcagcggctacaactacaagagaggaagagcgaggctgtgaaggaggaggaggaggacggccgcgtggggtgagttggtgtaatgattcaccaatcctctctccatagctgaagcttctcgctatgatgatggccggcgcttgatggtgattagcgtctcgttgatcgcagcagcagcagcagcagcaggaggaggagcggctattcttctcggcgcgctggcgatcggcgtcgcttcgaggagggggagagcggcggccgccggaggcggaggagaaggggaggagcggatcggaggtaactatagccagaccttgccttttcttcccccctcgcgtaattcttttttttgttactactgtctttacgcctcgctttctttctcgctcgtgctcggttggtacgcttccaagctaagcatccgtttctctcgcctccacctttcnggccgccgcctccctttctccgcngtgttcactttacattagatcctctttaactttcttattttttttaaaaaaaaatcaactctcagactgatcgagagatcgatttgagtgagctctagttttgaaaaccacatataagagataggtttccttctctagagtgttcgccggcgatgccaacgccgccggcaacgacacggcacggcggcggttaattccgtagctttggaggggtagaaaagtcacttcacctcacctcaccccaacccacccacccgctccccccaaacagcgccgttactgcgtgcggtccagttgtctagcgaccaccacccaatgacacctgggccccgcacgacagatccccgactttggatgccaaaaacggcggggccccgcaccctcgccacctgtgcgtaatcgagtactagtccgttccgatccgtgggcccgatggtgtgtggcgcttcgggctcggtcggtttgcttgattcggctcatgatgcggtccggccgtgtgaggctgacatggtgggccccacaaacccggtgcgcgcgccatgccaagttgccacgagcccccacgagcttttaatccgtgcggaaaaaagtggttggttgacgcgaaaaggcgccgtgtaatcgccaggtcgcatgcgcggtggccgccactgacgtgtgggccctgcccgtcctttttttcattcttaacctttttttcatttactttcgtagctaaaccatggttaagttgttaattatactaccaataatctcgagtcagtcaaggtggagtctttttggttctttttattttccttcgatgtgcatgcgtggtaggttagggttcatgataaaaatgtgtaaaagcatcctggtggagttatatatggctgcagcttttgacaagaactcggttcgtttacgatacgttcccccacgcaattatttcgccatgattcttctgtgttaagaaagggcgagatctttgggttagaatacaagaaagtcgtgtgaaaattgtgggcgattaaatcttcccctttcgcaaagcttgtcttaagcactcatctttcgctttaaatcgcaatcttttctttcagatcaaagcaaatactaggagaactagctaggtagcccgcgcaattgctagcacccatataaaattatatattttttaatatgattttacttaaaatttatttaatagttatctcgttgtcttgagatttgaaagatcaaatcttatcatcctcgtgtttctaattttataatttttctaatagtataagagttttaatttcagtttttctttaattgtgagaactgcgtcgcatgggccagtctgtttagttgagatgtaacatgcagaatcgaatgctgtagctcacaacagtatacattagttttagtattcaatccacttgttgatttcatccacttttcctttcggttgttctcattcactctccaccaaccttgccaccattctgtccagtcaaaacttgaatttgttaaaccaagcattgataatttgtcagaaaattccgggaattttgaataggactttttgtacccagcacgtcgtttttattctttgtcacgagcatttacttctccggaattcacatttcgatccagagaagaacatcgggctggggcactgtagcagctcatctcagtggggcgaatggttagcggtagctttccaagatcagatttttgattcgttttttaagtaggattccttgcccatgtctgcttctagcttcttctcggctgattgctcttttttcccagatttgtctgcttcgttcttggctgaactgagagtgagcactaatctactccatactccgaacactgcagatcacgaggtgcggtgttgtagcttcgaccgaggaatgagcttgcattgctgtccggcggccggcgacccgccggcgccggccgggacggcggaggagctgctggagcgggcgcggtcgctggtgccggcggcgctggacgcggcgcgcgcggcgaccggcttcggcggccggtggaaggttatcgcggcgaggctggagagggtgccgccgtgcctgtccgacctgtccagccacccgtgcttctccaagaactcgctctgccgcgagcttctgcagtcggtggccgccacgctcgccgaggccgccgagctcggggcgcgctgccgcgagccgccgagggccgggaagctgcagatgcagagtgacctcgacgcgctcgccgggaagctcgacctgaacctccgggattgcgcgctgcttatcaagaccggtgtgctgtccgacgcgaccgtgccaccggtggcgccggcggctgaggcggcggcgcagacggatgtgcgggagctgcttgcgaggcttcagatcgggcacgcggaggcgaagcaccgggcggtggatgggctcctcgacgcgctacgcgaggacgagaagagcgtgctgtcggcgctcggccgcggcaacgtggcggcgctggtgcagctgctgacggcgacggcgcccaagatcagggagaaggcggccaccgtcctctgcttgctggccgagtccggcagctgcgagtgcttgctggtgtcggagggcgcgctgccgccgctcatccggctggtcgagtccggcagcctggtcggccgggagaaggccgtgatcacgctgcagcggctgtccatgtcgcccgacattgcccgcgccatcgtcggccacagcggcgtccgcccgctgatcgacatctgccagaccggggactcctactcgcagtccgcggcggccggcgc

SEQ ID NO: 10840 - DNA, 776 bp, Oryza sativa
caactccttgagctaaatttagtagttggagctctaaaaaaagcccatagtaagcaaaatgagcttcataattccatataaacacatgcatatcagcagcagtctcctcactgaaccaagaaggacactaaagcagtagtctagtctcccggccaagcaagaaccaaaaagcaattaagatcgaactcgagcaaacatgtcgtcgactaacaacagttcaggcgagccgccgccggcggtgcgcgtgctgggcggttgggcgagccccttcacgaaccgcgtggtggtggcgctgaagctgaagggcgtggagcacgagatgttgcaggagacggtggggaagaagagcgagctgctgctccggtccaacccggtgcacaagaagttccccgtgctgctccaccacagcaagcccctccccgagtctctcgtcatcgtcgagtacatcgacgaggtctggccggcctccaatggcggcgccccggccattcttcctcgcgacccccacggccgcgccgtcgagcggttctgggcacggtacgtcgatgacaaggtaagggcatgtcttgcgtaatttttttttgtctctgaacattttcttcttgtttcttggagaatttttgctcttgctttgatgatatttttgcagattctaccagggctttgggttttgagaggatcggtggccggagacaaggaccaaaccgaaggtgaaatgtccacgactttacagcgtctggaggaaggatttgtcaagtgcacccaagggaaggaat

SEQ ID NO: 10841 - DNA, 1655 bp, Oryza sativa
tgtatatattaacgtgtgatatatcactacacatatatacaagttcaaacttaacttctacatttcgcaacgaaaaaaataaattggctgagaatatacgttaactagttgtatttaatttgttttctttgttgcgagctgtagaagttgaattgatcgtgtttttggagtgatatatcatatgttaaaacaacgaggggacgacatcccctcgagagggatcaaaatagtttctgtttcccctactcaggtcaatgtgtgtgcgcacaattatataacggtgtgttctcacgtcagagttgggcgcactaacacaataagccctcacacattttgagcagacatcatatccaaacttactaaaccatttcggctacgatcgagaaagtgcaagcgacggctggcacctggttctggttgtggtgatccatggaggcaaatgctcctgctgtactgcccatggacgccaaactgatggtggccacagcccatggcgactgccagcagctgaaggatgtcgtgaacaaggaggatgctgccatgatggtgctggtgatggcgtcaagcaacggcacgccggcttccgccgcggcggcaagtcctccggtggccatgcatccgctgctgcacgcctcagcttcctccggggattggaagggtgtgaattttcttctcaacagggaagaagcatatgcagattcatctgttcagcccagtaaaaagtttctgaagtccctagaagcatgcatccccggcaactgcaccaacggaaggtgccgacctcgccgcaagcttttaatgacatacaagaaggtgcaaacatgccattgttgttgtctcccgagtcgcttctggagggtgtcaccatcgagggagacactgcgctccatgtggtggccacacatggggatggccacaactacttgaaatgtgttgacacaatctgtgccaagggcaagcacctcctgtttaagccaaacaataaggatgatacacccttgcactgtgctgccagggctgggaatcacgaaatggtcaataagcttattggtctagctattggacctagtagaagggaggaaagtgttgacagcatagcgaataacctgatccttaaaagtgataatctttctacagagacattcttgagcgatgatgtccgtgttgcaaataatcttacagtcggagatagtattagcataagtgaagacaatgtccacaggggagtggaatatctcagaatggaaaatgacagtaatgaaacggccttgcatgcggcaattcgcattggtcatagtcctatagtaacggagctattgacatatgattctgaattggcgctatttccgcaagaaggcacatcaccattgtacctagctatcttgctgaagcaatttgacatcgcgcggacattataccagatgagtagacaaaatattctctcatattctgggccaagtggacaaaatgcattgcatgttgcagttctccgaagcagaggtaatcgacaagttttagatgcccattctatttggttactatgttggctcttttttacttgatgatttggccaatgacacaaacctccgatggacaatcatcattatttttaaactgcatatttataaaaattattacaactataacatatgaaa

SEQ ID NO: 10842 - DNA, 1031 bp, Oryza sativa
atcccgccgggcgtcgagagcgccgaggggctcgcgtccatggcggcgttcgtcaccttcaccgacgccgtgtcgctgctgcggccgcagttcgaggcggccgtcgccgccatgtggcctctggcgagcttcatcgtcgccgacgcgttcctgtactgggtcaacgagtcggcggccgtgctcggcgtccccaagatgtccttcttcggcatctcggcgttcgcgcaggtgatgcgtgagctgagaaaccgccatggcctgtgcgccgttatggagcccggcgacgtcgacgacgacggatacccagcgacgctcgcggtgccggagttcccgcacatcagggtcacgcttgaggatctcatggcgacgttcggcgagccgtcggctgtgaggatgatgatggagctcgacggcaagctggggaaggccatcgaggagagccatggcctgatcatcaacacgttccatggcttagaggctccctatatcaagttctggaatgagcatgtcgggcctagggcctggcccatcggcccgctttgccttgcgcaatcggcatctgcgaccgccgatgcccggccctcttggatggagtggcttgacgagaaggcggctgccggccggcccgtgctgtacattgcgcttgggactctcgcggcaatcccggaggtgcaactcaaggaagttgccgatgggttggagcgggctgatgtgaacttcatatgggcttgtagggccaaaaacattgaccttgggctagggttcgaggagcgtatcaaggataggggcctagttgtaagggagtgggtggatcaactggaaatttttcagcatgagagcgtacgagggtttctcagtcattctggatggactcctgtgctagagagtgtcacaactggtgtaccactagctgtttggcctatgatccccgatcaacctttcaacgcgagattttagtcgacgagccggacattgcgattagggttttaccgattgataggaccatgcggggtttagttccaagggaggag

SEQ ID NO: 10843 - DNA, 1448 bp, Oryza sativa
atcttggataatttgtgtgcagtttcctcgggggactcgcgtgttgagaggaaccgtggccggagaggaaccgtggttgaaatgtccaccgctctgaagcatctggaggaggcatttgtcaagtgcagccaagggaagaaatacttcggcggcgacaaaatcggctacctggacatcgctcttgggtcgttcctcggatggattaaggcggtggagaagttcgccggcgtcgagctccttgacgaggcgaaggttccaaacctggctgcttgggcggatcgcttctgcgcgcatccggccgtggtggacgccatgcctgacgccgataaattggtcgagttcgccgttaagcatgccgcttcgatgaaggctttggatgctcccaagtgatcagcgaattaagcattctcctttgtgttgcatgtactgcattacatcatcggatctggttccataatttttagtgcttaagtaggaaggaaaccgtgttgatgggcgggcattttattttttataataaaaaaacactaaaagaagtattatcttatcatattcatcttatatattcaccataagagtaaattattttataatggtaactaaagaagaagaaaaaataactatgccatgaaataaatcgtagtctttgttatactaaatgataagaatgtctctcaaattttaaacaaaaatcacttagtctcgcttggatgtaaatttcagagaattagtagatccattataacctactcattccgttttatattataagtcgtttgactttttttctatttaaactttttgaatttgactaagtttagaggaaaatataatactattttaaacacaaaacaaatatattaccaaaatatatcaaatgttagatttaatataactaattcgatattttaaatattgctagattattctataaacttgatcaaacataataaagtttgcctagggaaaaagtcaaacgatttatagtatgaaacggaggggtacccgttaacattttgttaataatttttttaccactgtttacataagatgaaagcacaaattttgaaactttgataatgatgtcatttaaatggcttttttcttaaaatacgactcatataaagagaaatattattgaggacagtaaagtgaatcttttttaaaattttataagtaaaatgagaaaaaaaaatttagatgttaagtgatccaatgaaatagtcgggagattaaaatggaatttttaaataattaaaaaaaatccccaatgcctgcaaatcgttttcaaataattaattttgtgttcgaccatttgatcccgaattccagccacgaggcttccatcgtcgtctcattttcatgctcattgcttcacctatctaactccaacatttgctccactgttaatttttgttcttaaattgctcgatgttcatgtggtacac

SEQ ID NO: 10844 - DNA, 6627 bp, Oryza sativa
gagatagttttctcgctaggcaccacgacggaacgggcgctacagaccaacccccctgacaagaatctcgcccccgagattcagcacctaagggagcagctccgggaactcggcgcggaggagatcttctcgttcccaggttgcctcgtcttcagaatgattgctccattggaccttgtagaacttgatggtcttccttcgagtctgacgttctgcctcttcaagaaccttgatcggtatttccttgtaggtcagattcttttccagttcgatattatccaggggaacttgttcttctggaacacggagacacttcttcaactgagacacgtggaacacgttgagtacatctgcgagactttcaggtaactcaagctgataagccacttcgccacgtctagcggttatgaggtaggggccgatgtagcggggtgctaacttgccggacatcccaaacctcctcataccacggagaggtgatacccgcaggtacacgtggtctcctttttcgaactcaaggtcacgcctccgattgtcagcgtaattcttctaacggttctgagctgtctttaaatgttctcgaatcagcttaacttgttcttctgctgccttgagtatgtcaggaccgaataccagtgcttcgcccacctcattccagcacaagggagtgcggcactttcttccaaacattgtctcattcggcgacatctgaatgctggcctgataactgttgttgtatgaaaactcagcatacggcaaacaacgatcccaagtgccttcgaaatctagggcacacgcacgtagcatgtcttctaggatttggtttaccctttctgtctgaccatcggtctgtggatggtaagctgtactaaaatttagattggttccgagagcttcatgcaactgcttccagaaccttgaggtgaactgagtgcctcggtctgacacaatctttttggggcagccaaatctacatacgacatgggtcatgtagagttctgctagcttctttccatcaaaggtggttttcactggcacgaaatgagctgatttcgtgagtcgatccacgattacctagatggagtcgtacccgctaggggttgttggcaagccggtgatgaaatccattccgatctcttcccatttccactcgggaatcggtaggggttgcagcagaccagctggcctctgatgctctgccttgactctctggcaaatgtcacacagggctacgtattctgcgacatctcgcttcattcccgcccaccagaagtatgccttgatatcctggtacatcttcgtacttcctggatgaatggagtaggcggactcatgagcttcctttagaatgagatttcttaactccttcttggccggtacacagatgcgtggaccgcaccaaactgtgccttgatcgtctatggagaaatcggtgtccttcttctcctgtattctttttattaattcttttatcccttcatcatctttctgagcttcccggatttgcgattctagggtaggctgcactgtcaagctggcagggacacctgactgtaccacggtcagctttaacttctccaattctctgcacaggcgatcttgggctggccatatttgagcttcattgcaataggtcttgcgacttagcgcatccgcgaccacattagctttaccgggatggtaatgaattccaaggtcgtaatccttgattagttccaaccatcttctctgcctcatatttaactcggtctgtgtgaagatatacttaagacttttgtgatcggtgtatacttcacatctattcccgattaaatagtgcctccagatcttaagagcatgaaccacggctgccaactcgagatcatgggtaggatagttgacttcatgaggcctgagctgcctggatgcataggccacaacctttcgttcttgcattaggacacatcctaagccttgtcttgatgcatcacagaagatctcgaaatcttttcggatatctggcaaggtgagaactgggacagtggtcaaccttttcttcatttcttgaaagccgtcttcacaggctgctgtccattcaaatttcttttccttctttaacagctcggtcataggtctggctagcttagagaatccttcaatgaatattcgataatatccagctaagccaaggaagttgcggatctctgacacattcttgggcgggttccaagcaagtacagcttcaaccttgctgggatctacttcgacaccgttggaggagatcacgtgtcccagaaatgctactcagtccaaccagaattcgcattttgagaacttagcgaatagttgatgatccctgagctttcccattatcagcctcaggtgttcagcatgttcttcctcattcttggagtatatcaggatgtcatcgatgaataccacgacaaactggtccaggtattccacgaagattttgttcattaagttcatgaagaatgctggagcattggtgagtccgaaggacatcactgtgaactcatatagaccataacgcgtcgagaaagcggtcttcgggatatcttcagatctgattttcaattggcggtaacctgatctcaggtcaattttagagaaaactcttgctcctttaagttgatcgaacaaatcgtcaatccgtggcaacgggtacttgttctttatagttacttcattcagggctctatagtcgattaccattctctcagagccatcctttttcttaaccagaagcactggggctccccaaggggatgagctaggtcgcacataacctttactttccaactcttcgatttgtcttttgacttctgctaactcattagctgccattcggtagggtctttttgcaattggtgcagtgcctggtgctagttctatggcgaactgaatctctcggtctggtggcatactcgttaattcttctggaaatacgtcgggatattcacagactatgggcaccgactccaaggaggtgacttgtaaacaggttaggatagaccgacttgcggtaggggcgttagaggtaaagcggacttgctttcctccaggtccttgcaaggtgatggacctttcggcacaatctatctgtcctttgtgcttagccaaccaatccatccctaggatgatgtccaagctttgcgagtctaggactatcggtttggctaggaagtcaacttcctcaattctaaggttaactcccgggcatatttgagttgcccttatattccttccaggggaatgtactatcattggtacacgtaaattttgggttttccaaccatttcttttcacaaaagcttgtgatatgaaagaatgggaagctcctgaatcaaacagaactattgcgggtacggagttgacaaagaacatacccatcacaacgtctggagcatcctgagctgtctcagcttgaatgtggttcacccggcctcgaccaaagttgttggaagcacgagaaccttgtccacttgcctgagagctaggtcgagactgagctgccgctggagtacgagttctggcagtgctgccattagcatgccctgagttggtgttggtaggattctgagggcactgtctggcatagtgacccatctggttgcaccggaaacactgaactgctgacagtcctagcggtgacttgaaagaggtaacactgtttggtgcagtattgccacttggggtatgttgctgtggctgaggtgccggacggttcatctgaggacgaggggcgtagcccggctggcggttagcctgagtgactgactggtgatattgcatgggttgaccatagcgagggtgaggtgcgcctagggaagaattcccctgatggttagacttgcgtttcttatattcttcggtagcctcttttctagcatcctcaagtagaagtgtcttgttgatcatatgttgaaaagtggggaagtcatgagcaagcaactggagtctcattccaactgcaattcccttcaagaacttcctgatcttcttcttgtctgtgtccacttcctcaggggcataccgagccaacttgttgaactgacttaggtactcattgacaccgttgttgccttgcttaagcctgttaaattcctctttcttcatatcaatggcgctttcaggcacatgagctgcgcggaaagccatagcaaactcaccccaagcaatgttagtgggttcagggtgtgcattgcagtaattctcccaccaatctgcagcaggtcctcttagctggtgagaggcgtagagcgtcttctcaacaggagtacattgcactaagttgagttttctatcaacatctttcagccaatcgtcagcctcgatgggctcgatggtctgagagaactctggcggacgagacctcagaaagtctgtcagcttggatctattgttgcccatgtgagggtggccatttccatgtgcattatgctgaaagccggctatggctgcggctaatccttgcaagatttgtgtctgtactgccatcaagtgctgcatgttgttttccacatgaggtggggaagggatgcgttcttctccagaattgtgactggcagtgcggtgagagcggtgagactgttccacttctgtattacgggaagctgtgtgatgcgagcgattgctgcggtggggttgctcaacttctgcattgcgggaagcagtacggtgcgaacggttgctctggtgagactgctcattagctgactcatgatttgcttctggctcaactctaccttcctcaaaaccgaagcaggctggtgtacgagcagcacggtgggggtggctagccatctaaactcccagaagagggcgaggtaagaattagataagcacttaggagggcaaggagcaaagtaaataacaactcagatagcacgcactaggcataaactggatttttcaaatcataaaaacacctgatacaacgggtgtggacaagtcacagagctacgccgagcttgactgtacgcacaccacctagaagaaccagactaccaaacaacacccacatcaaacacacgcacgcactacctcgccacgactccaaaagagttggcggcggaacaaaagggcctaacacacggacggctgctgaagactgcctcctctactcctcgtctgcctggctgcctcctgtagtcggctcctcagtcgaagaaacgtcgatcggctgacgcgaagggaccggcggaacctgtcgagggcccccaacagcacgggccgctagcggtgggggagctgggtagtcgaagcagaacacggtggaagaaccaacaacacgcttccgcgcagtgcggataaagcgtgggccacggcgggaggaagcaactggggtgtgtccgggggtgtaggaggggctaactgggtgtgggtagggggagtacacttgtgagtacggcgcacgcgagctgggggagcgcgggccactgggagtgcgggcagagccgcgagagctgtgggaggacaggtggctggcgtggcagaggcggcctgagtcccaagagacagtgtcaactgaggtgacaccctcctcggccagatgggcctccagagcggcgtagcggcgggcaagggagcagtaagcctcgaggagtaggttgtgctgagtggcctgagcctccgaaagctcaaccatgcgagtcagcactggctgagactcgttgtacggacaagggtacctggcgtctgcgtggctagaaggaaggtgtgggagctgccggaaggcagagcccccaagacggtggctgtagtcgtgggccaaacgacaaagcgcagtccaggagaggtcctggtacgcgatctggagagtgggcctggccatagtgaagtggtgtgggcgaaggccagctccgtgtatacctccacgagggtaaaggtacacagagagctcacagcgagggggaacacggtccacggagtaccccgtgtactcgggacatgagaagccaaggaagcgggcgaggtcacgaagctgagcgacgtggtgaccctcaccaaaaccgtgggaactgaagctggcgttcactgccatctacaattttgaaagagggagaaaagatcagtaaccattttagcaacactactgaaaataaagaaaccaaaagaagccttagcttttcgcaagtagttttgaacttagtatccttagggtcgtcctaaacgtcgggtttcgccctagggccaagcctgtgctctgataccatctcttgtcacgccccgaactagtcccgagcggaactagcccgtgacgctccaaattaacctgttaatcgataccagtcccaggaaacagtgctggtatcacaggaagacagaatatcacagcaaacagaggtatctttattatagagtaggagtacagtcatgttgggctgcggacagatcccgagctcacaactgcatttcaaaagggaagcggaagccaagacttggaccaaacatcacaggcgcgacttgggaactaggccgaaaccctaaaactcatcgtagccggcttgctcttggaagaactcctcgtcagcgggatccgcttcatcttcttcagcaactgggggggattatttatatagagcaagggtgagtacgggagtactcagcaagccatgggaatta

SEQ ID NO: 10845 - DNA, 5003 bp, Oryza sativa
tgaggctgcgcgtgggcccgccacaaccgcacccaccgcgagccgcgcgcgtgcaccgcgtccctcccccaaaccctagcacgcaccgcgtgctccctccgcacggtgaaccgtgtcaccgacaagcgggtcctactcgggaccacgcgaggtgagcctggcccaccggctccctctctcctcctctcctgcgcgtgccttgggccaccttctcgggccggccggcccattaagctcggccgagccgcccctttctctcgagccgcgccctagccgcccgaaggaagtatgtttcccctccctcttttctctttttcaaaagggtttaattaaatcatttttcctttagaccaaaaatccaataatcttagaaattcaatatcttctcaatcgtatgtccgtttgactccgttcaacttccaaaattcctcaaatctcgagatctgtttaatggcacgtttagaggtcaataatagggctttatttttgccgtttgttgagtagtcccatttcgcgtgtagtttcggagcccgaagacccgcagtgcgaggatttcgaggatcaagcaaaagatctcgagcaaggcaagtcacctttgatcatcttgcacctataatttaaatctaagtatttcttttccgcaaatattgcatgaataggatttacacaagtaattcggccgcggcttgcgagatagctgtcacgccccgaactagtcccgagcggaactagcccgtgacgctccaaattaacctgttaatcgataccagtcccaggaaacagcgctggtatcacaggaagacagaatatcacagcaacagaggtatctttattatagagtaggagtatagtcatgttaggctgcggacagatcccgagctcacaactgcatttcaaaagggaagcggaagccaagacttggaccaaacatcacaggcgtgacttgggaactaggccgaaaccctaaaactcatcgtagccggcttgctcttggaagaactcctcgtcagcgggatccgcttcatcttcttcagcaactgggggggggattatttatatagagcaagggtgagtacgggagtactcagcaagccatgggaattaagtgtttaatgcaggcttcaaggaaaggctgttgtttttgcaattgattttatttaaactcttttctgaaacaactaagtgagtgcttctcagacgacacggatgagacagtgcgtctcgtccggtcagagtatgtgcaatgtatcagtcttttgaattgatcaggattggcacccggccaacagctttcaaacggccacccgggcctggctgatcccatcagccgcagattttccaaacatcaatcccaaaccacatcagtaaattcacaaagcagtagtcaaacaaaactacgctaggaatcaccttacatccgcccatgaccgtgggcacagctgttcgaacagtttaataacctttgcagagggggtacactttacccacacgacattactaacccggatcatccagcccgtgcagaacggccacgactagagaccttaaggctttcatgacaaggcatttcgaaagccgacacaggttcaccatatgctgatgagaggggtcccagaccaacaacaggttaggtcccagaccatactgtgccaggaagcccaggggtcctccccgacaccaccccggcgaatccacttgtctctcagcatcaaggctcccctgattagctaattactcagccaggggtgtcccattccacccatgtggtcgtacttgtcttatgttcagatgaaattccaaggaaacggtccttaagtgcaagagcgggaaaccatacacccggtacgttccccggtccgcgattttggaaattcatttaggttcgcaagcaccgacccaggtgtcaggttttccaagtgttttgtaaaacccaagttttacccaagatgtttctctgattttaagtttgaaggcgaccgtcgatactcgtgccgagtgcacaattaccgaggcgcaactaggtggttacaagggaacatgatataacaattacaatggaagggtcagatgtaacaagttaggtaggtccgccaatctgccttgcagacgggacaagcagatttagtgcaatcctatcaatgcataatatttttcaagcaacataattaagttcaaatataggttcaagatgttcaaaggtggcttgcctcgctcgagatcttgagcttgatcctcggaatcctcgcattgcgggtcttcgggctccgaaactacacgcgaaacggaacaactcaacaaacggcaaaaataaagtcctattattgacctctaagcgtgccattaaatggatctcgagatttgaggaattttggaagttgaacggagtcaaacggacttacggttgggaagatattgaatttctaagattattggatttttggtctaaaggaaaaggatttatttaaatcctttttggaaaagaaaagaaaagaaaagaaggagggagggaaattaaactttcctcgggcggctagggcgcggcccgagagaaagggacggctcggccgagcttaatgggccggccggcccaagaaggcggcccaaggcgcgcgcgggcagggaggggagagagagagccggtgggccgggtccatcccgcgtggtcccgggtgggacccgcttgtcggcgactcggctcaccatgagcgaggtgtacgcggggcgtgctagggtttggggagggaggcgcggcgcatgcgcgtggttcgcggaggacacggtgcggcgggcccacgtgcagcctcacggctcgcggtggaccacgcgcgcgagggaggggaaacggagggagcggctggccgggtcagccgatccggtcgtggccgaggtggcgccaacgtggtagccacgcgggccggcgggaggttgaagaagacgtcagccggaacggacggcggacggcggtggcgagcggcggagcgaatcacggcgatacaggcgaaagcgagcacaccgggaagttgcacgggacgaggggagtcgagccaacggctcggatttgccgggggatgctcgatggcggcggattgcggcggcggcaaccggcggagggagaagggggaaacggcgacgaggtcacgagaggccgattcccggcggcgagagcatctacgcggctacgggaatccgttgctagcgtcggattgggcggagctgcgccgagcgaggccggcgacgagcgggcgctacggagcacgggcggcgagcacacagcgggcggcggcaacggtcggggcggcgcctgctagctacggggaggctactcgtgctactacccgagtctaaggggaggagatggaacgaggaaggagaacggagggaggcactaccgtgcgggggtgatggggcgcagtgacgagaggccgacggcacgggagtgatctctccggcctcgggccgggaaagaggaagaagacgagcgcccggagtcttcttccgcgtcctagcgcgcatcggctcctccggcacacgcgacggcggcggttggcgagagggacggcaatggcgcggacgagaaacggggaggattgggagggaaaagaggaagggagggcgcctgggtttaaagggcggcaatgtcggtttggaaaccgactttgggcggtcaaggcgcgagccggcgctcggcgcttgtggccaaggcggcgacaggaggtggatgacgccggcggggaggggaaaaggaaaaagaagggagaaagggagcttgccccttgccactttgggaaaaggaggagggagcgggggcgacgcggcagagggaggaggagctctgcctccgtcccttggaggctagcgcgcggaggtggcggggccgggtcgatgacgacggcgatgacggcggaccggtttggagtggagcggcgacacgggcggcagacgcggggcaggtgcggcaggcgctgacggcggcggcgactggtcggtcagccaccacggcgcgcgcgcgcgcgggcggcgcggcgatttgggcggcaggcgcgggaacggcagcgagaacggagagggaggacttggcgcggctcacggcagagcggagagagagagagagagagagagagagagccggggagggagggggagatgggccgagagggattcggcccatcgaacctgagggaggcaaaatagacttttgcggagggatttgatttgggaagaatttggattcgggattgaacttgacaatagatcggggatttgagatctgagatggcacggtcactagacaacaagcaaagaaacagatttcgcaattagggtttttaagagatagttttcccgctaggcaccacgacggaacgggcgctacaatagcctgccggcccccaatcctaattgctgcaattaccctccttgaattattgaacacttaaacctcctttgtcgactgttgtgcttcgatgcacgggccttcgggcacgcgcatcgggacacctcccctcaaatttaaaatatccaacgatgggtaaaacttggggttttacaaaagacttggaaaaacccgacacctgggtcggtgcttgcgaactaaatgaatttccaaaatcgcggatcggggaacgtaccgggagtgcggtttcccgctcttgcacttaaggaccgttttccttggaatttcatccgaacataaggcaagtgcgaccacatgggtggaataggacaccccctggctgagtaactagctaatcgggggaaccatgatgccaagagacatgtggattcaacggggtggtgccggggagaacccccgggcttcctagcactgtatggtctgggacctaacctgatgtcggtctgggacccctctcgttggcatatggtgaacctgtgtcggctttcgaaatgccttgtcatgaaagcctcaaggtctccagacgtgccgttctgcacgggctgggtgatccgggttagtaatgtcgtgtgggtaaagtgtaccccct

SEQ ID NO: 10846 - DNA, 610 bp, Oryza sativa
tagtggaagtttaacgtacagaaacttggacctttttaatatggcaaaacctttgctatgcttgtacttaaaaagtattaatacttattttccttttgctaagttcttggttatcagtttttatggttaatatggcttgaaataagacctttttttttcttcccatgtatttggacaaacattttcagattagtgatgcctttctcatatccccccaaaatgtttcaggttgctaatgcaatggctgctaaagcaaaacttgtgctccgtgaactaaaaacagtaaaagctgatctagcttttgcgaagcagcgatgtgctcagctagaagaggagaacaagttcttgcgagaagcaaagcagaaagggagcaaaactgaagaggatgatgacctggtatgttaatgttttccaagcaagcaaccctggaattattttattctcatgataaagttatcagaactacattcttcttgatggtgaatttgtgatgactcatcccaaaactctggctatgaccattgaaaagtgtgaaatttcttctttcccttgcatttctggacaattttgaaaaagatatgcaaattttgcagtacgttgcacaatgtgg

SEQ ID NO: 10847 - DNA, 3872 bp, Oryza sativa
atctccctctctataatctctctctcttccttccttagggcaccccgaaacccgtccgccggttgctgtcgtcctaccgtggcttgccgtcgacgttcgccgtagtcttcctctgcgccggccaccctcggtgaggtttcctctcccatccattcccttccctctccttcctagccgccgcttggcgccgccgccttcgcgtcgcctttgcgccgtagcgtccgccgccggttgccgtcgccggcaacgcgttcgcgcgtgcgcgctgtcgtcttcgccgcggccggtaggccgagcttgagccaagccgagccgggtcgccgccgcccgtccgatcgaccccaagggcgatctgggccgtcggtcctgtggaccggcggtggaccacccgcgtggtcccggtccgcggtgaaccgccctcccccttgagtcgctgaccggtgggtcccgcgtgccggcgcccctttcctccctctcccgagccgctgaccggtgggccccgcatgtcggcgccgcgcccccttgatgacgtcagccctgggatttattgcgcaataaatgatttaaggtttttcttttatagtaataaacacagtgaatcttctaaaattcataactaattcatccgagctccgtttaagcccattcaaagtctcagtaaatcaagaaaaatgtgtagaatccattaaaaatggttttgttccctgtttcagtagtcttatagcctgtttgcaatgtttgccttgtatgtcgcgagattccggttccttcgacgctccagtgtacctcgaaatagtcgccgaggttcctccagcagcagagcaaggcaagtcatgcttgtcacttgaacatgttgatcctatattgcaaatgctctattgttttctttcaaatattgcattgttttataatgtgtctatggggtgtctacctattgtcatagccatgctattgttgtaccatgtctctttgtcagcttggggttataacatgactagagattggactagggattgcttagccatgcttagttcaactagtgcacaatggggagaatcctattaatgtttagactgttggttctaatggtattgttggattagtgccaccagtttggtgttggttaattaaaataaatcacatggtgggctgtgggtgcatggttttgctggtcgcacccatggcagttaaggaccggttcgtgggatgccctggaagaacttatcgtacttaccacaagccagcgtgggcaacggctggggttgtagcgtagctttcctctagccgacgcatccaggcaagggtgggcgtgatggagtttggatgggccctgcgacggcctatgcggcttccggattcacctaggcacgagaggggactgcccgctgccttgcgaggagtgggggtgaaacctgaggtatggtgtgcttggttagagggggttgtgcgaagggtcctgtcacggcctctttccggtatgtcgtggtggcatgtcggcgcacggaaacgtgtcgtggggctgtgtcttgtgggtacagttgtacacctctgatcggagtaaaactattcgaatagccgtgcccgcggttatgggcggtcaaccagattcaccgtgattagtctcaccctagtgtaatcttttgaatttggatagtttaggtggatggttgggcctgttgcaacgtgggataacgttggacagtggatagttaatattaattaattattacaactgtttaattctttcaacttctgtttataagtgctcgctttatgcaaatgaaccactttagctctcctttgataattccctgcatcatacccctattccggtatgacttgctgagtacagtgggtagtactcagtcttgctctatttttttcccccaaccccagagtacgagtatgtgtcagatggaggtttctccgaggagtaggcttcgtccgtgccgtcgaggatgcctgtggagtggtgttcccactgcagttctagtcaaggcttagctcctgttgtctttcttttttccgctgcatttatgtaagacttttatgatgtttgtaagacgtggatctgaatgtcaacattgtcgtttgtgtaccccggccggtcctggacggggattttaatgcacattctgcttggaattctattcgggaatttctgggcgtgacatcatggtaccactagtatgattttaggtagatgcttcgctggttaattaggcaacattaggtggttttacaactctagactttgggaatattcatatcacctggacactatggaatggatggattattgtggaattggattcacccctccccctctattcaaaaccctcaaaatggttttaggctgggcttggggtgcatggttttgatagtagcacctcggccatataaggatcggtcttcgggcctctgttgcaaagcactaccgtacttccacatgtctagtgggtaaggcttagtttgtggctcagtctggttataaacaaaagtacacggatggagatggacgaagtcgggggtcgatggacatctctagggcaaatgaaggctacacgagctgcggcccggtagtcgagatgtcatggcacagggccagtgtcctgctgctaggggctcagtcctgcctacctgtccccggggttccggccgtaggtggggttgggtcggtactcttgtctatggctaggatgggttggaaactatgtcacgtcttccgtccgtataccgtggtggtatgtggcacgtggttacacgtgagaaagatgtgtcttgtgggtaaagatgtacacctctgatcagagtataatctattcgaatagctgcaccctcggttatgggcaagccgagcaatgtacccaagttagtgtttttaattcttaaaacctgcttaacaactaaaatgtggaatggtaggcctgagttggcttgggacgagctgggacccagggtcgggttgccagttcggtttgaatcatcgtaggccttgggttaaggcaggttcgtgtgggttcacggccttggttaataatattgtatagctctaggaccgtgtttacaaaatagctttgagcaactaagtgtcttttaatgctgtttactgcaaaccctaaccccttatattataacccccttgtactcccttgcatttattctgcacttatgcgtgtgtcttgttgagtacggtggttgtactcagtcttgctcaatttttctcaaacccagaagaggagcccctggatgatgaaggctttggtgtctagctcgtgcctgccgtcaagcacctgtggtcgtcgccctagtcttcgccgcccatgtaataaagtaactatttacgcttccgcttgataaactctgaaatgtatcaacttttggtgtaccttgcctcctgggacaaggaataatacacgcacgtaaggaacccccgttgggttatttccggtcgtgacattaatccaccttccagcaaggggcatagatttatattggttgcaactgattatttgaccaagtgggtagaggctattcctttgaaaaaggttgatttaggatatgctatacaattcgtcaaggagcacataatctaccgatttggtatttcccagactattacaactgaccagggatcaatctttgtgtccaatgagtttgttcagtttgctgatagtatgggtatcaagttgttgaattcttcttcatattatgcacaagccaatggacaagccgaagcatctaataaaagtttgatcaaattgattaagagaaaaacatctgattatccttggcagtggcatacacgactgaccgaagcattatggtcttatcggatggcttgtcatggatcaattcaagttcctccttat

SEQ ID NO: 10848 - DNA, 4903 bp, Oryza sativa
cttattatcaagcctattaaaaccttttattttggaccctatagcaactaaaagatgtacatatgcacccctaaacaccaccggacccactgtcagcctcttccctctcttttttattccctctgcctcccccctctctctctcccccgagccctctcaccgtcgtcgccctttcttttctcccagtcaacccgccgttgtcgccctctcttttccctctaccttcggtggcagatcagtgtcactcgagctctggcggtggcggatctggcgaaggcggggagcagcggtggcggtggatctggcggcggcaaggagcagcggtggtggtggcggggagcaacggtgagggcggatggcttgacgccgctgtcctcctcacgaccacggcgagatggctcgacgccgccatcctcctccccccacgacggcgcagacgagctcgccgacggcgtggcgagcttggcggcggcgggctcaccggatccgggtgcggggtcgccggatctggcgaggcgacgacgaccacggcgaagcgacgcgagtccggcctccgcaccggcggcggcggatctggcggcgatggggagcagcgacgacgaccacggcgacggcagcggatctggcgaggcgacgtagcggcgacgacgaccacagcgagatggggatttggggtaggtgcacgggagaccggacgaggcgacgctgttaacgaccaaatttggtaatctaagtatcggagataaaaattagattgaagcggaatccaagatcaagattgggaccagatgaggcgacgctattaacgaccaaatttggtaatctaagtatcggagataaagattagattgaagcggaatccaagatcaagattgtttcagaaacagagcaagaatcggctggaatccaaatcggctacgactaggatcggcagagttcgagtcagacagggttagccgattgagccgatcccgacaatacaactcagtgtacgtcatcggattgaattaatgtgcttcgcatggatcaccacacttggattgagtcctgaataggcaattgtatctattaattaggatattttatgtaatttccttagagataagtgtgggcaaatgtctgccgcaaagatttatggtatgttagagtttgttagagataagagtcgtgtccgacaaggacatattgtgtaatctcgggtataaatagaccccgagccccatgtaatacaacaacagacgttcaacaacaatctcggcgcatcgccacccttttactttcattttgtttcgacgagttcttgctttcaggttgagctgcatcggtttcgatcttcaactagaggtaaaacttgttatggcggcttgcgttctcgggattagtgcttccatctttatgatactctaatcttgtttatgtaagttgtcgagttatcatgtatcttatataatctccgacaatatcgttatctaacctccaatcggctaatatctatcgttaggaagcagccgattaggttaaatatcgacgttggcttagattatataggatatctaccactctatgaagcttccaatagcttgattgtctagatattgtctttctttttatacttatggctgcattagttgagtttgatctcataagtcgtgtttagaactatagtctcaagcctgcttcttggttgctgattagagtagcatcgagctttcagccgatcttacctgatttacctttatgtcttatatgctcaattgttatgctaaatatgccctttatgttaagatcctattgcatttaggtttattaagctctatgtttggtatattttacttgctttaatatcttaatatagagtagtatcagagtattagccgatacacgctagatctatctgatgggctatgctatgagcatctataatctcattgttaatatttatttcgatctaagtgatttatactgcctcggtatggtgatcgatctatcccaatcacttgatttaagcatatatcaacataaaaattatgtactgttaacatctacagctgatcgaatagatttagttttaacttactcattcacaactgccgatcgactcacatatgacattggctcaagaataaatgatatgtcatcggtgactggccgatcggctatcatttatggatttaactgcggtttctttgtctttatttcttgttgattgcaggatcaaatcaactggcacgctcacgaacctaaaaggcatgattttgtacctgcactggagttaagcagatctcccagacctcatgtttttcgcatcaacacgtttttggcacgcctggtgggacaatagtttcaacgacttcttcccgatggccgaaaaaccaccaccgtcaccagggacaggagtcaaacctcccgttaccaaaacgggagctgcgaaatccatcaactgaagtgaaccccagcaacatagttccagttacattggataacctgacggctgaacaaaggggtgaacttgaacaaatgatgagcaatgtaaaggatcagcttatgaattcttttcaagaaacccgcagaggcacaatcgtccagaagtacaagctgaaggtagttgcagccgatgaggttggctcaagctcttctccaggcaatgcaggtactgcagctggctcaggcgacaaaggtaatgtctctcaagatggtgcagttgaagatcttggtgaaaatggcaaccaagagcaattacagtttaataactttcaagatcggatcgactacgccgtccaacatgctctgatcaaccaatccggtgtgctagttaacactttgacaaacatggtgaagactgtggtcgatggtacgatagctgagcatcaaactacagggccagtttatttaccaggaggtgtttttccgaacttttggccttcagtcacaggaaatcaacagggtgttactagtgtaccaccaatccagccgatggcatcagtttcaactactgcaccaactgcatcatcatcggcaccaagacagatggtcaatgctgaaagtgcattaatcctcctagtgagttttggtgattaatgataaatgtggttaagggactaatgagctcattgagtagctttcaggtgcattagtccaaggtgtggaagatggatgcttgaagaccccccaaaaagtacaaaatcaaagcggaccggaactcaagaagtgcataggatagtttatcttttgaaatcgagtttttaagaaaaaccgtactattaagaggggttccaggtgatgctctgagatatatcaagtgctcttagtgtgaaccaagtgtcaagtttcccttggagtccttttttgcaaatactccatctgtccaagttccgggcctgggaggctggaagttctggagttccttaccaggaagttcctggtctgtttgaactttaccgcggtgatttgtttttaagtttttagggacaacctattcaccccccctctagtcttcatcaacgcgttcaattggtatcagagcaaggtgctcttgattcaagcttcaccgctttgagtaatccacgatgtcggatttagggggaaagaacggggaaaatggaaatgaagatggagcgagcagcaagggaacttcattatccaagggagctactataccttttgattacagcaaacttaccattccccctcacaactttgtctccgtgccttccgggcgtgctcctcaatttgatgggacacattacgccgcttggaagcacaagatgaagttgcatctaatctctttgcatccaagtatttggaaaattgtttgtacaggtgttgatgtaccccatgatgacatggagctcacttcggagcaagagcaactcatccaccgcaatgctcaagcttccaatgcaattctctccgccttgagtccggaggagttcaacaagtttgatggtcttgaggaggccaaggagatatgggatactttgcaattggctcatgagggatcacccgccgttcgtgaggccaagattgaattattgtaaggaaggcttggaagatttgtaatggatgacaaggagacaccacaagagatgtatgataggatgatgatccttgtcaacaagattaaaggacttgggagtgaggacatgacaaatcactttgtggtcaagagatttctccgtgcttttggtccaagaaatcccactcttgtatcaatgatacgggaaaggaaagatttcaagaggctcaccccaagtgacattcttggaagaattgtgtctcatgagatgcaagaagtggaagctcgtgaagtgaggcaaatggtgaagaatgccgccatgatcaaaaatcaagaagtagctttgaaggcaaaataagaagaagagtcaagttgtgaagaaagtgaagatgaagaaatggcttttattgtcaagagattcaagcactttcttcgcaagagtggctatggcaaagggaggaaggatgatgacaagggaaagaggcaatcaaagagagcttgcttcaattgtggcgaatacggccacttcattgccgattgtcccaagtcaaatgaagcaaaggctaagggaggcaagaagaagccggagcgtgctcatgtggcggaggcacacatggcggaggtgtggtactccggagatgaagaagatcccgaggtcaagcccaagcccaagccgaaagacaaggttgaaggagaaggtggtgttgctaccgtcaccttcaagtcatcttcttcaagcaaggaacgtctcttcaacaacttgagtgatgacgacgacgactcctaccactactcttgtttcatggcccaaggccgcaaggtgatgactcaaaagccctcttacatctctcttgatgttgattctagtgatgaggaaagtgataatga

SEQ ID NO: 10849 - DNA, 3461 bp, Oryza sativa
aaatgcagaggagttgattgaacgaggaacgccaaaggcaagattcatctgtatctttgttaaacctagtaatggagccaatgacattgttgagtacggacgtacaactaatagcatttttcggtggttggccacttttttatagcatacataccataggcagcactcggcagtgcaactgttagtggcagagctcaagttacagcctgatctgctcaggagttggttaaaccccataattcaaacaaataaaaatttacgtcagccgaactagctagcatagcatatgttagttgtcactactataagaaataaatatatcgtctttaacattcagatatgctattttttcataaacttttctacaatacaattgtatgcaaatcaagttgcattttggaaaccatatcaatgtaaaagcgtcacttgtgatttaagggagtgattttaagcttttctactcctataaaaaaaaggaaccagtagttacctcatgattaaacatgtgggcatccatctttcaagccgatcagacagattgccagcgattattgtagataaatcatccctagatggatgcatagctagttagctacatgtcgacatagctaattaaccagtctgatagatccacgccaaaaaaactcttcgctggaggcttttaggccctccaattttgtgagttatgaggtgcatgcttagccacaacacaagctaaagctgacctgcattttattttatttttgttcagttcagttgtgcatgcatgcaaagagggatcctttgatggcctgatcaactgtaaaattgtttataaacatggttagtaatatagaaatgacagagatagattccatgagttggtacactagtggagcttgacattgtagggatcaaggtggagcgtaaattcaaaggtgaaaaagggaagagcaaaccaagcgaacatgtgaggtacagccttatagcggctgatagcatatcaaagttaattatagtcgccgcaatcggcattggtcttgggttaagatttcgggaagaggcattatgcaccactgtcgtcgactggtgtataagcggcttttctattgcgtcactcaccaattttctggttgtgggcgtgaagattcgccaccaccgcctggaagagcagtactccaatgcaagggtgaaatagagcggtgctatcgcggacaagatttttccaatgtccgccaactctatcatcttgaaattggtgaaaataaaagatgaaatgtgtattaaatatatacttacgagtcgatagtatatatagcgaacaccgatatgcgtcgtcatcgagtgatctaattatgccgttagttatttaagcatgcgagccacatgtggtgagcatatgatggcaaccatagggtgtgtttggttgcctgcatgtgttttggctcgcacccgcccatgcaacttcgggttgtttggttgcctgttcgaagatcttagccaagccctaaggatgcaggattccctccacagccaggctctagaggaacgcggggaatgagcttcgctcctcaacctggatgagcggatgcaggggcgggtgcctcgcgcgatgcaacgcctgcagtccgctcacctccactgtctcatttgctccttccccatcctctttcctctccttctcattgtttcccatcttcctcctcttctcgtcgaagccaccgtcatcttccagagcactgtcgactctcctcgtttctgagtcgccggactgaccagatctggcggccatgagctcctagcaccatatccggcggccttgacctaatggcaactcacaagccattctctgtgtccttgatgtccatctttggtgagcaccttgactgcaacaggtagtgacttcagaccaaccctgacattctcatctatgtagcccttgtaaacagtcccaaaccctccttcaccaagaacgtagtcagcacggaagttctttgtgatggtctcgagttcaaacaatgtgaagtcaatcacataacgtgtatatggagatgttcttggcatcttcaattttcctaggtgttaaggatcactcatatctgatgagatgcgggtgtgcttcctctctgcaacagcattcttgacagagagaaccgctatacatacgacattttgtttacgattgctttacgatcaaacgttctctactactctctgttgacgattgcaagtttcggtcccacgcgaaaaaacatacacagatgacacggcgttagatcgtacttggatcgtaacaaaagatcgtacgtatagtattttccttcttgacaggatgttgtagcaagtggagctgctgaactgagaagatgacatttcaacaacaagaaagaaaaaatagtcaaggtaaaaacgaattaaggttaccataaattcttatacatataagataaaaggcaagcttttttttcatattgaattttgagcattcacagagatggttggatgaaagagagctaatcctgctgaaatacgtttaggaaagctataatcacaaactaacaagagaactactggaaacgagcgttggcgattcctagcaattataaaatggtattctacttaaaaatactgtaaaaaaagtacatacatgggcaagttgattacagcaagaggtaaacaggaccaggagaccagatctactgcacagttgcatgcaataaaaaaaagggctccaaattgcttaaacaatgcagcaaactgcaagaagtgattatgtttttccaacttgcaggatcataagtctattttctgttaaactgaaagtcaacagtgcctcagtgaagcagatagcacagaaattgcagcactattgggggaagtgcctgtaaattgtccctatgaacacaatgaagtagaatttctgatacagcaaccaagaagataaggatatgcagcagagaagaaatcacagagcaaccacaccagaaagcttaaggagatgaggcttccccgcaaaaaaaaaaaggaaaaaagaatggatgttgatcaaatgtagactgtaaatcaaaatcccagaatccccatgtgcaactaacagaaaaacaatgttgaacatttggagcaaatgttgatatcggattttaatcaaagctaaacccgagagtaccaaaatgccgatttggagacctaacaagaatcaacatttgcaaccagaacacccatccaaaggtcccaataagccataggtcatcatatatagcaaaaaggaaagacagtgcttttgtcaattccccactgaacccaccaacctagagtcctagagatcaggggaacccagaaataaccaccaagatcaattttttttgatgaaattcagatcatccaacccgagatcccatcccaacaaccagcatcccaagaaacaatccctgggaaatcccctaaagaaatcaatccgaggaaaaggagaaagtgaagaatac

SEQ ID NO: 10850 - DNA, 9738 bp, Oryza sativa
gaggaagggggctcgccggtgccgttgaccccttctggccagccggcgagtccgggcagtggcacgtggggcggcggcggaggcagcccgcatgtgagagagatgcggcagcagcctggaatgacgaggggagggagaggggttagggttagaactgcagcacgaatcttaaagcgatccaacggtctagaattcgcatgatttgtgaggtgtttttctgtcaaatgccatctagacagcccccataacataatcatctacttcctccgtcctaaaatataagggattttaaatggatgtgatatatcctatctagattcatgatcatatatcacatcatctaaaatctcttatattttaatacggagggggtattagcttaaaaaattaacccatgtcatctatagaatatttacctatagatacatattacaccactaatgcatacctcacatttttatcccacataggttattggaactcatggtgcagctggctataaatttgtagtctgttttttctctctcctccacgtaagtataaatatgatgtggcaatatgtagagctcgcttacatcatcttattgtactcgctttgataaacactctcatggtaatatttgtgttttgcaaaatgaaaaatacattattcccaacttctaatatatttttactctaacggtctgtttagttcccaaataaaattttcacgctatcacctcgaatgtttaaacacatgcatggagtattaaatgtaaaaaaaactaattacacagttcgccaggaaattgtgagataaatcttttaagcctaattgcgccatgatttgataatatgttgctatagtaaacatttgctaatgttagattaattaggcttaataaatttgtctcgcagtttcctagtggaatatgtaatttgtttgttattagactacgtttaatacttcaaatgtgtgtccatatatccgatgtgatatgtaggggtaattttttttcccaactaaacaggccctaactttgatttatttgaaattcctctgttcctagataaagtctcactccacgtagcataaatcatagaacaacctacctacgtaataattgagttgatggatttatttggaaaccagtaccatatatgtactacaaaagtacgaaccatgagcaatgggatccaccacctcccaaagattcctcttgttgggataatttccattcacaagtgaagtaacataacttatggatttgatgaaaccaaattaaagggaaattgtgtttattttttctgcaaaaaaagagagagagaatcattggagctggcgctgttttttttagtaaatttcacaaaactacaggtgctttgtttaaattattccaaaactacagatttaaggtgatgtatcacagaactacagatttaacaataaatttatcacaaaactataggtttaagactaagtatcgcaaaactacatatttaataataaaattatcacaaaactacagattttagggcttaaatccttagtactaatgttatgttggacatataattgttcaagtaatgtgattaaattatcaataaacctgtagttttgtgataactttgttactaaatatgtagttttgtgatattacatcttaaatctatagttttgtgataaatttagcattaaacctgtagttttgtgataaattgatcaaaatacctgtagttttatgaaatttactctctttttttttgcctgtggaaacttttattattctagaagattagttgcactgttgttattgtcacatttcttgatatgcaagctctgtagggatgaacaccaaaagctttattgttatcaccatcacaatttttttcaattctttttggtacaacaaaatcggatcatgacttgggaggatgtttcttttccatgtttccccttttagtgatacaatactgtttggccatgatataagccatgcatgcatgatagtacagccacttatttcttgtctcagcagaaataggaaatatggtaagctcaaaatgaaatcttattaaaatgttatactagatttctaagatagagagagacaattgtagtaaatccatttaaactaagaggaactgtatatcaacaagcttttcttgttctcatttatcccttgaacaaaactacaaacttttctgcttctactaccaacaaagtacattgtctaatcttacacaaataagagaatataaaataaggctccttggatcaaaagatttttgaaggaattttattggaaaagaatcctatgaaaaacttgccaacaaaaggaatgccttagaaatagccaaaatcaggattagtaacatgaggttcaacctcatgaaaatatttgtgtctatctgtatccctctcttgtgctccatccaaatgactactcgtgtaacttttccgtgctttatcattcataagatgtgaagtgctaagacattctactcctgtattttttttattccctgttttgagaatcctatgttctaaaatgtgccataagagcatgctgcctatctttgcacacacaaaaatcttatcaaaataacaataaaaaaagaacaagttggcatgaaaatgggagattgaggaaatgtgcttcatgctagcttgtagaaggagcattataagaggaaggaccacagacagaaaaagataagatggtgggcatcggctaatatctgtccatgcaaatatgcaatgcatgtccagcagcatgtgcacacaaccatatcacacgggtgtgtagctgcaggccgagcctaccaccaaacaccagcagcaggcagcagcaactggggactgatcaagctaaggtggtgtttggatccagggacttaactttagtccttgtctttagacactaatttagagtattaaatatagactacttacaaaactaattacataaatgaaagctaattcacgagacaatttttttaagcctaattaatccataattggagaatgtttactgtagcatcacataggctaatcatggattagttaggctcaatagattcgtctcgcgaattagtccaagattatagatgggttttattaatagtctacgtttaatatttataattaatattcaaacatccgatgtgatagggactcaaaagttttagtcccatctaaacagggcctaagccaagtggttgcaggctgcaatatatatcatcttcattttcttctctttcttttggccatcaactgcactccacaaccacaagtggctgcaggctgcaatatcatcttatttttcttctctttcttttggccatcaactgcactccacgatcacaagagggggagaggagcaaaggcaacaagacgagcatgcagtgcagcagagagagctgcatggatgcatgtgagagcatgtacaatagcaggctataagccagctataaacatattttaaagagataaaagaagagagaagagaagtaggctacaaatttgtagccagctgtagcacggactctaagacgtaatttatgtatgacaagtaagatcaagtattaatagtataataagcaactattatatgaattagctattacattggttatagatgatttggagctagtagttgactatactattaaacttgctctaagaaggaaaggagatactatcaggcaggagatcttctaccttggaattagcaaaagctacccaacaccacctgcattcttatcacaagttaaagctgctatactgcatatgcaattgcagggacactccctctccgatgaaatgaacaaatcaacttgtgtagttaaacattgctgtcatgtgcctgagcctttaaagtagttaagcttgtaaatggcactcgtgtagatcagatcatcagggccagggtctgtctgaaactagagattctttaattgcacacaggaatcttagaaaaatttcgaaggaatccggcaaattcttgcgttttaaaggagtccaattgaactcttatgaagtggatctccttatgtactaactgggttcttatgtttcgtttttgctcagcatttagtcatggcacaagatcacaccatgaataaactttagcaccaaaactgtcactacgttttagttcatggcctttacctgtcaggcttaaaatacagtagtaatctagagcaaaaggttaagctggccatacgagacaaaagaaataaaaaagatggccgagtagagcatctccaactgtctctccaaatccaactctccaaatatttatttggctaactctccatctaatttggcaagtcaaactcgttgtttactccaacagcctctccattcaccctctctattctaactctatgacagtgggacccacgtgtcagcctctacaacccttctttttcttcctcatacttctccattttctctccattttcctcacgatcctctttatcctctctggtggacaacgcggggcgatggcgacgacggatcctcgccggcctcatcctcctcgacagttgctggaggaggagacggcgagcttccagtcgtcggagtagcgggatccggaggaggcgcgcagcggcagcgggcggcagtggccacgcgcggcgaggcaccgccccgttcgctccgctcgctgcgctgaccagtcgaggtggccgctgccggtctccgctctgctcgccaaggtaccatctcgctggcggcaatgaagccgaggcgctccttcttgacctctataaaatctccaagcgaatcagatcaccgaccagccattcccatatcctcctccgattcgaaaccctcgtctctctctctgtgtgtgtgtgtgccggattccatggtgacagcagggagcagccgaggaggaagggcgggaggggccggaatgcactaacggcggtgctggacaacgacgccaacatctccgccgggaaggccgacggcgacggtgagctcaggcagaagatgcaagatagcgacggcgcgcctccttccccatggtggcggcatgcacaagcagagggaggaagggcggccgcggcgtcggcgatatgcaaagggagggaggggcggcagggcagggatggtgcggctagtggggagagaggagaaaaagttggtggggcccacggatggccagtggctaatggtggccaaaggctggctaagtttggctagctcgagcccatgcttggccatggctatcttttgtcaagtgggatagccattctactggagtgtggctatctactggagtgtatttttgctcaaagtagctaaaatttagtttggagagtggaatggagaggctgttggagttgctctaaagaaatggctggagcacagtgacagttgaggagaacatgcgagggctccgagcaatgatcatttgcttacacatcatccataatttttctttcctaagatagagatcattttttcttaccctaggatagtgatctatttttctcagtagctatatgtgcttggaaatgcagaggagttgattgaacgaggaacgccaaaggcaagattcatctgtatctttgttaaacctagtaatggagccaatgacattgttgagtatggatgtacaacggatagcatttttcggtggttggccacttttttacagcatacataccataggcagcactcgggcagtgcaaccgtcagtggcagagctcaagttacagcccgatctgctcaggagttggctctgcagttggttaaaccccataattcaaactaataaaaatttactactgtcagccgaactagctagcatagcatattttagttgtcactactataagaaacaaatatatcctctttaacattcagacattcagatttgctattttttcataaacttttctacaatacaattgtatacaaatcgagttgcattttagaaaccgtatcaatgtaaaagcgtcacttgtgattgaagggagtgattttaggcttttctactcctataaaaagggaaccagtagttacctcatgattaagcatgtgggaatccatctctcaagccgatcagacagattgtcagcgattattgtagatgaatcatccctagatgcatgcatagctacatgtcaacatgtaatgagaagggtcatgatacgtgtgaagtgattggacggtagcggctacgtgtacctccttgtgatggattagtagcgacaagtacgtgattaggcctgcaagtgcgtgtctgcacatggttgtaagttttgagagttcttgggatatgttaattagtgaagtaattaactgatgtgatatcataattaactagtctgatcgatccacgccaaaaagctcttcgctggaggcttttaggccctccaatgttgtgagtcatgaggtgcatgcttagaccattcccaacccaaacacactatatatagtttccataaattttacatcataaaaaaactgtactagacactactcttccaatgcaaacaccactattttatatttaaatttaatgctacttatttcacatgatgtcttggatattgtgtagaaaccatgtctcatgcaagacatgattttcttttctttcctcatttattcacttaccatatcatttttcatcctaggtggcagcttatttgatgttatggacatcatcatagttattgggttggaaatggccttagccatagaacaaactaaagctgacatgcattttattttattttttttcagtcgtcagatgcggtctcattggattatgcagcagctcgatctcttcaccttgccccacaggatcgcattcgcatggcgacaccatcaaaacacttgcacatttcttcattttctcttttcatgtcacgctctacctcaagttcaagtttcaactccactccatatacagttcagtattccaaaattccaattcatcacaggggcaagctacattctcagctaatcagcttggaacatagtagaaaaattcatatgaaaacagactggatctcatctctagcagtaaccgcaaaggataaaacctcaactttgtacatctggggctagaaagtgcatgcctccaccaagaaaaaaaaatgaaatggtgtaccaaacagaaacagacactcgagtccatcaagtcacgcgtgttcataacacgtagtactgttctatttaccatagctctgcaggtccattcacatgtgagcaagatggagtgataaacacacaaaagctactagacaggtgtcacagtccaaaatcaaagccaagccaacatatattggcaggcaaatcaagtgatcagcggccagaagaaacagtgtaagttgcttagagcgggtacagtaataggctataagccagctataaatatattttaaagagataaaatagaagagaaaagaacagcgggctacagatttgtagccagctgcagcacggactccaagacacagtgtgtgtatgacaggtgggaccatgtattaatagtatagtaagcaattattgtataaatcaactattagattggttatagatgaattagagctagtagtggactatactataccattgaacttagctcttacaggagagcaggcacaggctggcccggagcctcgtgccccggctgctcatcagtgtgctactgtttggagatcacaggtagcgcatccctttccatggcgatttgcgtgtcccacactgaaccagcagactgcgaccatttggcagcctgctactgcttgcaaccattttgtcaatgtccagtgattcacacatcaatgtgtatcataataaagatcccaactgtcaccaacccagccttgaaaaaacatccagattctagacaaagttgctgtcaccgacccacacaaatatcagtttgataatgttcagtaccagatcataacagaagtgtaccaatatatatgagaaaaggactcataagatcaagatgatgccacatataattggcaactccgaaataaagcatcaggaatagttaatcaagcttaacattcaaactctacaacaatcctgaacaaaaaatctacccatctcaaaataacacagcttgtattggcagccacaaagccccatatacagggaaatagggtctccagtatcacccaagtcagcaccatcatcaaggttgcatctgaagtttcctaagctatatcagcaacaggagatagtaaccacaagactgtaaaattgtggatcatctacccgctgcatttgtgccagaaggttgtgatataaacttctgggcaatagcattaatgcaagacctgttcctaagttactctccattgacaaagcttttactgtcgtagtactcgttccgtttctgcaaaagcaacgccacagactaaggtggtgtttagatccagggacttaacttccctgtctttagacactaatttagagtattaaatatagactacttacaaaactaattacataaataaaagctaattcacgagacaaattttttaagcctaattaatctataattagagaatgtttactgtagcatcacataggctaatcatggattaattaggctcattagattcgtctcgcaaattagtccaagattatggatgggttttattaatagtctacgtttaatatttataattaatttttaaacatccgatgtgatagggacttaaaagttttagtcccatctaaacagggcctaagggaaagtctaataagagagtaagcagccatctattagatacttactccctcggtcccataaaaaagacaaaccctggtttccgtgtccaacgtttgaccgtccgtcttatttaaaaaaattatgaaaaaaaattaaaaagacaagtcacgcataaaatattaatcatgttttatcatctaacaacaatgaaaatacgaattataaaaagatttcatataagacggacagttaaagttggacacggaaacccagggtttgtctttttttggccggagggagtacatgttatttccatatcattaaagataatataaaaattaaccgagtcattaatttttttcttaatgtgggtcaagccttggttctctctcctagactatctaccaatcacagatgctctttccatgtgggcccaccttaattatctctcacctaatcttttcaccaattacagcatccatcgccagcatgctgtgtctaggcgcccgtgcggagccgtcgtcaatttagtcgaccgcttctctctctccactccctctttcttccagcaatgcaaaaggagctgacataagtggctaatagtaggcatattttccctattacacttgccctaaaactgaacaaaaccatagcacatcaatggaccagaataaataaatgcaaactacccaccaccacccgcattcttatcacaagttaaagctgctactgcatatgcaattgcagccttgcagggaccctccctctccgatgaaatgaacaaatcaacttaaggtagttaacattgttgtcaagtgcctttaaggtagttaaggttgtaaatggaactcgtgtagatcagatcatcagggccagggtctgtctaaaactagagattctttaattgcacacaggaatcttagacaaatttcgaaggaatccggtaaattcttgcgttttaaaggagttcaattatactcttatgaagtggatttccttatgtactaactgggttccaatttatggttcacttttg

SEQ ID NO: 10851 - DNA, 14145 bp, Oryza sativa
  unsure (1)..(14145): unsure at all n locations
tacttattcttgagaagaaaagaaaccttgccttagaggagagcctagctaaagaatgtgctaaaaatgaacaactagctaatgagcttaatttggctaatggttctctagctagccttagggatgtcaatgaaactcttaaagagaaatttgctagtttagacaaaagtcataaagatcttgaagttcaatttgacactctttggaatagcacttctcaaccaaatgtggtttctaattcttctaatccatctactagcaatggttgtgctaggtgttacaatattgatttgaactcttatgctactaatgttgatgctatgcaagctcttaagaaagagaatgaaaggttgggcacattggagaaatatggatgcatgaagacataccattcaaaagaccatcaccgctcatcctaacaaggatggacacgggctcggattttctggtggaagtcctgtgtctaagcgtgtgatggtaaatgggaaagaatgcttgatgtttgtaagagaaggaaaagctccacaagcaagtgaagtgacttgtcccctcactggtcagacacccggaagttccgggcaaaatgaccggaagttcctgccctgtaagacaggaagttccggacattttgtcaagaagttccgggcttctgataggccgaagtggctggccagaagttccgttataatgccagaaagttccggccagagggtctttactatgattcatatgtaatttccaaaaattcagagggcaaagtggttgcttattttaatgggaattacaatgatgagtaccgcacttgtgtgtgggtgccaaaggctttggtgactaatatcaagggacccaaacttagacaagtttgggttcctaaatcccaagcttgatttcttttgtaggcatactcctctggtggctcaagttgggttgtggacagtggctacaccaatcatatgatgggagagaggagtatgtttacaagtcttgatgaggagggtggaagtcgtgaaaatattgtctttggagatgatggtaaaggaaaggtaatgggtctcggtaagattgccatttccaagaatcaatctctatctaatgtcctccttgtcaattcattaagctacaatttattatccgtgtctcaattgtgtaagttaggatttaattgcttgtttaccgatgtggatgtgactgtttttaggtgagatgactcttccatagcattcaagggtgtgttaaagggtgatctctatctcgttgatttcgacgtagatagagtgaatccggaggcatgcttgattgctaaatcctctatgggttggctatggcaccgtaggctagcccatgttggaatgaggaatttggcatctcttctaaatggggaacacattcttggtctatttaatgtttcttttgagaaagatcgtgtgtgtagtgcttgccaagtcgggaagcaagttgggagtccacatcctataaaaaacatcatgactacaacaagaccactcgagcttcttcatataggtttatttgggcccgtggcctacataagcattggaggtaacaagtatggtttcgtcattgttgatgatttttcacgcttcacttgggtatactttctccatgacaaaagcaaagctcaagatgttttcaagcgcttcacaaagcaagcccaaaacctctatgatctcactatcaagagggtgcgaagcgacaatggaggagaattcaagcacactcaagtggaggaatttcttgatgaagaaggaatcaagcacgagttctccgccccctatgatcctccccaaaacggcattgttgagaggaagaaccgaaccctcattgacgccgcaagggcaatgcttgatgagtacaagacttcggatgtctttcgggagaaagccgtgagtaccgcatgtcatgccatcaaccgcttgtacctccacaagatcctaaagaaaacctcatatgagctcttgagtggtaagaagcctaatgtttcatattttcgtgtctttgggagcaaatgttttattttaagtaagaggcctcgctcattaatttctcacttaaggtggatgagggattcttacttggctatgaatcaaatgcacatgcctatcgtgtcttcaacaaaacctccggtattgttgaactcactagggatgtgacatttgatgaatctaatggctcccaaggagagcaagttgttgtacatgttgtaggggatgtggatccaaatcaagctataggtactaaggctattggagacatacgaccagtcgagacgcaggatgaccaagaagatagggtcctattgaccggaacctccggacatctctagacccggaagttccgggttctatagtccggaacctccggatcagtggcagtgaagatgtgccaacggcacaagtggatgggatcgatgttgagggcactttagagcattctgatcaggctcaggtcccccagtgcaccatccaaggatacatcacactgtcgaaagagatcatcccgtcgacaacatacttggtgacataagaaaaggggtaactactcattctcgtgtcgcaagtttttgtcaacacttctcgtttgtctcttctttggaaccaaccagggtggaagatgcgcttggtgatccggattgggtgatggctatgcaagaggagttgaataacttcacccgcaatcaagtatggactttggtggagagacccaagcaaaatgtcatcggcaccaagtggatcttttgcaacaagcaagatgaacatagggtggttgtaaggaacaaagcccggttagttgcgcaagggttcacccaagtcgagggtctcgattttggtgaaacctttgcacctgtcgctcgcattgagtcaattagaattcttttagcctatgctgctcaccatgatttcaggttattccacatggatgtcaagagtgcctttctcaatggaccaatctcggagttagtctatgtggagcaaccaccggggttcgaggatccaaagttgccaaaccatgtgtacaagctccacaaggcgctctacgggctcaaacaagcccctagagattggtatgaatgtctccgagattttcttttgaaaaatggttttgaaattggaaaggcggatactactctcttcactaaaaaatttatgagtgatttattcatatgccaaatttatgtcgatgacataatatttggttctactaatgcctctttttgtgaagaatttagtagtatcatgactaaaaggttcgagatgtctatgatgggcgagttgaccttcttcctcgggctacaagtgaagcaagcactagagggcaccttcatctctcaaaccaagtacgtgaaagacatactcaagaagtttgggatggaggatgccaaacctatcaagacgtccatgcctactaatggacacctagacctcgacgataatggtaaatgtgtggaccaaaaggtatatcgctccatgataggatctttgctttacttatgtgcatctcgtcccgacatcatgcttagtgtttgcatgtgtgcccgttttcaagcggagcctaaagagtgccatttgattgccgtcaagagaattctaagatatttagttcacactcctaatcttggcttgtggtatcctaagggttgtgactttgagcttttgggctatttcgattcggattatgctgggtgtaaggttgatagaaaaagcacaaccgggacttgtcaattccttgggcggtcccttgtatcttggtcctctaagaagcaaaattccattgccttatccaccgccgaagccaaatatgttgccgccggttcttgttgtgcccaactcctttggatgagacaaaccctaaaagactttggctacaacttcaccaagatcccactcctatgtgataatgagagtgccatcaaaatagccaacaatcctgtccaacactcaagaaccaagcacatagacatttgccaccacttcttgaaagatcatgagactaaaggagacatatgccttacccatgtgagaaccgaaagccaattagccgacatttttaccaagcctttagatgagaaaagattttgcgagcttaggagtgagctcattatcttagactctcgtaacattaggtgatgggtggttggctaattcatagccaaacatgtgtcactaaaatgtaaattaaaaaaaaattgagcttttgtgtcttgagatcacttcttgtgtagaagatgatcttgataccatgaataaagctcaaacattccctctattatccaaaaacccttttgtgaaattttgcgaaaatttttgtgtgcgtttttattgcgaaaatttggtttttatcccttcttgtgatgtatattgaccattgttatgtaatgttgattgttggctggtcatatacatcataagtctctttatgtccataggttttcatttccaaatcattgaattctcatctattccattgaacttgggcctgactgccctctgttttgtcaggccagaagttccggtcaccccagtctggaacttccgggggtcgggggtataaatacccagggggagccgagcctggtcacttcttctcctccccgattcccaaaccctagccaccgctacagtgctcctatcggtgattttctcttccaaccatggaaatttgattcctctccgtggaatcaaccacattggtggctaggaggttcatcccgtgatcgatttgcgatttcccctctcaaggtagcacttttgatcttctcttttggttcatcatgtttttgccccgatctctaaatatgtgaacctagggagaaaaccttttagatagaattgttcctgctaccttgtagattgccgatctataggattttgtcacatgcactggcctggttaaatcctctgttcttcagttttgcaggccagaagttccgatgttgttggcccggaacttccggtctctgtccagacagccagtaaccttgattctgctactgtttcttttaaccattgcactccaaccttgttgattcttgttgcagtggtcattatgcctcgtgagaagagacataagctttctcaagatgttcctgctgactcgagccccccggttcgtggtcctagggggagattgggcaaagaaaaagttggagatttttacagtgggagtcagatccgatccattccaggagggctggtagcattgtcattcgtgatgcactccgctctccctctccagctgcatctgagtcagatgatggtggcaatgaggatgagcctggttctgaaagcaatcctttgaggctgtacaagacaagggctgttgatcctgatcctaaacgcccaagagtgaactatttgaagaatctactcaagtgtggaaatgacagaatggttagtcctgatactctgccagctgactttcaggatgacagattcaggacctttgtgcaggttgattggtataactctgtgatcatgggaagatctcatccagtggtagagatgaagtggctagactggcagtacatgtcctcaaagaacaacatagtcttcaatgaggtacgcaaggtgtgtgagcgcaagcacatggcagatttgttggccttgcagtattcatggaatgagtaagtgattggacagttctactccactgctttctttggcaccaccaagaaggggcttgtttttgtgaagtggaccatcaggggtagcagtatagggtctctatggcacagtttgctgcagctttggggttagatgatgatgacctgagtcgtccacatatctttgtagaggatgctctgtcaccgaccagcactacctttatgtatgagaaggatgctcccaaggattgtttggggactactcgagggttgcgtccatattatagagtgttgtactctatcttcaggtggtctttgctccctaaagtgggagatgctacagctcttccaggtaggcatgcgctcctcctcagtcgcatgcgctacaacaagcccgatttcagcatcatgaagcttatctggagtgagatctatgagacagtgtgtgagccaaagaggggctgcatctatgctccttatatcatgaagatgattgaggccaagactgggatttgttatttcaaggacaatcaacgcaagcctttccgtgctcatgctcccactactttagctactcctaccaccagagtgactcgtgcttccacctcagctgctccttcttcctcagctgcacctcaacgttctgagtcttcttctcccataaagaaggctctcagggctatcttttgcatgtgtgccaagacagctaagaaggtaaagaagatagtgaggcatcaaaagnaagattggattgcagcaggcaaggatgtctctgacatttctgatgatgaggagtttgttgatccttttgctgcttatgagactgcccgagacattgctagtggtgagagtccctctggcacttctcatttcttcaatgaggagtcctctcactccgaggagagcagtgacgatgaggagtcagatgcccctattgagaatgttcctacagatcccgatgaggcagtggatgccgccgggcaagacatcgactctcctcactcgggcgacactgagatcattccttctgatggcgataatgatgaggcttgatcctcttcttcccttgtgattttgtctcttttcggtgccttgatgccaaagggggagaaaattgcaatcgaagcgggtcaaaattttgtttttgatgcttgctgcctgctatctgtataatccggaagttccgaacctggtagctccctcgctttattgtcatgtcagcttgtccggaagttcctggtattttatccggaagttccggacctggcaatcctttggcccctactcttaacaactcatggacatgttctaattctctatttgtgtgaatgtaatgtctgttagatgctcttagctgccctttatttattctgctcttcatttatgctatgagtgtcttatttgttgtttgtgatgtgatgttgattttatctttttgagtgctcaccgtgtcgtatcttttgtatataatatctattcttactgcttttcgcatcccatgaatgagtagggaggaaggaaactctcctcggttgctcccatatatatatgcatatgagctccactcatatctttcatatgcatacattaagggggagtttcattcacctctaaccattcaaatcaaaattcttatcaatcttttgtaacctttaaccatgttgtcatcaatcaccaaaaagggggagattgaaagtgcattaatcctcctagtgggttttggtgattaatgacaaatgtggttaagggactaatgagctcattgagtagctttcaggtgcattagtccaaggtgtggaagatggatgcttggagaccccccaaaaagtacaaaatcaaagcggaccggaactcgagaagtgcataggatagtttatcttttgaaatcaagtttttaggaaaaaccgtagtattaagaggggttccaggtgatgctctgagatatatcaagtgctcttagtgtgaaccaagtgtcaagtttcccttggagtccttttttgcaaatactccatctgtccaaaaatgcaagtccagaacttcctgtcttctaggtccggaagttccggtcttgtgaaaaagattttcctaagtgtagtccggaagttccggtcttccaggcccagaacttcctgtctagtttccagttcaaatttgtgagtaacggcaagatgacgtcacctagccgttatacatatacagctcgtttctagctcgttctttggcgattccactttcacttttcgaacgtagagctattgctagcctctcccaagtgtttcttgccttctccactcaatctagagcctaattcttgtgagagagattgagagggagaaaagaagatttggagatgtgtgaagactaggatcttgggtgagcacttggaatatctcatgggctgtcatctcggtgcttattactcttggagatgatctcctagacgattaggtgtcgcccgcgagaatccgttgaaaattgtggatgtctcgggtaagtttgtgaaggatttcctctcctccaaaagggaacgaggtaagttagtgaagttcttgtgctgagattctagaggctttcaaagtagagcaacccacacttgtggtggatttctagaagtaggttgagttgaatcttggtggtcactacattctagaaatttgcctaggggtgtttggggttgaaggctgtggatttcctctgggtttttgcacaagtgaggcaaggggttaatcgagacccagctcttggagctcctcaacggagagtaggatcacaagattcgaacttcgggaaaaaatcgctcttgtctctttctgtgatgtttctatggatgattctgtgatatatcctctgcttagaatacctgtgcaccatcttgtgaagattggcttagtctcttgtttcgaaatttaaatttcatctctgttttgttacccggaagttcctgtattagaacaccggaagttccgggcctgggaggccggaagtttcggagttccttaccaggaagttccgggtctgtttgaattttaccgttgcgatttgtttttaagttttcagggacagcctattcaccccccctctagtcttcatcagcgcgttcaaatcctagattgttgaccagagaacaaccacaacatgctgggcaaagtgtcaatcggctgactcaggagcaggttgctgcaatgtttttaccaaatccaccaacagccgacccaatccagtcaatgccgattcagcaaatgttgccaagacagccgatggttcggccgattcaacagcaaaacttgcaacatgcatcggctaggctgaggaatcggccaaggcagcatgctgcaaatcaagtagttcatgagcacttggtccataatgtgcaggccaatcagtcagtcgtacctcaagttgttcctgaacatttggtgcacaatattcagttgaatttctagaattatcaaggaggtaatttgaattatcaatatcaggctccgtcacctcatgttcagtaccggcaaacaaaattgcctcaatttgctcctcagtttaatcagttcgagccgatacaacagcaaacgcaaggaatacctcagcaaaggccatggtctgatatgattgcagatgtgatgagggagcagtttgggttaaagccaaaggacactggaaacttgtatcggcatccttaccctgagtggtttgaaagggtttcattgcctagccgatacaaggtgccagacttctcaaaattctcagggcaagacaatgtttcaacttatgaacatgtcagccgattcttggctcaatgtggtgaggcatcggctgttgacaccttgagggttagattgtttcctttgtctttgtctggatcggtgttcacatggttttcttctctgccatataattctgtcaatagttgggccgatctggaaaaacagtttcatagctatttctacagtgggattcatgaaatgaaattgttcgatttgacagcaatcaagcgaaggcatgatgagtctgtgcaagattacattcagaggttcagggagatgaggaatatgtgttacagcttgtctttgacagattcccagctagccgatttaacttttcaagggttgataacaccacttaaggaaaagttttcatctcaggactttgaaagcctatcacatcttgcacagaaggtgactttacatgagcaaagatttgctgaagttaagaagaatttcaagaagatcaatcatgtatatccttatatgtatgattctgaagaggatgatgactccgaagtagcagcagccgaatgggtcaggagcaagaaagtcataccatgccaatggctgaggagctctggaaaagaggagaggtttgactttgatattaccaaggctgacaagatcttcaatttgttgcttcgggagaaacagattcaacttcctgctggtcatgtgattccatcggctgaagagttaggcaaaaggaggtggttctcattctactaacgactgcaaagattttaggcagcaaatccaggcggccattgaagggggaaagatcaagttcgatgattcaaaaaagccgatgaaggctgatggtaatcctttccctgttaacatggtacacacttctgggaggacagccgatgggggaaaaaatcgaaatatccagatgaattcggctaaaattatcaacaaatatcagaagaggcatgacaagcagcaggaaaaatattatgaagaagatgatggtggttttgatcctcattgggaatgtgagttcttcagattttgttggaatgaaggtatgaggcttgcatcaattgaggattgtcttggatgcaacaatgattcagggagttcaagccgatccagcaatagaggtaatcggctgagtcagaagagggtagctgttcatcagaggttgggccctgtgaatcaagattatcgccatgatgaagatgaaaataggaatacacagtggtgtcctacaggcattttcaccaagaatcagaagagaaggatgcaaaggatgaggaacagggagcattttcaggaggtgcaacaggagattaatcatcggctgaggaaaacaaagaccaagcaagagtgacgtgttaagagcacggttgcaacagctgatgagatcgaaggtgacaagacaaaaaggttgcttaagggcaaagctggtacatctgcctcaataaatatggttttcatgttacctgcagaattcgaggctaggcaagccgatgttgatgatgttgaagaagcttcggctaaattggtttgtctcgagagcaagcagtttttgagaagccagaagggacagagaatcgacatctcaagccgttgtacatcaatgggtttgtcaatgggaagccgatgtccaagatgatggttgatggaggagctgttgtaaatctaatgccatatactacattcagaaaattaggtaaaaatccagatgatcttatcaaaactaacatgattctcaaggattttggtggtaatccatcagaaactaagggagttttgaatgtagagctgacagttggcagtaaaactgttcctacaacattttttgtcatcgatgggaagggttcctatagcctgttgcttggaagggattggattcatgctaattgttgtattccttcaaccatgcaccagtgcttaattcaatggcatggtgacaagattgaaattgtactagccgacaggtcagttaatgttgctaatgccaatctagctctttgggagatgtatggtattgattgcttatctggaaaagtttgggatggagattttctaaaagtgtccgattgtgatatacaactgattgaagatggagagcccaaattattattttgagggcgtcgtggagggttcaaatgtctacaccaaggacacagtagatgatctcgatgacaagcaaggacagggtttcatgtcggctgatgatttggaagaaattgacataggtccaggagatagaccaaggccgacattcattagtaagaatttgtccccagaattcagaaccaagttgatagagcttttaaaagagtacagagattgcttcgcttaggaatatcatgagatgccaggactcagccgatcgattgtcgagcatcggcttcccatcaaacctggggttagaccatatcagcaaccaccaaggagatgtaaagccgatatgcttgaggctgtcaaggctgaggttgcacgtttgtgtgacgctggttttatacggccatgccgatatgctgaatgggtttctaacgtagttccggttatcaagaaaaatggcaaagtcagggtgtgtattgattttcgggatctgaacaaagctaccccgaaggatgagtacccaatgccggtggccgatcagttggtcaatgctgcttcaggacacaagatattaagttttatggatgacaatgcaggatataatcaaatctttatggcagaagaagatattcataagacagcctctagatgtccttgtgcaatcggcttgtttgaatgggtcgtgatgactttcagtttgaagagtgctggagctacatattagtgggctatgaattacatattccatgatctgatcggctggttggttgaagtttatattgatgatgtggtagtcaagtcaaaagaactagaaaatcacatagccgatttgaggtaagtttttgagagaaccaggaaatatggcttaaagatgaacccaacaaaatgtgcctttggtgtgtcggctggccagtttctgggatttcttgttcatgagagggggattgaggtgactcaaaggagtgttaatgcaattcagaagattcaacctctagaggacaagaagaagttgcaggagttgatcagcaagataaattttgtcagaaggtttatttctaatttatcaggaaagttagaaccctttacacatttgttaagattgaaagccgatcaaaagttcacttggggggcagagcagcagaaggctttgggtaatatcaaggaatatcttagttccccaccggttctgattcctccacagaaaggggtgccgttcagattatatctatcggctggtgacaagtcgattggttcggtattgattcaagagcttgaagggaaagaaagggttgtattttacttaagtcgtaggctcttagatgcagaaacaaggtattctcatgtggaaaagttgtgtttatatttgtatttctcttgcaccaagttaaggcattatctattgtccaatgaatgcactgtggtatgtaaagccgatgtggtcaaatacatgctatcagctccaattttgaagggaagagttggcaagtggatatttgctttgacagaatttgatcttcggtatgaatcgccaaaggcaattaagggacaagctatagccgattttattgtggatcaccgtgataactcaatcggctcggttaacattatgccctggacattgttttttgacggatcagtgtgcactcatggttgtggtattggcttagttataatttctcctcggggggcgagttttgagtttgcctatactattaagccttatgcaactaataatcaagttgaatatgaagcggttctcaaaggattgcaattgcttaaggaagttgaagccgatgctgtcaaaattatgggcgattctttgttagtaatcagtgaattaacaggagaatatgaaggcaaaaacgatatattgatggtctacaatgagaagtgccgagaattgatgagtgggtttcggctggtaactttgaaacatgtttctcgagagcagaatgttgaagctaatgacttggctcaaggggcatcgggatataagccgatgttgagaaatgttgaggtagatgttgcaacgattacagccgacgattggagatatgatgtatttcaatatttgcaaaatccatcccaatcggcttcgaggagattgcgttataaggctttaaaatacaccttgttggatgatgagttatattatcgaacaatcgatagagtgttgcttaagtgtttgagtaccgatcaagcaaaggttgtaataggtgaggtacatgagggaatttgtgttactcatcaatcggctcacaagatgaagtggttactttggcgtgcagggtatttttggccgacaatgttggaagattgtttcagatattatagaggatgtcaagattgtcaaaaatttggagcaattcaaagagcaccagcatcggctatgaatcctattatcaagccgtggccattcagaggatggggtatggacatgatcggccagattaattgtcacgtcccaaaacgactctaaaatatatcccttaaatgatgcctagaataattaaaatccatgtgaaagcctccaacaattaaaatgtgcaaagttaaaagccaaataagacttagaggatttttgtaaatttcctaaaagcctaaaatgcgtaaataaattttagtggaattttcagagcacaaataataattattaagaaataaacaaagttaaaatgattttataaaaag

SEQ ID NO: 10852 - DNA, 1695 bp, Oryza sativa
tgcacccctatttaaaccttccccgcgcctccctcgcccgtttccgccccttgccgcaccgtctccctgccggaggcgagctcgcgccgtcgccctctctctccttcgtcgccgacgacctccggctggccttctccgcttgccgggaccgtctcccgccccggcgtcgcctcctctggctgcgccgcaccgccgtcgaccccgtccaccccctcgccgagtccgccgaccgccagaacaccgtcgaccccgtcgacccgagccgcgccgctgccttcctccgctccggccgcctttttggtcgtcgccgtcgacctagggtgagccgtggaccgccgcctcttttccccctttccttcccctctatcggccgccggtccgccgtgcctatggccgccgctggcgaccataggggcgcgggcgccgcctcccgccggtcgcgccgagtggccgccttcgggcgcgccgagtggccgctgcgtggggcccggccgtcagccgcccgctccctcgggtgcggctgacgcgtggggcccacggcgccggccggtgcgagcccgggtgcgcccggtccaccgtggaccgtgaggctgccacgtgggccccactcccgtggacccggtccgcgcgctcactcccatcggctgacgcaataaaccctttttaaattaaaatttaaatgaagaaattcgcaaatattcatttaaagaggatataaacttcaaatggccataacttggtcatttgaactcggaattggaccgttcaagtctcttttttttccttaagaagtcaagaacccatttttgtgctttgttactgcttgttatatggagtttattagagtaaaagcccttttattttccgttggtcgtgtagacgttgcagcttcggaagatctgctcttcgtggaggttgaagccgacgtttgggaaagtgagcaaggcaagtcacattatccttgaacatattgaatctcagtttataaaattattttgatttaaattattgcattatccctttatttaaattcccgcgttatcactgttttatctagccatgcctatttacctttgttatgaccttattattgttattgttattactaccttgttcaccctagaataaacaaaaccccaactagtggacactctactcatgtgtcacaccctgaagttctcctcctaagcctaaaattgaattaataagagaccctaagaaaataccggtgcaaagcaagagtaaaccctattgaatcaatgcaaataataatcagaattggcatgtggaatttttcttgagttctacatgttgaaattcactaacaggatttttagtggaattttcagagctctcgaaataattttaaccatttaaaatcaagcatgcaatattttaattccacggaaaatctttttctcctttttctttttctttttcccttccctttccgaatgggccgccggcccattctctcctttttctccccctcctccccgctgggccggccgcaggccgaggcccagccaggccgctccgcctccctcctctcacggggtcgccgacaggtggggcccacctgtcgggtccttccccaacctcccgccgcccgcgccgggcaccacccccgaaaccgccgccgccgcgccccacctcccccctttccccgagcccacgccgcgtcgcccgcgccca

SEQ ID NO: 10853 - DNA, 1374 bp, Oryza sativa
  unsure (1)..(1374): unsure at all n locations
agtagtagtcgagtacaanancncctcatagaagagatctagctaaggtttgcacttcagtgactggaaactaatcccacatatcatttgaatgtgcaggcaacattcacaacaaactatcgagaaacagtaatggataaagaatttaatagagtcaaaaggaccaaaagttgaaaataataccagcaattatattgttttgtttatgtagcaaacatcatccatggttgatgcagattctctactgctcgagcacctcacgtatgcagtgactttaagccctgagagagtgcaaataaccattagatgttattatgatacaataaatcatctattccattgaaaaagatacagtaaatcatctcccaattagtgaacaaggtaacctttggaagattatttgggtgacatattgcattaagatcaaatttgctgtcactaagtagctgtgccaaaatttcagtgagttagcatttatgatgatagatcaggatgtcccccattgtgccaaagacataaataaagatcggcaatcgaactttcttagttgaaattatcatattcatcggctactgatctaatacaggaaagtggcaagtctgctcgcacttgaagctcaacgtctagtggagatggatgaggccttaccgatcatgcaccttgacaaatatcctaagctggagaaacctatcgatggagatcctgtgcttggtggcgtactcatcaagcacacactccttcatggccgcagcggccaccggcggcggcgtagacacacacaactccagtgtgtacttcgcgagcggcctacagaacaagtgaaacactgatgacagcaacacaaaaatgaatcacatagctaaggtcggcggattagggacctgactgcaggcacaatcatcgcaacgcgcgtgctgttgcggatcccggaagttggttgtgttcccctttaatctctctttacatttttgtgaacattgcagctagatttctgctctaaaaaccaaaaactactcatttttgtaaataaaacagagaggatacaatataaatttctaaactactctaaaatttagatgcaaagaaactcaattttcagatgccacattagttgcaaaaaaaacgttgagatgtaaacctgagtgaatgatgtgaatatatgagggtccacaactggttttcaacgaggtggttagtacagggatggaacataggacgttagggtggatagcttacacgatgtcggtgtcaaacgcgtcgactaaccgtgccgttaaggtaggctggcgggcgcgacactggaatgcagatgcagaattctgtgcaaattaaaacctgatgaactactgtacaatctngtagtcgcacgtcact

SEQ ID NO: 10854 - DNA, 748 bp, Oryza sativa
gtgtgtactacatgtacagtagttcatcacattatcggtgatgatccaattggatactccaaacctgtgcacaatgttaatgagaaaatctctagccttgtctgctgtaattgtgacgactggtttggcttcgatccagttggagaatttatcaatagctacaaagagatgagtataaccaccggtgcctttttgaacgggccaaccatatcgagccgccaaaccgcgaacggccaggataatgggatggtttgcaactcctgagctggtagatgagtctgtcgggcaaaaaattgacaaccctcacacgtccgcacaatcttgtcagcatcggatatggcggtaggccagaaaaaaccctgccgataagccttgcaaatgatggttcgcgcagctgcatgattgccgcagatgcccgaatgtatgtccgttagcaattgcctcccttcctccaaagacacgcaacgttgcagaatccctgacggacttttcttgtacagttcagccctatgcatgatgtaaagtttgcttcacctggaaattcgcttggcttcgtctttatcttgagggagttcttgcttagttaaaaatttgatgaagggctctctccagtcggcttcgagcatgttcacttcttgagtgtccgtggcatcggttgtttcttttcttggtacggtcagttcataaagatgttcaacgaacacatcggaaggagctgcttctcgttttgaaccaaagttggctagtt

SEQ ID NO: 10855 - DNA, 752 bp, Oryza sativa
  unsure (1)..(752): unsure at all n locations
cgtgatttacaccatatggtacagtagctcatcaatggagcggcctaaagtcctgagttgataatattgtaaaatagatttaggaaaccgataccgtattggttaaggtttctatcttgtaatcttgccccccatcctgtataangtgggcaggaggccctggtgggggcatgacacaaactgatcgtcagatcaatatacacccggcggattcaaatccccaaacaggagtagggtattacctctcatcgagagggcctgaacctgtctaaatcctttgtctccgcatccatccacttttaggtctcatgcgctacccccttttcatattgccgaaaatttgttttgacagttggcgcgtcaggtaggggttgcgttgagctttccatcgagaagtgcgatggaatcaatttctggagatgtgctgagatcgatctcaatgagttcgacggtttcaaccttcatctcaatgagttcaacggttttaatctgccactcggtcggcgacctcatgtgtcctgctgatgtaattccgttcgcgctctgtaccgatctacacgccagcataggttaaccggcagtcttcacgcgagaagcattgctgattaccaggggcatataagagcagccgattacaaggagctctgagccatacattgatatatacatatgnctatatacatgcttttatgcttgataacagattaatctacntaatcgtttctttgcatgtatgtatatgctgaccaaga

SEQ ID NO: 10856 - DNA, 7131 bp, Oryza sativa
gaagtttgcgggaggatttccaaacgaatccgagagagagagagagggaaaagtggggggaaagagggagggaatcacggggagtgatttccccctctttatggcgcgcggggacggcgggatgcggcggattcggcggcggcggcggcgctagggcacgggcgggcggcgggagcggcggaaggtaggggatgacgggtgggccccacccgtcagcgagggtggcgggcgggcccgcccgtcagcgacgcgcgcgcgggggaaggccgatgggccgcgggggagaggagagagagggagggagctgggccgagccggcccaagagaggaaggggaaaaaggactttttagagcttttctttttataaaatcattttaactttgtttatttcttaataattattatttgtgctctgaaaattccactaaaatttgagggctccttttagaccaaggagaatttaacaaaaattctccgggccacatttgagtttttcttgtacgtattttagtgtttgccaatttcttttcgaattttaattaattctattattccttttagcgaatgatttttaattcgggatgaatttatcaggacgtgacataaactaagtgcacaagggtgtgagagctcttgaaagggttcaagataatgcaatggagtgccaaaaccttacccttgctgctggggagtgggtatatatacccccaaccaccaaaactagccgttggaaacgaaatccccaactttgtgctctgccggtcagaccgtcgttgtgaggccggtcaaaccggactactttgtaacggctagaaaactagccgttacagggcaatcattgagcccactcaacctggccggtctgaccacagtgtagtggccgatcagaccgtccacggctcggtcagaccgccatcggcttggtggggccggtcagaccggccttaccacgccggtcagaccggcctaaggcccacggtcagaccgcaggtcacttttcagctcaaacgaccattagtaaaacgacgatatctcttaactcgggtctcagaatttggcgttcttggactttatggaaagcttattcaaagggctatccaacccatgaacaatccatccaagaaacacaacttttctcagggagaaagggctcacactccaaaggatactccaccggacataaccacatgaggctacccaaacctataggatttgcccacatctctctttgtttaggacttgagaaaactcaacacacttggctagacaagcccaccaaatacacctatatgcatatgaactaatatggcacaagatcatccacaagctcgcttcatagacccctcttgatagtacggcgtctatctagcaaatccggtctacaccaaacaccaagaccgggaaaagactaagaaaacattcttagctacattatacctttgccttgcgccatccatcttggggtcaagcttgagtcgagatcaacacttgtgaccatttgattcaaccatgtttataccaaggtatttaccatcatttgtcaagactttcttctcatcacaagcttgatttcattcttgccaacatggcgatgtccttggcatggtgaccattaacccatggtgtcatccattagcctcatcatagtgggacctattccttttcacatctcaaaggagaacattagtctcaacaaatcggttgtcatccttcacttgatgaccaaccggttgcatatgaaagatatgtatatgtttgttgagtattcattaacatcacaagtgtcatatactcgtatgcaagctcaagtgcaaagatccgatataaataataggtgaacaacatggatctaaaacatgtacaataaatgtataggatttgctccccctaagtatatgcatacaaagaaatatacaacagagacaagtgtatgcataagtaaagaagaaccaatgggggtttatcctatacacatagagaaggcatatgtagtaatgatgaagataaacaaaaaaacacataccttcatgatctccatgttctcaatgtaaaggagactaaataagataagactcaagtaaacattagtctcacacttatataacaataacatggaaatcatatatatgaacctatcaaaaagtcggagataagaagtgatacatatcgctttatctccatgaatttcatccttgtcatgattaaggtccatcaccaaagaatgcatatctaccacatctcattatcgggaaataaccttgttgaaaacttatgtaaaagagaggttaatcccataaacatcggtttatcatctatcaccaacgtaacaattacacaaattgtttaatccaagatctttcaatcttttctctcttttgtgataaataataatccgatataaacaatacaaagaaatgagatgaaagataatttcaaatcaaggtagagatcttataatgaacaaaatatagaataagctccccctcaagatgtgcatacatatggatatgaaggaatgcatatgcacataatcaatcaagatcaatgagggagctcacactatattttggatccacaagagagacaaagttagaatatgtgaagtttaatacatacctcccatcatttttactttcatatccaaataagactagtcaaagaaagactcataaaaacgttagtctcgtataattagatttgtcattaatcaccgaaaccaaattaaggcacttgaacttacagccttcaaaaccaccgagggaccatatttacccggttttcgtaagttgaaggacggatcatacccggttttgcggtcgagggacgaaaatcagactgagcgacaaataaagggacctaaagtgaacttattccgacacactatgtatatggaccagacatcggaagtacattcggctaagcatttgtagttttgggcttcatctacacctcaccaatgggctcttgttgggctatcaggatgaagtcttcattgtttgctgaaaattccagggcaccttttgtttgctcaaactaaggttaatatagtgtgaagacgtcttctactcttttatactccctccaacctataaaaaaacataacttagaataagatgtgatattttttatgtttagattcattgtaccaaaaaagttacattccatcatagggtagttttttaatgagaccatcagagtacgtgcttgaaaaaagtactactgaagtttcaagttacagtagtgttttttccgaataagacgaatatcttctaagtattccttaagaaacaataaatattaatttacaaatcttagtaatagtacttctacacacagattgtggaagatcgaagaaaaaaaaaacaagcatagaagacggatcctaggcaatccgcatgcctgcatgatgcacatcaggaaaatttcacgactgccgccgcgcatcgggatctgaaaacgcacgactcctcccgtgacaaaacgtccatcccttcgacgccgcacgccgctgttcccgttgaaaatcaccaggacgaggtcggcggcgggcgtgcggcgcacagctgccacggcacggcggcctcgtcgcgcggttggtagagacaggccggcacgtccgtcgtgtgaatcgcgcggatgccgcgcgggtcaccatcgcgatcgaccgataacatcggcgcgacaggagatggatcgccacaacaccaccacagcggatttgatctcacatcacgtgacactacccgtcacccgccatcggattaacgacctctactcgacaccaaactagagctcctgctcccgtccgctcgatcgcgtcgtcctggcgatgtaacggatcggtcgatttgcctccccaacgcgacgctgacatgggaagattccgtgccctaccatatgccgacttcaatttttactcggtctatctttgacacaagcgatctacgaatctcatcatgcacaagtacagaagctagccggtccgtgcatgcatgctgcaatatcactgacgttgcgaagagaggccggaggtgggtactaccgtactagaatcttatcgtgacgtgaatgtggagttttccttcacaatggcttttacctgtgcaggttagacaaagggttgtaccaaaccaggtcgtcggatggtcgctattattttttttcccgtttttcagaaccacttttgtgacagcaactggcagctttgcatgcgttggaggcggtaggccggccgcgagagcgagagaatcccttctccccgacgcagccactacgtgtgcaacgcattggccgcacaactagcttaagccggtcggcccggctgttgcctgttgatggcgccgtgtagactaatcgatctatcagcaaaccacccgttgctgtcattggccagggtcgaaattaggtacagtactccgtacgtccccggcactgctgctcgacgtcacaatgataaatgaccagcgtttcgccgagacattctggtcgtgcgtgcgtgcgaggggcatgggccaccatgcgcctcgtagttatcggcaggaacaggcatgtgacgtgacacggccttgcccggaggaggcagcgctttgatgggtcgaaagatatgggcagcgtccacggacgatgtaacgacgcccttgaccgtgcgtgacgcggtactacaccgtaatagtaccgtaatatcaactatagccgcctcacctgtccggttgattacgccgcgcgacggctgtttcttgccgcgtcggcaggtccgcgcgccgcgactgacgtgatgatccgatattgcaggtgtgtcatttggggtgcgtccttgcattgcatgcaccacatgaccgtgtctagtgagcaagatcaggagtaatcaatggctaggctgtttgtttggaggggctaattcataagtccctctactttagtcccttttagcccctaaaatactaaaaaaggagggactaaaagaggctaaaactacctagttccataagttcctgtgggaggtgctaatagctcacctactattgaatggatgaagcatataagtgccggatgaaatgctcctagataggtcatttaatgatgtttcagtcccttttagtctctccaaacaaagtttaacctctctttcaaaaatataagtccctcccctagagacttatggttttgtgagtttagcccttctctcccaaacaccctctaagtaggactaaagaggacttatgttttagtcttagaactaaattttaaccctaggacttatgtaaacaatcggggcctaaaagttgctgcaactgatagcagctgatctagctttcctttcccatcagactagcgataccacagtatagtctcgttagagaattatgaatttcgcaaaattagttaggagtagtctcgatggttaattcaaaagcttactccaattactaaacgtaccactgtatctgctagtctaacatgaaaattagtttactactgcctctatcccacaatatatgtcgttttaactttttcatgcaacgtttgatcattcgttttatttaaaaaattagtataaatataaaaaaggataagtcatacttaaagtacttttgataatgaagcaaatcacaaagaaaataaataataattctattttttttaaataagacgaatgatcaaacattacaaacaaaaactcaaagcgacaagcaatatgggacggagttagtaagtcccataaaatcaaatctattatacgatatactccctccgtcccaaaatataagaacctaggaccggatgtgacattttctagtactacgaatctctgtcccatccagtcttagattcttatattttgggacgaagagagtagcacattctaagggcatccacaatatagtctaaaactagtccataagcaataaaatattccattcagccacctaacaacattgtggaactagtccatagcaagaaaatagcaaaagccacccataagcatatgggctgaccatatagaataatatatgttatttctctctatttcctctctcctcctaatactagttgctatctatatagattgtgaagataacaatagttatggtccatatgtgtgggtcccatctatatggactatttttgctatatacattgttgttgccctaatactactacatatctaatattagaatatatcacattgaagtaataaatcgtaatagttgattaaccggggctctggctagctcagtcgttggaagctttaatactccctccatctcaaaatgtacggatttttaggattgaaacgggtattaataaagtaggtagaactaaataggtgaagattgtgactggttgagaagtgaaggtaggtgagaaaattgaatggtacggtggaggattgtgattggttgagaagagaatgttggtgaagtggttatattttgggacaaatcttaaagagctaaaagttgttatattttgagatggagggagtagaagatataagtattttgcagataaactaagacatatggcaatgttttttaccctgtgtgttgagtacgaaatactatctctgccgccatcaaaattttgcccttctgtttttttcactgttccgttaatatttgtgtctcttttgacactgtcgttgattaacgaccatggcatttacttctactagtgtacgtgatttgtcacacgtaattcaattctacaatataagtaacttattttgtgaaacatttgagaaccaaatcccatggtgcaatttcaaaaattatccaattgtacaccttttttcccaatctattatctttgaagcggccataatttagttttgttgataactttatggtatttgttagaagtacgtgtcgagtgctgcattatttttgcacgtttacagggtataatggtcttttagaggcaaacgtaatggtgaaacgtctttgaagctgtggtgccctggtttagaaaacgtacgtacggcaaatgaaaaagttacagatgtggaagagagaatacagtcacaacaaatggcaaaaatagaaaaactttcccgctggaaaaataatagagtaaggccctgtttagtttccacgcaaaatttttttatcctgtcacatcgaatgttt

SEQ ID NO: 10857 - DNA, 605 bp, Oryza sativa
cctattatgccgccgttgttgggcatctacgtcttcaccgaccggcttgccttcgccaccgccgactggtgtttccgcctgcacggctggcctttatgccgccgttgttgggcgtctacgtcttcaccgaccggcttgccttcgccgccgccgactggtgtttccgcctgcacggctggcctttatgccgctgttgttgggcgtccacgtcttcaccgaccggcttgccttcgccgccgccaactggtgtttccgcctgcacggctggcctattatgccgccgttgttgggcgtctacgtcttcaccgaccggcttgccttcgccgccgccgactggtgtttccgcctgcacggctggcctattatgccgccgttgttgggcgtctacgtcttcaccgaccggccgcctcgtccgccgccgactggtgtttccgcctgcacggctggcctattatgccgccgttgttgggcgtctacgtcttcaccgaccggcttgccttcgccgccgccgactggtgtttccgcctgcacggctggcttttatgccgccgttgttgggcgtctacgtcttcaccgaccggcttgccttcaccgccgccgactgg

SEQ ID NO: 10858 - DNA, 611 bp, Oryza sativa
cggtgaagtcgtagacgcccaacagcggcggcataatagaccagccgtgtaggcggaggcaccactcggcggcgacggaggcaggccggcggtgaagtcgtagacgcccaacagcggcggcataatagaccagccgtgtaggcggaggcaccactcggcggcgacggaggcaggccggcggtgaagtcgtggacgcccaacagcggcggcataataggccagccgtgtaggcggaggcaccactcggcggcgacggaggcaggccggcggtgaagtcgtggacgcccaacagcggcggcataatagaccagccgtgtaggcagaggcaccaatcggcggcgacggaggcaggccggcggtgaagtcgtagacgcccaacagcggcggcataatagaccagccgtgtaggcggaggcaccactcggcggcgacggaggcaggccggcggtgaagaggatgtcgccatcagcaacggcgacggtgcacaccaaccgtggaggcgtgtaatccaatcggcagcgacgagggcggccggcggtacgtgcgttaaaacaatagatcaaataataattagtgatctgttaattaatctatttcacataagaaaattt

SEQ ID NO: 10859 - DNA, 6454 bp, Oryza sativa
agatcaacatttcaattccgtttcaaaaaaaatataaaaatgaaaatagtagagggttttccgaccgttttcatccctagttcctactcacgctgatgtgaatatacagtagtaggagtgttatagtgagctgtgtttagtttgtgtgccaattttttttaaaagtatatggacacacatttgaagtattaaacttagactagtaacaaaacaaattatatatttcacctgtaaactgcgagacgagtttattaagcctaaataatccgttgttagcaaatgtttactctagcaccagattgtcaaatcatggcgtaattagactcaaaagattcgtctcgcgatttacatagaaactatgcaattagttttttttgtccacatttaatactccatggatgtgtccaaacatttgatgtgacggaaaagttgtaagtttgaagaaaaaattttaaatctaaacacagcctgagttacgcaatgtaggtttgtgaagtggtactactggtcagttgcgcagcgcgagaaaacgttgctcatatagctgttgatatcgaccacgtaaggaactgaccaaatgaaaaacaagtactaatattatgtagtgagattacccatactataaatttgaacatcgtaatattatatagtattacatacctttaaaattttttatattttgaaacgggaagtatagactagggttgagagaaatagtagttagtagtaaggtactaggagtactactctttttatcctaaaaataatccaattctaaagattgcagcttctgtcgcctgttaagcgagctcgtccgcgctcaatctgaatatggtttatgttcaaattaaattgtagaattaaagatttttatgggaggaagaaggcccggtttagatgctgaaaattttcgggtctgagcgaaaagttttggcatggtccagttttcgcgttttgggaactaaacggtgaaagatttcggggtactgtttatgggtggacgagtagtacccctcaccctgcatgcaagcaacaacaacacctaggagagcattaaataggggcaaatcaggcagcattaaataggtccccaaaattttatgccaaaactttggctgtttagttcccagaatgccaaaaccccaaaattttttcctccgcccaaaaattttggccaacttttatgatgcctgagctcactgagtcacgttcaccggctcactgcctcccagtcttccagcgatgcatcggcgaccatcaatggcctcatcgtcctccttgcgccgcatgccgacgccacgaacgtacgccgcgcgcatgcatgcggggtttctcgtgacacgcaggccccacaggcagacacggcaaggacaaagccccatgggcttgcatgcacagtggccgtccctgtgcgagacctcgccccttgggggtcgtgtcatgcgatcgacgggaaactcgggcgcctctgcactctctctctctctctctctctctctctcaatgatcttggtcgagtcgaagcaaaagatcgcgtgtctgtcgagtgtcgacaagccaagctatccaaaggagtccgaacgtgtgggggtggccgtggccagtctcccgtgcatggcagtgtctctgccccctgactgctcgccactaccaggccgggccattctctctctctccctccgctagaagagattttaaatgggtgtgacacattttaatactataaatttaaatatattgtggctgtgtttagatccagttgtaaaattttagcgtatcacattaaatatacggacacgtatttaaagtattaaatatagtttaataacaaaataaattacagaatccgcttataaaccacgagatgaatttattaagcctaattaatccgtcattaacaaatgtctactatagcaccacattatcaaatcatggtgcaattacgcttaaaaaaatttgtctcgcaatttacacgcaatctgtgtaattagttattttttcgtctatatttaatactacatagatgtgtccaaacattcgatgtgaatggtgtaaaatttatcaagggatctaaacaggtcctgatctatgtccagatttattgtattagaatgtgtcacatatatttaaaatcagttatattatgcgatgcagggtgtatctccttgccgcgcgagatgacgggtttctgccaggtgggcaagaaaacaaagcaagaccgggcgggcgctacgtgtgctagcttagccccccggctacactacagtcactcacccccgccggcccgcccccggccgggcgtccttgttgtgatcgatcagcggcacacggtggcgcccacggtgcgtttcccccggcccgtgaccggtcgcaggggcgggcacactggcgcggtcaccgcagcaaatgcagcggtaggacgcgtagtttatgtgcgcaaaactgatcggaaccgacggacgtaagcaaaatataaagagaacattgcaaccacaacaacgtcaaacgtgaaagttttttcagacaaggcataaaaatactaattcctttcgtttcagattataagagtttataatattatccatattcatatgagactgcctatacatcatgtgataggcacacatatatatctagatgttaatgaatatagacacatatatgtataaattcattaatatatatatgaatatgaataatgctataaagtcttataatataaaacggaggaagtatcgaactataaaaattttctacagaataagaatctacaatactatatttgtctcacttattacctcctatttaaattttctgcaaataccaattttattcaggggcaaagtcaagacccggtcactatggacaagtgcccaggctccgcccgctgcaaaagtacgtaccagctgcttgattaatcgatctaacatgttatgttagatttagtctactatattacatctgggttatgtcatttttcttctataaatcgaaatactccctccgtattataataaattcatttttaagcctttccatttatctcaatataagtttatttttttaagtaatcattgtatcaggagtttatgaaagtatatacaaatgtattgggatttgataaaatagaggtattatagttatttgggttttgattggtatgtttgggataagtaaaaaaataaacatattttaggactgatggagtatataattttatgaattttacatatgcttagggcatgtacaaaggtaaaatttaatatgagctctttatattaattaatatcactagatattgtactcctataatagataagatctctaaacctttaatgcactaaataattttttttatacttcttttcttttctccaccctcatgcaataatttttccattaataaatgctaatagtcgactatgagtcgtcgtcatgcatagcaacgatgtttctcttttcttccttttctttcttcaacgtcaccaaatttatctgcattacaatgaagagaccccgttattagacaatgaagagaccccgttattagacaccctgcatatgccctatctcgtttgttcaggctcaaaatacgtcattgttcttaccgtcaatcactgtcaccattttgccatgtttatcctcacttattaaaggcataatagatgtcttccttttggacggcgttgtaaccattaacggatttgctatcggagcttttggtttgtgggccatcatacgagtgtcaagatatgtgctaggtatggaaaaaaattcattgcacatgcaaaatgctagctattattatattctgtaacggaggaaatagtcacctgttttttcttgtttatgttatgacaagttacatataaatatatttcagttatactataattatacttatactatatttaccttccaaagttttggactaaaagaaaaactgtcgaaagtctttagatagtctcaacaattaattaagcacttcaatgtaatgtaccgctacttgcgaacgtccgaattgtgacggatcggatcggtttatgcttttgacagtttttcacccgtgctagctgctgcgcgcggtgtcgtgtagtcgtggcggagacctggagtaaatggtcggcgttctacgtgcgtcagccatagcttgaccgggctgcgcaggcagtacctccttgacgccatcgacgattatccaacagtgccgcctcagtgcacctgccaggtggggcccacctgtccacgtgatacggcactgttgccttgttgtacacacactgttgctcagtgctgctttgagtagctgggtaggcatagctgtacaggacgcttagcaatgaagtgggctaggagtagggtagagtacatcggtgctacagaaaaggctacagttgcagcaaaagcccacccacggaggactagttcattcacccagtccagtccagtgccactagtactaaaacacctcctctccgtatctccggttctgtctgcaaagcttctaattgctgtagtttcttttaaaatcaaagttctcctagatagtttagcttttgattcagattaaaaaaaactgtaattataaaattcaagtagtaataaatttaaagccagaagtcagaaaacctagtatttctagattatcggaaatagctacaacgtgttatttttcagaattttaaactctccaaacgtgcctctctctctcgggtgacgggtggatgcgacgttaaatggcaacagcggccacgtcacctccgacgcctacaccgccgtagtactcccaaacctgattttcgtgtccttgaccgtccgtcttatttaaaaaaatacaaaaaaaattaaaaagataagtcacgcataaagtattaatcatattttatcatctaataaaaataaaaatactaattataaaaaatttttatataagacggacagtcaaatattgccacgaaaatctagggtttgcctttttttggacggagggattagacctcaaggtatctctcatgatcccctttcccaatactactgcgtactcctaccgtattttgcgtactccctccgttttcaaaataaaataaacgtagctataaatttctctgtgtccaattttaatcgttcattttatttaatttttttttaaaaaataaaaaaacataaagcacgtataaaatattatttatattttataatctaataataataaaatactaatcataaaaacttaaaataaaacaaacaattaaaattgaatacgaaaatttatatttgtgtttattttagaaacgagggaggtctggactactactagcggcgtagcctagccctgggctggtgatgatgatgcaacggcgccggggatttgacaccccggagacgtgacgaccgtagtgcaatcccggggaatctgcgtaacaatccccctgctgctgctgtcctgctagcctaaccgggggtggagtagactagtagtagtactaccagtagcagtgtaccacacgtagatcgggccccgtgtgacagggagagcgacgccggaggggggagatgggccgtgcaaccgctgcttatgtggtgtcgagtcgatggtgggggctaccggtcgggaggggtctcgctctcgcccaccccaccggcccgtcgtggtgtacagtgtactcctacgcggtggccaatggagagtgtgttttagggcagcgttaatggccaccgtacgtgtggtttgccgatcaaatcaaaaaccttgcgctggaattttgtggactaaaatctgtgttggcgactgcgaggggtggaagatgacgacgaacgaacgaacgaacgctacgggctcactcggtcaagtcaagggcatgccgtgctcgttttggaagttttcgatgttcatttcagggactccggagggacactcgtattgggtttacgaataggagatggcctaccgttccgggcttaaatgaaatgatggttttcacgaaatccggtagaaaatcagtagattcaataaattttataaaccaaaatttgaatacaaattccctgagtttatcgataagctcgtgaaaaccggtcggcttgatgaaattctgagcgaaatcatcgaaatttcaatcggtaactagtaaaggaggtaaactgatttttttcctttttaaattcgttattcttttctttactactgtaaatttcagtaaatacacggaatatattaatttttttgaaaatttatattccaataggttctataaatatcgttaacttctcccgtcccaaaatatagctacctagtacaggatgtgatattacctagtactactctcggtgacatggggccgggggtatcgtgactagaggcttgggtagccgcggtcacccacgtggcctgacccccttgggggggtcgggcccgagggtgacgtggccacccctccctctgtctccccgaggg

SEQ ID NO: 10860 - DNA, 522 bp, Oryza sativa
cttcaatatgtcatgaccaggaatatgacccatctctcaacagagaatgatgatagatcacgcctattatttttttatttatgcttaggtgttgatatctgaatgatctagtttttcttggttatacaaattatcagttatcaattaaacaaacagaaataagtagagtacaaggatacatactaaaacaaaggaagcgaagatggaagcaaatatgctctcacttagataacctttgtcttgcccaaactcctaaaaacaacggtaataattggctgttacatatgcaaattaatcgatagcaaaaaggataagtgatttacttactggaagggccataaatccaaggtcctgcagaagtggaccaggtcgatgcaagtaatgcactcctcgagcagccagcccatgaatatactaattataggcaaaatattgtatgaatctccaaagtaatccattaatcaactgacaaacacagaagaataagtaatcctatataactaaatgcagaaaaaaaaaaga

SEQ ID NO: 10861 - DNA, 14002 bp, Oryza sativa
cctgcagcccaggccaaaacattaaaacataccacccccggggtaaatggcaccacgatctggctaataaccggtagttagccagatcatcagtggcatatatcggagacatggctgacgatggcatgtagctgctggagatagtgatgggaccgacgatgacctacaaaccatcaccatccactcctacagtctctcatgacaatggagacatcgtcgttgtctctgttgtcacacaaacttagccaagtctacgccaccaccgcttcaactgcctaccattgttgcccctatccgccaccgtcgttggcctgctgctgtcttgctgtgggcttctgccttttactaccttatcgctgcctctgttttctcacagataagagaagatagaagatagaggaaagaaatggtggtcagagagagaaaggaggggagtgaataagaccaagaataaaatgagagaaaggagggttgttgagcgcaaggcgcacaatatttttcttcctatcggtgtccgaaccaaagcattttcggataaattgacaataaattttgctttagaggtcgtaaacttctgaaggagaaaagaggacgccactacaaattgaatgtacgatcttttttaaaaattgattaatgtttcatcacacgtagagaaatatttcatagttagcccaaaaatatttcacacacatgcaatatctcctaaaattagttgaaataattttctacatgaaacaacaaagataagttgaaacatgaaaaaaatcacaaacatttacacgcccgtaaacatcaatacacattgactgaagcatcaaaatttcaataagataccaatacacgctgctctctcctcttcggtggccaaattttcggctcctttttctgagccgaccactcaacagtgacaagagttggcacctccctcccccgttaacgcagagaggcacaatgccatctagaactcgtgccattgcgactgaggcaaggccacggtgacactaagtgcattggctgctacaacctgcttggtccgcaccaacccatctttgacaagctcccaccccagccactagctgcagtcccttctttgcgacctccgcgcatggcactaggtacatcatggagttcatgggtatgaaggttagaaacggcatgttcgacctaccagacttgagaatcgatcaattacgattcactaactacgaggttgcattgcacgcaatcatgaagtggccaatgacctccctcacctcctacatcgaggcgaaggcagccacacaacggtaatgatagcagtagatagcactgttggtagcacgggataggggagagagaagagggcctacgtagattggagtacctgataaaataaggggcgacatcaggcgaccgaatgcaagcatttttagagaacgtggtttaaatttgctaattaatttactacacatgacaacgttcgccatgtcgtaacaacagtactcgatgccactttgatatctcaaataataatgtagcattcgatctatatattcattttagatcaaacggtataaaatgccaaccaatgcacactattgtgaacccatagaggatcccaatagctgagaagtcgtcatcagtaggtgtgcgtggcggatggatgataacaactgaagatgctgggtttcccttcttgtgtggagtgtagtgcaaaaggaggaaaggggggaaaagtttctgagaaaatttgtttttccggagaaacaaagaacttgccgtttctataaacctccaatctcatcactccctttgtcccttataggaagtcaaataaatgcacatgcttctgtccttatttcagttctttcagtttgatgacgtgccattttttcccccaaaatgatcgtaagaattatcgcgttccagttcttttcccatgcttgacaatctcacatttaaaaccggtacctatctagctctatagtccatgctagaccaaattgacaaattccttccacggtttcatcagcagcatcggctgctgcacacgtgaaaggtagacaaagcacgtgtaggctgcataggatgataggaacatggtacatggatatcggatagcacgctagcatccgtcacttggcttcctacaccctataattaatcgtgtgcactctcctactacatgcacacagaccaaaagcagaggctggttcagcgaacagatcagcacgcaagatgctgccaattcctttcacctacgaccacgagcaagtggatgatccatcaggggtagggtgctggttatccatctgagaactttttgactaaccgatcgagctcttcttctactgtgctggtctcaacgtatcactcatcggcatcatccctccaaatccaaatcttaacgatcccgctcgatcggagagatcggcatcgatgcgggcggcgaatctttgcccccggtctgaaaagctactacttcacaacaataattcagtgaacaggaaagaaggttctgagctcggtttctagatattatcacgcaattcacaacaagtggtgtggggttctcccagctgtagatatctcgctcatctcacccagacatccacgagagagagagtgtgtgtgtgtgtgctcactcgtcacagatgcgagcaagcaccaataattagctcatccttatctcacagaaatttctcatgcttttctccatcgggctgaccagcattgataggtagcagcagggggccagaggccttccctttttatcctcttgccgtccaaaagcggctgcacgatgatgcaccggattagcttagcatccagtctttacctatcgcgctctctctctctctctctctctcacttgctgcatgcgtttggtggtgtggttccctgaaccagtgagagacgttcagatttgggttcaggttcgaaaccggaaaagcgtcgacgaccccaccaccaaatccggagcggcgaggaggacggaactcgccgtggttatcgcgatagccgactagccgaagccgatacgatcatcctaccgggcgcgcgcgggcggggatatgatacgcgtgacgcgcggtcggtcccgggggataatctagtttattgcgcggcgcgcggtggtttttatcctgatctgcacgtatcttccgcttcgacgcgtcggaggagcggaggtcgtcgccgcgccgccgacggttggggcttgatgggccaccaccaccccggttgacgacgcgtgcgaacgcgtcgctttcgcgagcgagctagcaagcgcgccatggggtgcttgctggatagatgaggcagtgtggcgcgccgaaaagttggcagtgtgcgtgcgccgctcacacgcgagcgagcgatctcgcggctggcctcgttgtcgccgcgacgtgagcggcgtttgtgtgtcccttggcgctgcggagggacgcggctaagctcgtcgaaaaaaagagatggtccgtcatgggtcagcgtcacacggcgtggggtgcatggttgcgtcgctcgtcgcgatggagactgtgtgggaggtaacgggttgatattcgtacgtgtcgaagattttaggctcgttcggagaggagctctgagccatagagactactacctacggtacagaggattatttttgttctgtgagaggagatgaatggaatctgagaagtttctcattacggcatggggtgtgtttacttcacgctaaaattagaagtttggttgaaattgaaacgatataacagagaagttggaagtttgtatgtaggcccatcacgtcaaaactttcctacacacacaaacttctaacttttctgtcacatcgttccaatttcaaccaaacttcgggtgtgtttagttccaaagtttttttttccagactttcaactttccatcacatcaaacctttcatacacacaacttttcagtcacatcgtctccaatttcaaccaaattctaaactttgggccaatctaaacataaccttcgttccaatttcaaccaaacttctaattttagcatgaactaaacacacccgtagaagagggcaaaaattatatgtgagtgctgaaggtcgaagactgcgacaaatgtgtcgtgtgaacagcatgaacaggtaaccgtgaacgcctcttggttagacggtggaattgcgaacactactacagataagtaggcgtagtttagttttgatgactgtcactacgtatagataagtaggcgtcaattggtacacagtataaaatactatgaagtttatgaatttaattttattcttcgtcagtttatgtatgtattgttgagaatatagacatataatgatttaatatattttataaataaatcatgatattatagatgtatactagcattaatgtatcattagatctacacatgtaaactaagcagtaaaacatgaatagatgaaatatacgcaacatgtcgaacacgtaccgaggtggcggaaagaccggttgctcggcaggaactactcgcggttgcgagcgtcgacgaaggcgcgcagcacgcgagcggagaggaaggcgagccgtcgcggatgaacagggagcagtcgcgcgaagcgcttcccaaaaaccttattgccgccttctcccggtgcaggacgtcgaaggcagaggttccgtaaacctgctctcccgatcgcaggtgcacgccgcgagcgggatggagtagtctacgagcgacggcgcaacacagagaaagaggcaaaccctagattgatttcgtgtgttttgcgtgaagggggcgcctcggtttatatagagataggtcgcttgatcagtgtgcccgcacgatctccactccgcgtaaccgaaccggataagtcacgcgtaacttatccggactccacgccattttttcacacaccggatttttcggaatgtttccaaaacaaaacaaatccgaattttcctgcagcaaaataaaactacaaaaggaggctgcatctgcgcaagggtgaggagccaattttgcggaccattcgacgcgtgcgtcgtgcacgcgcgccgcctgccctgccctgccaggccaggcgaggcgagcgagcgtgcgcgtgtgttccccctcttctctccaccacacatgtttcaagtggctaggagggcatcctcccttttaaggaggccccctctcctagaataagtaaggtggtactaaacttcacatgcatgccataccatgaggtgggcttttgtgattttccaaagaattaattttcgaatgggccttagcccatctattaattccaacaatcccccaccaaatctcaaaatcccactgagatttgctttttccaatgtacttttatataccacggttcgatggagaccgatcaaggttgaacatccgcctagaactctaagctacacttactcacaacttgaacaatggactacgccttgaattgcaagtcttgtgcaagcaagtttcattcagagtcttatctggtactagaccgtctgtagactacccctcgggtggagcgtataagtcatactcctaggtctttagtaagattcctagaagattcacccaaaatcttcatagactgcgaccaacagtcaagcttacaaaggtgagttctttcaagaatgctctgcaggatagcatcttcgctaattaaagtcaacagaactcattaaggcatagccaacctgccttgcagctcacgagagtacatgcatcttcacttagagagggtatagattggtactctcctctagtttactaatggtttgttcttcccaggttctaattcacgggatctccaatcacatagactgggttaccaccatagtatactcacataggtctcaaacccatctccttcgatgcattatctatcacatttcgtgaaagtcccttcgtgaaaggatctgccaggtttctagctgtttggatgtaatccaatgttataactccggagtttatcgatttcctgacagacttcaatcgtcttttcacatgtctagacgatttcatattatccttagaactattcactttggcaattaccgtttgattgtcacagttcataaggatagccggcaccggtttttcaacaataggcagatccattaatagatcacgcagccattctgcctcaacagtagcagtatctagtgccatcagttctgcttccatggttgacctcgtcaaaatagtctgtttgcaagacctccacgaaacagcagcaccacctagtgtgaagacatatccactagtggctttgatctcatccacatcagagatccagttaaaatcactatatccctccagtaccgcagaatacccagaatagtgaagccccaattccatagtacctttcagatagcgcattactcgctcaagcgcacgctagtgatcatctcccggattagaggtaaaccagctcaacttgctcacaacaaaggagatatcaggcctagttgcactagccagttacatcagcgagccaatgatttgggagtattccagttgattcctagtaattctcttgttcttgcgaagcaacaagctaggatcataaggtgttggagaaggcttactatcaatgtagccaaagcgattcaagatcttctccacataatgggactgcaagagtgtaatcacattctcacctctaattagcttaatgtttaagataacatcagctactcccaaatccttcatatcaaaattttgagacaagaatgatttaacctcatttatcacctcaaggtttgtcccaaatatcagtatgtcatcaacatacaagcacagaataactccctcaccccaccatggcgatagtacacacatttatctgcctcattgactgtaaagcctgcagatgtcaatgttttgtcaaatttctcatgcctttgcttaggaacttgtttcagaccatacaaagacttcaacaatttgcacactttgccttcttgaccttcaactacaaacccatcaggttgatccatatagatctcctcatccagctctccattaagaaaagctgtcttaacgtccatttgatgaacgagaagaccatgtgaggctgctagggaaagtagcacacgaattatggtcaatctagcaacaggtgagtaagtgtcaaagaaatcttcgccttctttctgagtatagcccttagcgacaagccgagccttgtacttttcaatagtaccgtcaggcctgagcttcttcttgaacacccacttgcaccccacaggcttacacccatagggtcgctctgtcacctcccaagtcccgttagcgataatggaattcatttcactacggacagcctccttccagtagtctgcatcaggagatgcgtatgcttctgaaattgacttaggagtttcatccacgaggtacacagtgaaatcatcaccaaaagacttagtcgtcctttgtcttttgctcctttgaggagcttcactgtcatcctcctcagtaacatgttcatgtgtatattcagtttgttctggtggtgtgattgaactgggaattatttcagagggttggctagaactactatgtgtatcattcattgggaaaaagctctcaaagaaggtaggatcacgagactccataattgtaccaacatgcatgtcaggtacctcagatttaactattaaaaatctatcggcaatgctgtggtgagcatatcccagaaagacatagtccatagtctttggtctaagtttgcgcttcttcgttattggtacattgactttcgccaagcacccccatgtgcgcaagtaagaaagtgatgattttctccctatccatatctcatatggtgttttgtccttatttctgttaggaactctgtttaacacatgattcgaggtcaacaatgcctccccccaccatgccttaggtaatcccgcggtgtccaacatggcattcaccaagttggtcagtgtgcggttcttcctttcagcaatcccattagactcgggcgaatagggaggcgcactctcatgtataatgccatgttcctcacagaataagtcaaactcgtttgagaaaaactctccaccacgatcagacctaagtctttttatctttctatcaagttgattttcaacttctgccttataaattttaaaatagtctagagcctcgtctttcattttcaacaagtacacatagcaaaatctagtagcatcatcaatcaacgtcatgaaatatcgttttccacccttcgtcaacaccccaatcatttcacagagatctgagtgtaggaattctagaggtgccaagtttctctcctcagcagccttgtgaggcttgcgaggttgctttgattgcacacaactatggcacttagaacctttgacaatggaaaacctaggaattaaatacatgctggaaagccgagacatcaagccaaaattaatatgacataaacgtgagtgccatacattagcctcatcatccacactgccacaaatatggttcacagacttattgcagaaatcagaaagggaaaagcggaacaggcctccgcactcataacctttaccaataaaatatccatgtttagacatgactactttattagactcgaaaaccaacttaaatccgtctctagtcagacgggagccactaacaagattcctgtcgatagaagggacatgctgcacgttcttcagctgcacgatctttcccaagtaaactttagatctaccgtgccaacaccatgaacagaagcatgtgacccattccccattaggacggtggaaccccgtgtgacctgataagaagaaaacaatgagatgtcagcacaaacatgtacattggcccctgtatcaacccaccaattagtagactgattaactgaaaaaacagtaggtaaattaccatacccgcttccatctccagtgttgccaatggtcacattagcagacttagaggtctgccctgcaagtgccttcatcctcttgcgttgtggacacttcctggccagatggtcaggttgatcacacacaaagcaagtcctctcatcctgattagaattgttgttgttgttcttcttcttgaagttggtggtctgctgagctttgtatttccccttgctcttgttttgggccttgtgcacaacattggctgtggactgcccaccatcgcccttagacgcggcatctttttcctgagctttctcctcaatatcaagagacgctatccacccctcaacggagtattcctgtctcttgtgtttgagtgcagtaccgaaacctctccaagatggaggtagtttcgcaataatgcacccggccagaaatttgtcgggtaagacacacttaaggagttcgagttccttagccatggtttgtatctcatgagcctgttcgactacagaacggttgtcagccatcttgtagttatgaaactactccatgatatacagatcattgctagcatcaatagcaccgaatttagtattcagtgcatcccacaactccttagcgtcggtcatatgcatatacacctcgaccagatgatcgccaagcacgctaagaatgcatcccacaaagagagtagtggcctcatcgaattctttctggtgattagcattaagaacgcccataggcttgccagtactcacaaagaagcatttcatagttgtcagccacagagtgaccctgatctgccatctcttaaagtacacaccggtaaatttatccggcctcagtgcatcggcaaaaccagccatagtaaaatcacagcgcctataataaggtttttggattgttgagaatatagacatataatgatttaatatattcaataaataaatcatgacattacagatgtatactagcataaacgcatcattagatctacacatgtaaactaagcagtaaaatatgaacagatcaaatatgcgcaacatgtcgaacacgtaccgaggtggtggaaagaccgtttgctcggcaggaactactcgcggttgcgagcgtcgacgaaggcgcgcagcacgcgagcgaagaggaaggcgagccgtcgcggacgaacagggagcagtcgcgtggagcgcttcccaaaaaccttattgccgtcttctcccggtgcaggacgtcgaaggcagaggttccggagacctgctctcccgatcgcaggtgcacgccggcgagcgggatggagtagtctacgagcgacagcgcagcacagaggaggaggcaaaccctagattgatttcgtgtgttttgcgtgaaggcggcgcctcggtttatatagagataggacgcttgatcaaggcgcccgcacgatctccactccgcgtaaccgaaccggataagtcgcgcgtaacttatccggactccacaccgttttcacgtaccggatttttcggaatgtttccaaaacaaaacaaatccgaattttccagcagcaaaacaaaactgcaaaaggaggctgcatctgcgcaatggtgaggatccaattttgcggaccattcgacgcgtacgtcgtgcacgcacgccgcctgccaggcgaggcgagcgagcgcgcgtgtgtgttccccctcttctctccaccacacatgcttcaagtggctaggagggcatcctcccttttaaggaggtccccctctcctagaataagcaaggtggtactaaactccagatgcatgccatcccatgaggtgggcttttgtgatcagcattaagaacgcccatagcaacagatacaattcgatgacgcgcaataatggcggcggcgacgtcccgccgtgtcgtcaggtcgccggcggcgaccagacgatgtccttgaccaccggccggagctcctcgctacagaccaaccggtactccatggcgtcgccgccatccttcttgacgtccaccacgagcaacgatggcgccacgctgaagacgtcggccgccacggcgagccgcaccccgcgcgcaccgctcctcgtcacgcgcgtgggcgtggcgccgcccgtagcaagcgcctccagccgcgcgaccacgccgcttgccgcctcccgcgtcgcgaacctgtggttcatccttgtcgtcgccggcattgccatgcgtgtccaccggcgtcggcacggggtcggcgctggggcgcgggacgggcgccgtcttccggatccacggtgtctcgagaaggccgaggacggtgatgcgggttcccgggttggggtcgagcagcatcttgatgagcttccgctgtagcgtccgctgccggacctccccgaacctgccttcacgcggaccggcggcgctccgattggggggcagcgccgaccacgcccgccgccgccgtcggaactcgcctgctccgccgcccacccgcgccgtcctctgcccgggaaggagagagagaggggaaagggaagaatagagagaagggagagggaagaagagaggagtgaggctgacatatggggcccacgtgggccccaccattttaaatttttttttgtgcagctgacatgtggggtcacgctttttattatttttccgagatataattgccatgtaagcgtcacgtcaatgccacatgggacgaagacctagtcaaacaagccacgtaggcgccacgtcagctaaaccgcctttgtaggatcaaggaggccgactagagggggggtgaataggcggttttaaaacttaatggcacttaaacaaaactaacctaagttgctaggcaaggtaaggtgtaaggttaactaagcaactaagttaagttttgcaaacctagatgatatgggctcaaatatgtctctatgaatgtaaatagcacaaatgtaaatgcaacaaataaatgaggcaagagacaaggaatttttcaccgaggttcagaaactcgccggtttcctaatccccgttgaggcgagcccaactccaccgctcaaccacgaagccaccgcacgcccccttcatcaaggggtgggcaaggcgggagccggcccacggagaggactacccaagcctcgatcactcggggtagttcttccttcactctgaaggtggtgaactccaaaccactcacaaacggcgccgggcctcctccacaatctcctcggagaggtcaccgggcaacacctacacaagccgtctaggaggcggcaacctccaagagtaacaagtctaggatgcttgccgagaatgatcaagtgtcacactagctaaaaaaatgaagcaatgcagttggattggcttaactcactctctaacacctcactagataaactgtcgcgaccgagaaaattgccttttcccgaacgctagtgtattaatccccgtcccaggaaaagccggggtacaccacacaaacatgatacaaaaggcacatctttattatatcgagaatatttacattattacagaggcgcttcaggcctggcaatcaaaaataaacagcagcggactagcgggcctacggctccatcttcacaggcgctcaactggggaataagccaggactccacctaagacatcttctccaaagcttctcttactgaatgggggaaaagattgagcaagaatgagtacaaccacagtactcagcaagccacaccggagatgcgtaattaatgcaagggagtacaaggggataataatataggggttaagttttgcagtaaacagcatttaaaagtcacttagttgcccaaagccattttaaaaagacgatcctagagctacacagtattattaatcagggtcgtgaacccacacgagcctgccttaacccaaggcctacgatgattcagaccgaactggcaacccgaccctgggtcccagctcgtcccaagccaacccaggccaaccattccacattttagttgttgagcaaattttaagaattaaaacactaacttgggtacattgctcggcttgcccataaccgagggcgcggctattcgaatagattatactctgatcagaggtgtacatctttacccacaagacacatcttcctcacgtgtaaccacgtgccacataccaccacggtatacggacggaagacgtgacatagttcccaacccatcctagccataaacaagagtaccgacccaaccccacctacggccggaacctccgggacaggcaggcaggactgagcccctagcagcagggcaccaaccctgtgccatgacatctcgactaccgggccgcagctcgtgtagccttcatttgtcctagagaatgtccatcgacccccgacttcatccatctccaatccgtgtacttttgtttataaccagactgagccacaaactaagccttacccactagacatgtggaagtacggtagtgctttgcaacagaggcccgagcttaatccttatagtggccggggtgctacttcccacaactggcatgcacccaaaccccaccggaaaacagattttaggggctttgaaagaggaagagaggggtatgtccaattccaccataagccaaccattccatagtgtccaaatgatatgagaattcccaaagtctaaagttataaaaccacctaatgttgcctaattaaccagcgaagcatctacctaaattcataccagtggaaccatgaatagagtacccactagttggggttttattttcctagggtgaacaaggtaataataacaatagcaataataatgtcttaacaaaggtaaataggcatggctaaataaaacagtgataacgcgggaatttaaataaagcggtaatgcattaatttaaatcaaaataattttataaactgggattcaatatgctcaaggatgatgtgacttgccttgctcgctttcccaaacgccggcttcaacttccatgaagagaggatcttccgaagctgcagcgtctacacgaccaacggaaaagaaaaggcttttactctactaaactccatataacaagcagaaacaaagcacaaaaatgggttcttgacttcttaaggaaaaattagagacttgaacggtccaattccgagttcaaatggccaagttatggccatttgaaatttatatgct

SEQ ID NO: 10862 - DNA, 1720 bp, Oryza sativa
tgacagataggtcatataacacaaacaatcgaatactatctgatgctgccgccagcactatcatgctcaaactaaagatagataatgcttacagagactttttaaaataaagttgctgctatagtataccttgtttgacaaaaggagagccctctgcaaagtacttagtaatagagtgaacctgccagtagattatagtcagtacacaacttcacatgtatttcgtcatgtataaattataaacaatatccaaataatacataccttgccaccaatcacctctggtagccagggagccatctggattctgctcctgctccttttgctggattggacatacaaagagaacataaaagtgtcagtgatacaagcaaccagaagctgataattaagagtgtcaatttctacgcacatttcctggtgatgcatcaccctgctttggtggagtgttgccataaaactcccgagcaccgtaatgcacagaagagccaaaatatggcgactccgatgactcgtttggatatgattgtttaccatccttgtatgcaccacgagctttagtagggctgtgcgatttgccatctgcatgacgaaagattgcagttaagcggctgctgtatcacatagaaatggagaatctcctctccaaatcaagatgatgcattaaacatggttgaaaaatttataagaggtagcaaaattactacaaagatcaatgtgctttgatgttggatcaaatgcaacagcgtgtgtgcgactgtgcgtgcatgatcgttgacgttagacataacctgaaatcctaaatccatttctcaggacaactaatgacatgaaagatgattatcctactctgttcacaagtttagccgcaattaaatactagtgtcaaataaaaaggatatcacacaaactacctgcaaagccaccgccattctgccctttggagttctgcttgttcagcatcgcgtacaggtccgcctgcttcgcgtctttcgtatttgcctttcatgtaaaaacaagggcagcaacatcagagggatacccaaataagatttcctagaaaccaagaactcatccaacacaaatgaacccgcccgaaacaattcccgaattcccgaattcagaacaacaaaaaatccaccaaaggaggagccaacctctcgcgcgacaatcgcataacagaaacagagaacaatccttaaaaatctcacgaatcgaaccaactacgagtctacgagggcgcgagaggagagagacgcggtataccgtgggcgacgcggagaagacggtgctgaagtacccgttcgccgccgccggcgcggccccggcggcggtggagggcggcgatttcttcctggagtccatacacgtcggtggtttgggtttcttggcgctcgaggagaggagaggagaggagagatgaacctagacttccgtggaaggagaagaagaagaggaggacgagctcgtgagcgaggaggcggagaaagatagggcacgtgaagtggtcgttataggcggcggcgcggctcggggtcggaggtgggaagcgacacttctctgctcgcctcgtggcgccctgctccggcctccatctgtgcccgcggccccctccttataaagggctcgagtcgaggaggggcgggcgaaccccctgttctgaattctgatgtttgtattccgtagatctgcaggggctgaattgccaaagtgcgatcga

SEQ ID NO: 10863 - DNA, 1157 bp, Oryza sativa
cgaacggcgggtaacggccgccgctcgccgcgccctccgcctcgacgacatggagccggcggcggctgcgccagaggcctcggtggcggaggaccgcccgccggcgcctaggcgctgctgcgccgtcatgaccaagtcggccacgtcatccagccaacgtcgggctggagtctctggatcggggacgacgggcgggtgacgcaggagcgcgcccgcagcctggagcgtgccctggggcgtgccgccatcgccgtagacgaggcggcgacgcgccccatctcgccgtcctcccccgtcgcccgcggacggcgaagtcgcggatctttcgacctccccgagcgcctccccccgcccaagatttcggcgagaggggaacggtggggtgcgagcccgacggcgcgggttctgctccccgtcgtcaccgctagcgttcggagagaggctgtgcgccactgcccgttcggccattgggctgagcgggagaagcttggcgcacacgaaagaggacgagggcttagaaaaacacgcgcgccccctacctggcgcgccagattacggagcgtggggctcctcaccgggagaccgcgcaggcccccctttgccggttcggccgggggcgctaagtgaggttcttcgccctcgatctgaggaacgtcagcgagagaggaaatgcgcaagacacgggcgacgtagacaggttcgggccgctaagaagcgtaataccctactcctgtgttctggtggatctgtgcgtgaaggaatacagagaggccgagagcgaaagagagttcaggctgtagaaacccttcgccagagtccccactccccttctttcctctctctcctttttttctaggcctgggcctcctttttatctggtcaggggtcaccacatgggcctctagctgcctaagaagggaaacatgctttttacaatcagggctagttacagccggaagtgacctctgacaagcagagcacacgcctcctgccctgctcacctgctttcccggtggacgcccatttcaaccttcatttaatggccagcgacttccttgccatacttgcgctgaagcctagaatggatctgaccgggactgacataccaactccaggagttagcacgccagctccggctagggacgagagccaggaag

SEQ ID NO: 10864 - DNA, 1485 bp, Oryza sativa
gatggattgaatccggcctccagaagtcgcgccacctcctcgcggatgaaggcttgacgttccggggcctgccgccgcactttctgccggaccggccttgcgcccggccgcacggcgagacggtgctcaatcacctccctggggaccccgggcatgtccaccggtctccaggcgaagacgtcggcgtttgcccgcaggaaggagacgagcgcgtcttcctatttgtcgtccagaagaccaccgattcgtgtggtcttggacgggccgtggcccagggcaacctccttgaccgagacctcgtcgcacgtgaccatccgctgccttggggcggccgggacggaggtggcgagcctcttgtcaccacccgcgggcttggacgccgcggcgaggtggtccgcgcgctgctccatacaagcaagcgcgactttgaggtcgccatggacggtaatggggccagcggggcccggcatcttcatctggagataggcgtagtggaccgccgccatgaacttcaccaacgcgggcctccccaggaccgcgttgtagggcagactgaggtccgccacatcgaagtccacccgctccgtgcggaagttggcggaacctccgaaggtgaccgggaggtcgatatgacccagcggccaggtgtgccccggcgtcacaccgatgatcggctgggacggccggagcaccatccccgtggccttgatggcgtcaaaggctgcgggggaaaggatgttgagggctgcacccccgtctatgaggacacgccccaacttcacattgcaaacggtgggggaaaccaccatcgcgatctgtcctccccgggcaacgcacggcgggtggtcagtctggtcgaaggtgagggcaacctccgaccaccgcgcccgccgcgtcgcctcatgggtaggggccgcggccagaagctctcgcttcatggccttgaggctccggcgagaagcgtgagcgcacgctcccccatcgacggtggcgacggtggcctcaggctcctggaaccccaggtcatcgtcgccatcgtcgatgtcctcggcggtggccttctgcttggcctcacctcaccggttgccggcgggagccgccggggtcttgccctcacggcgctcctgcctcttctcctcctcccacttcctcgtccgttcagccaaacttttgaccgcgcggcagtccgcgaggtcgtggagggaggtgttgtgcacggtacaccacttgccggttgggcgctccctgctgggagcgccggcctccttctttttgtcgctcgcaggcctcccctttcggggggcccgcgaagcgccctcgacggcgagaacatgaccctcatcgtcggaacgggccgaccccttcttcctcctcctgtcctgccgccctgaccgagcggcggacccgggggcggccggagctgccactccagaaccggaggagttccaggtccaggcctcctccttgcgagccacacggtccgcg

SEQ ID NO: 10865 - DNA, 1282 bp, Oryza sativa
tcaaacatactttccttctttaccttgctaagagtgtagctggatgggctcaagcattggcttcctttctcctttggttccgggtggaggtcctcacgttggttcgtatcttttagatcattgcgtgcttcaagtgtatctttcgacttcccgtatacacctaggaagcccagcaagttgacgcagaggttcttagtgaggtgcatcacgtctattgcatgccggacgtccaagacttcccaatagggtaactcccaaaaaatagactttttcttccacattgctgcgtgaccatcttcgctggctatgggttggcttccaggtccctttccaaacactactttcagatctttcaccatttcgaacaaggttttaccgtttcgaaatataggcttcttacggtgcttgcctttcttccggacagtgtggttcgtaacaagaaatcgacgatgccccatgtacacaacttttttacaatgtttcagatacgtactttcagtttcatccaaacagtggatgcaagccttgtaccccttgtttgactgtccggataggttgctaagggcaggccaatcgttgatggttacgagcagcagcgctcgtaggttaaattccacctgtttgtcctcatcccacacagggacgccttatttcttccacagcagtttgagatcttcaaccagtggtcttagatacacatcaatatcgttaccaggttgctttgggccttgaataacaatcaacatcatgatgtacttcctcttcatgcatagccaggggggtcgtagatacacatcgtaacaagccaagtgctatggccgctgctcatctctccaaatggatccatgccatccgtacttaaactgaaccttacgtttcgtggatcctttccaaagtctttaaactttctatcgatgtttcaccactgcaacccatcggcggggtgtcttagcatcccgtcttgttgacgttcttctgcgtgccatcgcatcaatcttgcatgctctttgttcctgaacaaacgtctgagccgtggtattatagggaaataccacatcaccttagcaggaattctcttcctcgaaggctgtccgtcaacatcacctggatcgtctcttctaatgttgtatcatagtgcattacagaccgggcatgcttctaggttctcgtactcctcaccgcgatagaggatacaatcgtttggtatcctcaagtcctagagggcagactatattctttgcttcgtatgttgttttgggcaacttgttttcctccgaaagaa

SEQ ID NO: 10866 - DNA, 11832 bp, Oryza sativa
ccagtccggaatgttctcgtcttctacttcatcttcttccattcgaaccccttgctccccgtgcgaggtccaaacattatagctcggcatgaagcccgtctcaaacaagtgaatatgaatagttctaactgtagaatactctctctggtttttgcacttagtgcttggacaacggataaaaccattattctgcttgttagcttctgccactttcagaaaattatgcaagccatcaaaaaactcttttgaccgtcagtccgcgcgcatccattgccgatccatctacatgaaaagcacaaaaatcatgaaaaattaatccacgaaattcaaaccaattaaacaatattaaaaatagcaatatataattattataaaataatacaacaaattattcatgttttcattccccatcattttaaagttgtaaacaaatattaaatttgttttacttaatttaatttaaattaactaagttttccattctttttcatataattttctatctttttctttctcatctcttttatcacaagtttttttttccaaattctaaataatcatatttgattataaaataataccacaaattattcatgttttcattccccatcattttaaagttgtaaacaaatatttaatttgttttacttaatttaatttaaattaactaagtttttcatataattttctatctttttctttttcatttcttttatcacaagtttttttccaaattctaaataataaaatttgattataaaataatacctcaaattattcatgttttcattccccatcattttaaagttgtaaacaaatatttaatttgttttacttaatttaatttaaattaactatgtttttcatataattttctatctttttctttttcatttcttttatcacaagtttttttccaaattctaaataataaaatttgattataaaataataccacaaattattcatgttttcattccccatcattttaaagttgtaaacaaatatttaatttgttttacttaatttaatttaaattaactaagttttctaatctttttcatataattttctatctttctctttctcatctcttttatcacaagtttttttttcccaaattctacataaacaaaatttctatattatttcatccctacacaaactttctctttcatcatctcccattcccaaatttctagaggcaaaatagtatacaaaacatatctctaagtacaaatgcttatcacaaagtagaggaggatgaagttgctaacctttaactccttcaaattttatattttcaccaaaacaaaatcaccaaaaattttggcagcacctcccctcaaactcaacaaatttttgaagccttctcgggctagctggaggaagaagaagactttatatggatggacttttagtcccggtttgtgttaccaaccgggcttaaaaatcgccatgatctttagtcccggttagtaacacaaaccaggactaaagatcaccgggggcctaacacaccctgacaactggcgaaccaggatgaaatcttcccgttgaacctataaaccgggactaaaaattgtttttagtctcggttttttggtgaaccgggacaattgtggtttttcccctacccggcaaagatcacttctccagtagtgaaaggaccacagaaatgttgtaaaatcactggtagcatcatacagtataggagccatttcatttcgatattactccaacaagtctgtcagcaacgccttcgatctctaccatgattcaagacactacaaggtgttactgtttcttggatgtcttctaaatcagtcgtcacccatttgtgatacttttgatgctgttagcttgtatttcctagcacctcccagtcctagatcgatcaacgatcgatactcctgctatagtttgatgagacatgtaggcgtgcatactagcgaaattgatctatatatacgtatctgctagctaggtagaatgtacgaatgagagataattaatgttgctgccatagttgaattgattttacttacttgtttggccgttgggacgatgcattatatatatacacggtgagaacttgtcattggcatcatatttgagcaaaggagaagggaaataacttgtcattggcatcatgtttgagcaaaggagaagggaaataaacatatatgtcgttcattattttattttttttttgcattttaatgtactcaatttcgatcgtataccatctctgttatgataccggttattaactgcatctagtcagcttgagaagcctagctaggaattcagaacagagaattataaggttcttgagtactaagtacaataggtaactacacatgtgcagaacaaaaaaaatgacatataaaggatcagcagagcgcctcatgtttcccctttctattaattctactcaaatgatctattttatcttaatatgaggtgctctgctgatcctttatcaggccaggtcctttgatcaaacgcttgtgttaagaagacgcacggactaatcaggtcgttcaacccaggccttgatctcatagttggcttgtcattctgcaatccgataatctactcaaccatgttagtgttgtttctctgcatgacaaggtgcaactctgctcatgtacacatgatgttatggctcagtagttccctctgcctcccaggcctagctagctacatgcagttttggtatatctaaactgtaatgttcatgcatggctactggacaaatggacatggaggatgctgcttgatatagataaaattcatcgagaaggaaacgaagtagttggtctggtccatccatatgtccacctaaggtaattatagaccactcaagaggattttcgggcaggctcttcatcctgcactgttgtcatgtaaagtactcgttctgaactagctagcaatgcgcgacatattccaacaatttttaggatgcaactttcgaagtcttccactttcagactatcaaactttagcaatacaacaaaaattacattaatagatttatcaaacaccaaacgctttagaaacagtgttttttctttttactgtgatgatggttcattcagcattgaattaagcatccgaggaaaataaacttatgaagataaatagagcaatgtgcagatctatgttccggttaatgctaatctagtcaaataacatgaaattaatcaattctaagtgaaatgtcttacttgactagtctttgatatcagtcattgctgctcgccccaagctattcaacctagactttcagttagatcgagtcattgatctcatcaacttccacatcaaagctttgttcatgatgaacatcgagagattatcgatcgtcaacgttcacattgttcctgagtagttcaagattgagttggattgaatcggttcaaagatttctagtaccttcttgagacccttcgatggtttagaggtcatgtttctttttactcgatatccacatctttcccaatgcctcccatgccaacattgcagatatgtatgtattatgtaaacaaactaagttcatgttcgggttaccattttgtatgtaagagattaatagatgtgtggttcttaagaacaagaaactaaaaagttgactggtatgcaactagctagctagaaataggtatatggctatatgcctcgacagtaataaatgtgtgatttcaatatttgtctagcatgtttatgttagagagattctagatgtttaagaatgagagggggaaaaaaaaggaagagaaggatggaggagaaaagagataggggactaggaagaaaaattgttggggagctaggaagatatagcttcagcattttcttcagaacaaagaatacttgggttgtattctgtagcttgaaagttaattacatctagttgggttggaaggatggaccatgtctactgtgtaggtaactacacaagtgaacaggaaaaatgatatatatgagcatatatagcacaggttgatatggattaagtgtattcaggagcaagtaattggtccaaaatgttgcggtacaataataattatagtgcagtcaaaattttcggttagggtactttcgtgtaaagtaatcgttcttaacaaacaagcaatgtgcaacacattgcaacatttttatcagatttatcgaagtcttttccacttaatttgcagactaaaaaaataatccaataaaaactatattatctgatttgtcattattggaaacttttacaaatatatgatgtgtttatctggttcttgtgaagtgcatgagacaatgagttatagcatcttcagaggacagtaaaaatgtggcacaattactgccaaccatctttcttgatgccggacaaagtgcagaatatacgcagagtcattccatccaaattttgatacagctatactactccttcaacagacttgatgcgatcttctttaccatgattctactgcttcagtaaatattttcagaaggtgtacgcaactcttgttttgcagttgggccgatgcattacatatatatatatatatatatatatacacggcgagagagaagttatcatttggtttgtgcttctattttcctttgttctcacccatacagaggacgatcaactcgaacgtatagcattagactgtcccattatggcaaggtcaaacatctccgaggacatggcatcatggatccctggttcactgtgcctccccttcctagctagctgatgttctgatatgtacccttgctgtataactcgtgcgtagtctacaccaaggtgaagttgtgggcctccgccatgtaagttgtgagctgtcggtgcatcgaccactaggagatatatgatttttaatactggttgtcaacccctgttaattctgattgtagcaattgagagaagaaaaccgagacaaacaaggaaatggagactaaagttgttaatttttagtaccggttgaaggaactgatactaagatatatacaagtcaaaaatatgtggaatgtgggattccaactcacgatctctcatctcagcccttaagagcgttaccatcgcacatactacacacatctgagttctctagtagtggactcttaaggaaggggtcattgtaccagcccaattcatttaaagcccctgtattagtggtgtggttttggcccaagtgactgaggtgtagatcgattagtgacatacttttgctagtttcatgagtcgtgtgggcatgaattctagcaaacattatcagcctcatcttttggcttatgcttatgcttacgcttataagccaaaatttaaatttttaaccttaaatttagagttgattttagggcttttttatcgtagtttatttgtcagcctttgcttttagatcgctaagaacacgtatataaaagttttatttataaatcattatccgtttgtaaatatgccgtttcgcttatttcgtcgataagcgaaacgccggagtcctatcaatatgtatatggtagcacacattccaacaaatttctctgtaaaggagttgtactttgaggtttccgaggaaatgtttctaatttatcaaatgcaaccagcctacgagctttagatatcggactacgaaaatacgatgtttttctatggttctttgggtgtgaatgtgatattgaattagatgaaatatataaatgatgtaatgacattgctaataatcatgctaactaaaataatcgaaatatatagtaaatgcacaacacaatatcatgaacacaagtacattgtacgaccctatgccacaatattctcaaagccttctctgtccgtcgctgccgatgcatgaccattttggccccatcgccttgtatttcctaggtccgcccagtcctagatcttaattttttgtggcatgcatctagagcacatgtttattgatcttagttttggaaaccgtagtactcattcttcaccattgtaccactcttgctcgactcttgggacaatgatttatatagctgaaaagtttagtccggctttattttttgtgcaaaggaaaatcaatatcaatatcatcacttgttaccttctaaagtgctcattttttatactacttgtagagttacttaaatgaacctttcatttaacagtgtttttgattaatatagcttgacttagtggtggctgactgctacttaattatctctaaaaattacaagtgctttgagatttgtaaaactatacttggagaatgtgagagcatcattaaagtcaataaagggccagccaagatatgtgtaaacgtcgggtgaggatcctctaacataatatcattatcattacagttactggtatgtagatctcaccctcctattgccccacatatcattgtctatattttttttaggaatgtcagtacctataatggtagtgacattatggtagaggatgtgaacccgtaaacatcatagaacttagctatgtttacgtatatttgactagatagtggttaaatcctacgcttttcgtatcaattcctccctctttcctctttcaacactttagcctttttatcatataattgaattgaattgtcttggcaattagcatttgctctcttctaggacctaaaagccccgatatatcctactaaacatattcccaccataggtttagttctttctgtttgattctacaaatttaataaccaacttttgatgaaagtcttggaagagatatgttgagaacaacagagaatgatagcattatagctcatcaacataatgcaattgggaacaacataatttctagccatgaattcaaattttatcgtacaaggtgatgattaagtaatagctcaaatccggagtaatactcccttcgggctgacaatattagtcgctttgaacaagggtaaagtcaaactttgaaatctttgactataaataatttccaaaatatttatcttaaaaatatgaaaaccatatgcgtagagtagtgttaaaaaatactttaataaaatcatatatgttttgatatttttatatattataataaaaaatagttgttcaaaccacaagtattatcaacccagaaagagtaaatatactagaaaaaatctgcgcgcctagtggcacgccgataaattcatagcatgtatatcttattttaggactcatctacaatatagaaaatttacctacctttttttaattatttgttactctagcaaatttcacatcacacaagaacttactgcaaattaccttgttatgctcattaactatattttaatagtattaaaagcaatgttaactttgattaccagttatatgtggcattaatgaaaggtgcagatagaggatcacaatctaaaagttgaaatgtcagaacgatatgtaatttgatacggacggagtaatatatttttacatgagtaagtttcacaccataaaatatcattcaaaagacaaattaatggaatttaattttgtgtttgtcccagaagaaagaaatttaattttgtgtttatcctgtaagaatgagaaaaaccaaagtacgattgtaattagtgattgccaataactttacttgtgattagatttgctaactaaaaaattaaagttatgtttcctcaaaattgttgcgatttcattaaccaaaatattatgcatatagtatcaattgtaatatagtattggaaagttttcatccaatctttcaacttatttctgttatttagtttttatttctgattattatttatttgtagaaatatataatatcaatatgtatggttaggtacgcgactcagtttcgagttttcaccataataaattttatttattcagatggttttgacaaaattatttatactttttttctatttttaccttgttttatactatttctgcttggtcctaactgcacaattaacctgacaagacaacaatgcaaatgttggcctccggacaaccaggcctagagctgactgggctgtgcaggccagcatggtgtgagccggtgcacacgccaataggcaatagcctttttttctttcacggtgaaacggcaaagccataacacattcccaaatagctactacctccgttccgagatatagctatttctagcataatgttttatcataaaatgaagctatttttacacctaccttgtcctgtcaaccaatcacaaccattcttctcacctacttcctctttttaacaaatcacccactttctctaatcattctcacctacttttttaatacccgtgccaatcttaaaaatgactacattttgagacggaggaagtaaaaaactagtccagagttgccgtgtggaccaatgaaatgctggcagaacggccggctttggattgatagatagatagatagattaatatgtgaaccaatgaattgttatacacatctgcaccaaatatttgtgtatagctgataacgtaggttttaggtaatatgaggtgatgttgatgatcaaggagtaaacattattgtgatctcagaaagtacgagacacttcatccctctctgcagaacatcgcccacactttcctcatgctttccaagccaaaattgtttgtctcttcaaaattgggtgtcttattgatcagctgtttttagtatgtagcagcatcagagatgacctaagcgagaattaggacagagcaagagtgcaaagtaaagttgtaattgttttatcaatgtgttatcactgtcttttcttactgatagttaagatagggttcgaagatagacagtagaagctagcagatggaaggctaaagaggaaagctttggcgaggcaggagagaagaccataagagacgatacaagtgaatgaaagggatcggttgttttggtcgtgcattgttacaccttacagctacaccatatatttatgcatggtcttaagatgtatccataagaaatagcctaacagatactcctaaccatggttaatcctggtctcttcttgtaaaaatgaaatcattgtgtctacagatatggtgttaccatgtattcttagtttgtctagaggatggaaattatacttttatttttaaaagaaaaagataacatctaacaagatcgataacactaagtataagcattcaaaaaaaactaaaccaatcgttcatgatattaacagcagtcaaaaggataccaatttcagcatacttattttcctgacgcaaaaacagagttaattttcagtggcgcatgagtaatttaaactcactatgtgacaatactcgatactgtgtatgtcggtcaattatcccacatggctaaagtgtaaccgatgatgtgaacacgaagagaataattacagttcatatcagagttgtgttccaatattcataagctgataacagtgagttctctagaaacccaagtgttgcaagtggagaagaatgacctgatatcctttgtgtttttgtttgatgtccacgacgaccgagcaactagctatctcccaatgtcgcccaatccaaaattttcatggtaccatagtgcgcagcaacgggaattgtcgtaggctctccggaccttccattatacttgagagatgaaatgaataattcaagtcatcaaacaagcataatgaaacatccgacgcctcgagagaggaatattggagacattgctagtcctttagcctgccagtcaacttcagcctgagatgtgcccctcaaaccactcgaaggtagcgaccagatgtgttatacattcaggagacttgacaaaaatggctaaagatctacaacatctcaaatattcttaactcatactcatgtgaatctagttcccaggatgtgcactagattcacactttcatcttaagcatgattatacatagtaaacacaactaagatgaaagaaacttaagacttacaacagcttaatagatacataggccgaccggccaaataaacttattagagaacgccggaagcttgactacccaaacacaagcacaccgactaggggtttaccccattaagttctcatcctagaagaagcaatcggaacccgcatcactcaaagactaagtctaaacctgcaaacaaagggttatatcaacagcaagagtcagtacattaaacaagttaatgtactagcaagcacaatacaatcctaatatactacttgtaagacatatattaaaatgaaggcaatatgtagttcaatttcagcataaagcaagttttatttcgcaattcttttgtaaagaagttgatgcttcaattaacaaaacaaattttaagtttcaacattaaatccatcataattccatcataatcaatatcttgttgtcatcttttgacaacaagtaataatatatcaccacacacacaactcaacacatttatcaatttcaaaccaaggtcacatgttcacattttcaaacatagtctatactcatgacacttcaccaaagcgctcttgaccgtgagcacggctaatcgattagtttaaagaactctgcagaatttgtacacctttacccacatgatgtgatagaagcccggaggctacactctagatggttcggtgccggccaagcaccccacactctacattatgagtgcggactagaggtcacaacgaagcctttacactacttagagcctagccttgcaccatcacgatacgttttcctccatcctatgcatacttagaaatatgtctagaaccgttaagtggtgggcccacgccttaaacccacccacgtggcacaataccgttgtattggacagacttagtcacctaaactaccacgtcggggcaaataggaagttcctctgaatcatcgactaattcctcagaattatcgactaactcatacacaccggcctaccagaatgcaatgctagttctaaatagattaatcagcttaggccatcccatactagtacatgtggatgtacgaataactttaagttggtgacacaagttcggtccttacggtccttacggacttgggcaaacactccccctatcggcatgtaactaacaccatatgcacaccacttgccgcccaagtctaaaatcacattttacacattttagttcgtaaatacccatcatattcattttattccagcaaaggttcacatatgaaaatcacattttaaatatagatggaatgagcatttgcatatttctaaatatggctaagcaagtagttgcacatagagcatatataaacccatttgagcacaaagagtgtgctctaaccatttctaggggttcaaacagcaagaggatcaattattcaaggtagggaatgcagcaaataggtcgtaacaccttaacccaatttcaaataccgatataatctaattcacgggagacatccctctgctctagacagagtagagctagctcgagctcgccggcggcaaacggtggctcgtttgaggttgaggtcaaaagataaaatgaagagaaagctctcgcgattccattcctctagttttcttggttaggggacatcggagtagcgccgatggcgagtgtgagcggaaggtgttttcaggtgatggtgcatgtgcatctacagtcatgaattggttaagggggtgcatgcatgtgagtatttgaggttcatgggtatataccatggtgttggccggagttgatgaggtccggacgatggcagcagacacgaaaatggcttggcgacagcgcttcactccgggatgacgtcgacggcttgatctaccaatccaactagcatgcataaggtaatacgttgttaatcgaggtctcacggatgcttcttgtgcaaagaatc

SEQ ID NO: 10867 - DNA, 4962 bp, Oryza sativa
ggcgctccggtgcgtgctccagggcgtcgtcggcgtggttgcgttccggtggctgtgaagcacaaaacgggaggtggtcaaaagagaaatggttcggcattgtgtggagagaagggaacgcgaaaaacatagagatgacctcgactcaatcggcgttggcgaaggtcatcgtcactacgaccggcggcgaggttgaggatgacggagaagctgaggacctctccctcggcttctttagctccagactgatgtgtggagttgggcgactcggtctggaggagatggaggcatgactcagtgacttgaaggcatcgacacgtcgtcaccacgcgtcgacgcgtccacgactcggttggttctcgatctctccctctctgtgtttcttggtcggctgaggatgagggacagaggaagggcgagctggagaggctgccaggtggggccaagtcgatggaagctaggctaggaagagaggtatgggtaggagtttgggtaggcttagtttttggataattttcggaattatttcttccccctaagtttgcaactcaatatcttaatatgtggaccagaagaaatagtgtaaattttactggtggcagatgtttatatgtagattccattttctttggttgaacttaaaaataatgggtagactgctcacagaaattaaacaaaaatgggctataagaaagctagattgaatttttaggaggcttaaacagaggaggaaaattctagaaaaattacatttattcatgataaataatctggtatttcaatgaattatttcccatgttcacttatgtgcagttaaatgttcttttggatgaaatatggttttagccgattaaaatttaatttcatttcttttagttgtctactttgactgataaatttgaggtatccacttgagtgttaacatttgacaaaaattacagaggataagtttgtgctaatcactatctacataaattttttcatgattttatcttgcacaaaatattttagagaattaggatgacctttgtttgtatatgtgttcccacttcataattgcatctaatattattatagggattacattaaacttcttttagactgagaagatgatatttgagtttaataataagtccacaagttatcacccaagattaactataggtttgtttagtgaaataattcttttagattatgctcatgggacctattatgaaatgcaagaccaaaactccaaatgcacaaagaactcgagcctaggcatgcattatgtacatgtatgctcatatgcttggtgacatttctagtctaatgttgggaatgaaaagattttattttgctctcaaattttattttgctcggatccaggcatgtttttcttttattttttcaccgttattttctaatttttttaatctttcgcacacctctttacaaatgtagagttgaaagtttttaattttgacttgaaagttttaaaattttgtgttgaaagttttaaatttcgagttgaaagttttcaattttgtgttgaaagttttcaaatttaggttaaaagttttcaaatataggttgaaagttttcagaatttgacttcacgtataaatttcttttcaatctattacttaaaaaaatattctgaaaagaaaaacaaatcttatcttaattatctttactatctgaaactaatggatttttttacacgctaaaactaatggattagttacgcggtaggaaaaaaaatccgaaaaaaaatcgcaccgatgcgctgtaccgtgcgtacgcgtgggctgtgggcttgaagtgtgcgccggcgacgcgtatgcgcgaattaggaattctgctcactggaggctgatactagtcaatgctgatgaaggtgctccaagcgtggtacataaatagtagtggtgtacgaggaacgagggtaaaaaggaaaaccttacattgagatggatgatggaaatgtcagttgtagttacggtgacaggtagtccataattgattgccattagtttttaaggcttgctttgcaagcttttaggtcagatttttgaatgacaaatgaaatttaaaactgaaatatattgtttatgacaattttagaatttttgatgaaaggatgtattcaaaatcgtaaagttgaacaacaataaactgtatgccaaagcccattttgttaagaggagaaaaaaactcagctatgagtctctgcatatttcaaaagagtaaagtaaagtaagttgagtcattagtacatgattgattgaatattaattatgcaaaattttataaatggattagtctggttttcgaaaataattttctatataaatttttgcaagacacaccatttagaagtttagaaatagcgcacgtgaaaaacgagagaaatattctaccaatcggccggagccaaacgtggccttactgtaaaatcaaagtgttttttattcttactgtacaatcggcatcggacattattgtttttgatatttggagattattaacgaagtggttttggagatgattgatttgcaggtgatgaacagggttgttgtttttgtcaagaccagtcagatcgggctgtgcttgctggtcagaccagagttatgtgcgcggtcagaccggccagcccacggtctgactagccgactctgtgtcggtttcggttttgggttgtttgtttgtatatctgtgattgtttcatatttatggcttctagatggatactatgcatatgtaatactgttgtttgctaacaatgagtcaagttggagatagcttggtctcgaaatatggtttctttgtttggctcatgtgtaggtgatggatcgggagtcgacctggggataaggcgacgtccgtgacggtcagatatcgtgcgggatacttaagatagagttcaatgcacgtggttggtgaagattccatatggcatacgatggaggtattgtgtacgtatgggatgcggagtcgaattagggaggagttcaaatttggtatgattggagtttgtaaagtttgtttcttgtatgagaaggtttcctaggtggattaggacttctagtatgagttttcttcatggctttaggctgcctaccctaccctcatgtataaatagagagggagcgtgaggcttcctagtatcgcttttgagagcattgagttgtgaataagttagggtttcgagtgtagtcaacattttcatgaggagtgttgttgttgcactttgtaaatacagagagaagtaataaagttgtgatctacattgagagttcttcgattttttatctcgagtgcggcggtccaaccggcgagttactagcggtcagaccgacggcatctggacagtcagaccagtggatcaacggtggtcagactggcagcggcgataggaggcagcgacaggttttggcgttagaccgggtgatctataccggtcaaaccgacgactcccatgtggtcagaccggcgcatctacttcggtcagaccacaatccgtcgaatttgagggtaacttttaattccgcaaaaagtttggggttttgggtataccaaccattcaccccccctctggttggcttagttcttgtgttttgatcctacaagtgatatcagagccttgttttcttctttacattttaaccgatctagagttgttgccatggctaataagcttacaactaagccccatgttttcgattaaacggattttccttgttggtgtagtaagatgcaatcttacattatggctgaggatcttgatatttggagaaaagtttctaatccttatgtgattcctgatcaaactaataccgctgctttaaaaattgaatttgaaaataatttcatatctcgcaatattcttttgagtgagatttcttattcggattttgatcatatttcacatctccaaaccgccaatgagatttggattactttgagaaattttaatcaaggaactaccaatattaaagaacttcgtcaggatctttttaaaaaggagtacataaaatttgagatgaaatctggagaagctttggatgactatctttctagatttaacaaaattttgagtgaccttagatcagttgattcttcttatgacacaaagaagtttctcgtcactttttgaatggtcttgacatgtctatttgggagatgaaagttacatcaattcaggagtctgttgatatgtgtactttgactttggattctctttacacaaaactcaaaacacatgagatgaatattctttctcgtaaagttgattctaaatctagtgctttggtttctttctcgactactttgaatgttggtgcttcttcatctaattctactcttattgctttaattaatgccatctccgatgagcaacttgaacatttcgaggaggaggacttggctttggttactaccaagtttgcttgagctatgaacaatgccaggtataggtgaagaagtggtccaaactgttgctttgaatgtgatgctcttgatcacattcgatcacattgtcctatgcttgggagaggcaaaaaggaagacaatggtggagagaagaccaaggagaacaagcccaagagcacgttcaaggggaagaagactaaggagattctcaagaagttgtttgagaaagtctataccgcttttgagccattaagcgatgtagatggagaaagtgaatatgaagataagggaaagaacatctccgatgtttgcttcatggcacgtggtgaatcggattcagagtgtggagacaatgaggctttggtggcgaggtaggagaacatgtggatcgtggattccggttgtccgcggcacatgaccggtgataaaaattggttctcctccctcaaacaagcatccaagatggaatcaattatctttggtgatgcttctactagtgcggttcttgctacagttttggtcaaggtaaatgacaagtttgaattgaaa

SEQ ID NO: 10868 - DNA, 10637 bp, Oryza sativa
catcttcaaatatggagttttcgcgttgagtgtttctgttcacctagatgcttcggctttctggccgctgtctcacctagacagtttgaagacgattatatgtaaataatgtaatcttctctcttcttaataaaatatggacggtctaatctttcggcagtcctagaaaaaaggacgtgacaatgatgtctttactccatgtatgggcaccgtggatgctggtcatattactgctcagagggaacttttgccttctaacagtggcgagccctattaaggttacctacgaaagttgatgcgcggccagcccgaagaagactttagtctgaattcctacacagttggtgcttttgctctagtttcctctgatgtttcctggtgctatgagtatagatgaagcagtttgtaccaaacaaactctgtaaaacatctaaagaaaggttaattagttaattttgtgtaaagtgtttttctaatttggttaactaggattattgtgacctgcaagttatgattggaaagaacttacagagataacacaaccttttctctccacgtctgacaccattatctattatatactaaaatccattaaacttcctacaaacgctcttaaaccgcaaagtggcgctcctataaatactcttagatcgtcacatgacactgcttaatctcaccgtcgattttcacttaaattggtggacccaatattttagaccataagattagatatattattttaaaaaataatactttcctcctatgggccggaaaaagaagtattcaatacgtacgtacatctgaaagaaaaacattaaccttaccaactgttcactggatgagagaggaaagaccatgtacggcttatatatatatgatgaaaggttatttttaaccgttagattatatctattttttttaaaaaaaactcacttcttctaatctcccgttcactactgctcgtaaaaaaacccaaaatacaaagtacatgcataacgtactataataaaagtagattaaagcaaaaaaaacataattatatttgtgataataaatttaaaataatttaaaaaattatatacataattgtattagtactcacttcttctaatctcccgtacacaaattatatacatcaatttaaaaaatacacccacttccctctcctttccactttttccatgtatatgtgagaacataattatatgtatctattatgtaagtaaaagtccattaaactttttacaaacgcttctaagctgtcacgtggcgttcctataaactctcctagatcgccacatgtcactatttaatctcaccgttgatttttatttaaattggtggacccgttattttaaaccattagaatagattagatatataagtaatatcttcctcctacatacagaagaaaatgcgtacgtgtgattaattcggaagaaacaataaagcttaggaacgataaacacctgaacgttccatcacagcaaacagaccatctttattgggtacatcatgcttggtggagttaatgatcaggagcagcatgcccaccaactaggtaaattacttgaaacgtttaaagcggcgtgagaaactttctgttctttctgcttcatttcatcctgattatcttattaatgattcttttagatggttggaaaatcttcatgatcatctttgcggtttacttaacctggatgttcaatcgtttaatattctaatttctgcccacttgtattatgatttatgacccatggtccttctgttgggtcacggagtatttgtttggagaattttgtattatatactgaaattctattaaacttgctactacttgctactaacgcttctaagtcgtcacgtggcgttttctacagaccactctcaattgtcacctgacactatctaatctccccgccaatttctcacttaaattggttgacccgttattttacaccattagattacatatatacatatcctcaattttcttttaaaattggtggacagatcattagattagatatattatatatacataatattttcctcatgtatacaaaataaaatacatatcattggatcggaaaaatagtacatatgatttgaaagagacaataaagctttcgtcttaggaacgataaaaaagataaagccgggtgtaaaaactaaagccaaaaaaaatacgtacatagtatcatccaaaaaaatcaaaaatataattttctgccatatacgagaaagaaaacaacccatacgtacatagaaccattggaagaaaaattaacgatctttaaaatataattttctacaatatagagataaaatatattattccactaatacacattgttaaactagatctatataatcggtctataaacattcacattttaaaatattttaaaattatgtatctaattagtgatctttgttgtattcctttaattaaatgaatattataagacttataatatgtcataaatacatcacgacacgtggggccgacaaataataattagtgctatgatgcgtttttttaataatttcacgttatattttggtgtaaaaaatccttaacaaatatataacgctaatttaaatctacatatgtaaaaaaacataaaaaacaacaaaaaatagttttttcaactatctttaatttaattttgatttatttgagattaagattctcaaagttttttttgaattttttataactacttgattggtatttgagaagtgagcagcacatgatacatatatataaaaaaatattttcatccaatgatcttgatataatagaacaccttaatccatcatgagtatgatcatatatgtatgttttattctctttgccaaatagttttgataacaaatcaagtaatatgtgcaacatactactaatcatgctatatttttttatagttgaggaattccatcatgttatatgtttttatagttgaggaattccaacatatgagacataattgatggatgtatatcagacataattgatggatgtatgcgatatatcccaccgacgtgactataagtattatctcacaaattagttatatattgtaaataagttttgaaaaaaaataaatacattatccaaatgattaaaggtgtctcatgtgattatcaacgataggtgttgaaaagaaaccaaacgctaaactatagatatttgttaaaatttaaataataagatagtgctttgaagattatcttggtggtatgtcttcttagctataattttttagtaccaccgaatgaacctcggtcattttttaaagagaatattttgtttatatcatacttatttatgaagtaatagttaacaccataaataaatggtgtttactctataccataaatctactcgaaaattaaaacaaaaacactattctgatcacattcatcttctctttgtcctttactgaagggcaccaagcatagacaacagagtttgctacgctaacataagtatagcaagggcaaacatatggctaagttgaagtgtgctagacttactatttatcgatgccatactccatgagggtgtggtgtgaattaggcattaaagttgtgctcgagactggtatggaggggcaccactatatcgatacaagacccatgtttcaaggaaacacacagaaagtaagttttgctgctacaatcgacttcacccagcagagggacatttatatttcactttaacgatttggaaaataagtcagacatgaacacttaggtgcagtggataatttagtgtattaatgatctattagacttattttattggtatatatatgcagttttatctattaataggtacttagcttctaaactatgataatgagttgaagtgacaacccagacaaagtgatatgggagacatccttatcatttatatataataaagtctacagtttgaagtgacaaccaggacaaagtgatcttttttaatatgggagacatccttatcatttatatatattaaagtctacagtctatttcacagcgtataaatgatgcgatataacttatattaacatttttttcattaaactataaataagataatgatgcgatataacttatattaacattgttttcattaaactataaataagatacccgcgcatctgcgcagacttcctttctagtttagctaaagctagtaacacattcatcaacattcacaagagtttcagccttccatgagaatatataactactagagaaccaatctttactcgataggcaaaaatagaaaatatgtcagatgtttaacgaaccagttctaaagaaggtctttagcaccggttaaaacacacaacgacacatcgctatcttttttatcggttggtaacaccaacgggtactaaacaccatctttagtcccggatcacacttgtcagaacatgtcaggcctcccgggatctttagaaccggtttgtggcaataactgatactaaagatcactactttattaccggttggtgatacaaaccggtactaaagataattttgatctttactactagttggtgttaccaccaggtactaaagatcgttgctttttatactcttcttccttctccagcccgagccattgttgcaagtgaaagaaggaggaagagagaagctgccaactttttttttgaaaatattttggtgaaattatacgaatcgaagagatttaaaaggttagcaacttcatcctctatcgatgcatggttaacattttacctttctagctatgtttatatacattattatctcaaataggtatatggaaaaaagatgagggagaaaaattgtttagggaaaattagggtacatcataaaattagaaacatttgtatggaaatgtttaaaaaagacaacaaaggaaaagtatagaaaatgatgaaaaaagaatagaaaactaagtccatttgaaaatcattaaatagttagaaataagtagaatgcattaaaaatatgtttagaactttaagaaaacttaaaaataattgaaataaggataatacgtggaaaatgtatttacaatttattaggacagataaaatttttaaatagttaaccatgactctgattaagtccatttaaaactcgttaaaatcaatagaaataagaataatacactaaaaatatgtaccgtctattctcagtttagttatgatgttttacattataatattatgattgaatgagttttactttcatggacttcctttacatttgttatctcccgatgcggatgaattggcaatggtgtacaccgtggaccaatggtcgaaggagtttattgatggcgtgcattattttttgagtgtggacaatgcctacaagtctaagggttttatatgttgtccatgcacaaggtgcaaaaactagaagcattcttcatcaacagctcttaatatccacttgatgcaattgggattcatgcctagctataactgttggaccttgcacggagagttaggggttgcaatagaagaggatgaagaagaagacgataacatttcggactgggttcaatacggtggatttgcagaaaatacaataggcgtggcggacagtgctattgaagaaaacaagggtgcggatgatcttggtcggagttgtgtgacgtaaagaaggactacgaaagtggaaaggatgtccaaaaattgaagcgtatgttagcggaccacacaaaatgtcattgtacctagattgcgaacaagggcagaaaaagttgggtaccatgctgaaattcttataatgcaagacaaaaaatggtgtgactgacaagacatttggcgtgttgttgaaactcataaagaatattcttcccgaggaaaacaatttctcgaaacaacgtacaaagctaagaagttagtctgccctttaggactagaagtccagaagatacacgtatgtccaaacgattattgtaaaatcaaaggtgtatttgattattattctgtgatgaacaattggcatcggagattattggttttgttatttggaatttatttgtgaagtggttttggagatgattggatttcacaggtgaatatacaggtactgctgtctgttgggaccagtcagaccgggcaggtgttgccggtcagaccggtgcagcccgcggtctgaccggccgacgctgtgtcggtttcggtttcgggttgtttgtttggatatcattgattgtttcatgattatggcttaaagatggatactatgcgtatgtaatactgttgtttgctactaatgagtcaagttgatgatagcttggtctcggaatatggtttctttgtttgttccatgtgtaggtgaattgatgccgggagaatatttgcggtgatggaccgggagtcagcttggggataagacgatgtccaaggtggtcagagatcatgccgaatactaagggtagagttcaatacatgtggaaggtgaaggttccatatggcatacgatggaggtattgtgtgcgtatgggatgcggagtcgaatttggagggagtccaaatttggtataattgattatgtaaagtttgtttcttgtactagagggtttcctatggggattaggacttctagtatgagtttggttcgtggctttaggctgcctaccttgggtataaatagagagggagcgtgaggcttcccggtatcgcttttgagggcaattaagttgatagttgagttagggtttcaagttttgtcgaaaattttgtaaggagtgctgttggtgcactttgtaaatacagagagaaccaataaagtcgtcatccactttaagagttcttcgatttgtgtttcacccggtttcggcggtctaaccggtgacacaccggctgtcagaccggcggcatcacgacagtcagaccggcgggtgacctgcgatcagaccggcgtcggcgacaggcgacaggagctaacgtcggcggtcagaccggagatacaatctcggtcagaccgacggcaaccaggcggtcaaaccggtgcatctacttgagggtaacttttatttccgctaaaaattttggttttgggcataccaaccattcaccccctctcttgttggcttagttattgtgatttgattctataattatatcatttattgcggcgtggagtacgagaacctagttgcatgcccagttcgtaaggcactacgatacaagatgactccagtgatgttgacggaaagccttcgaagaagagagttccggctaagatgatgtggtatttcactaccacggctgccctaccatctatgtctggtcggctactctccactccatgaattgcactatctgcatgcccttaatatcaaggtgtctccaaatccatgctctttgactggtgaacataaacaacatgtggctggaaagaaacatccagaggaaaaaaacatgtgtgccactatacaacacatctcatcatgaccttttctttaattagagaatggaataaaaataccaaccaaagacataaaaaagaaattaatagtcacatattattaggtttccacacaaagtggaattaaagaaggcatacaacagcatttgcagcagtgaatgaaatacaaagttgactagtctatcctagggttggtttggtcgtgtatcaccttgtgtgatgctatctgttggtgtatttttgttgtatgggttgttgaatccttctcaatgaaatgaagcgtaactctctgttcttcgggacaaagagaaacttgagagcatttgttctttcaatgctcatttgccaactcttgctggagttcgattgattttccctgggacaccactcctgaatttcatcggatgattcaataccagaaagcttcttttggcgccacctgttttatggaaatctttctggtagctacttggctgctttggaaacaaaggaatgacctcattttttagggtgtgcagcccaccctgtctaggtggaatttttgtttaaagaaagaagtaagcctacatttacttaggcttaagctagtttctagaccctttctccaatcattgattaactctttgtaattttgtaaagctcttttttgttatatatgaaaatcaccgtgggggctcccccactttttgcaggtccaaaattaaaaaaaaaaagaagaaatgaaatatcatattttaaatataactacacacaaatgttagacctccaaaaccattcttgttgaatgtatgtatatagctccatgaaaaacttctccaaagtgtggcttgcccaacatagtcatcctccaatgtaattcctctcaattgggaagtgactttggtgtggtggagtaatcgtggagcaataaggttcaaattctggagtaacaaatatggctggtttgggagttatcaagaaaacagaatcgggttaaaagttgagaagatggactcccggtgaggttgcatctgcgtccattatattgtcattcacgcttgctgctagaactcttgcggacaatcgaacatagcttgtatgatcagcatgtaaactccactctcattgtggctgttatgtacgtgccatctatcctctacgaacaaatcaaattggagatgtgaagtacgtatattgtacaggttgaggttgtctttgcgttctggtgggtaactcagtagttttcaatgcattgcagatcagcctcaattgcgatccaagcatcaagttttaatcgaaaattgatgaaactactgtttccgaactcagaagcaggaccaagatttttttttcttttgttctagtatgagatccacgattatttgttctatatagggtttctttaaagctagcatacgtacatacctctgcacataagtttgtcattaacgaaactgcacaaggaacacaagcgtgtatcgtagttaagtactaaattaatgtcatcaaatcaataattgaatatattttcataacaaatttgtcttaggttgaaaatgttactacttttatctataaacttggtcaaacttaaaagcagtttgactttaaccaaagtcaaaacatcatataacctgaaacgaagggagtagatagttgtactctagataatattttgagcaggttcttgtaaacaattttccggttgcgacatggatatattaaaacttgtgcttcgaaattatattagttccagctaggtttgctgctaattaattaagctataaagctcagaaatgtcagtgggatgcatttttttgccctgctaaacagttgtgcaatagctctattcatctgaagcaacaatcatgccctttcttgtaaaataaaagtgtggttaattgttattttgtgatgaacaattggcatatgagattattagttttgatatttgaagattattgaaaaagtggttttggggattattaaattttcatatagtgaacaggaacgtgcgatcagatcggccagcccgcggtctgactggcggatgatgtgtaatactgttgtacgctaacaatgagttaagttggagagaacttgtgctcggatatggttactttgtttatacatgtgtaggtgagtcattatgcctcgggagagctttatcggtgatggatcgagagtcaagtttgaagaagatgatattcggacgatcaggatatcatgcgggatgctagcttaggctaaagatcaatacacgtgattagtgaagattttatatggcacaaacgagggagatattgtgtgtgtacaggatgtagaatcgaatttgcaataagtccaaatttgataaacttggagtttgtaaagtttgtttcttatatgggaaggtttcttagggcattaggacttcttatacaacgttggttcgtagctttagactacctgcctcgggctcttggtattgatctaaaactgaaatctgccagtcacccatctcacttctctattagattatatggttgttagagtcatatctatctattatatactaaaagtccattaaacttcctacgaacgctcctaaaccgccacgtggcgctctacaaacgctcctaagtcgccacatggcactatctaatctcaccgttgattttcacttaaattggtggtcccgttagtctacaccattagattagatctattattaaaaaataataacctcctcatgatctgtacgtatgtgtttgtacgatactactgctgatctttccatacgtacaaacgtaatgtacattatctttcctaatcttgctcgaacccaaaaaaaaacgtacacatgaaaaaaaaaagacagaaaaaacatacttccataaaaatcgatggttttaaaaatatgattttagataaaatatattacttcacaaatataaatatatttagttaaataatgatctatataaatatccaatcaatgttctcaaaaccatattctaaatctatctatctatctattatatactaaaagtcaattaaacttcctataaacgctcctaaaccgccacatggcatgctacaaacgctcataggctgccacttggcattatcaaatctcaccgtcgattttcacttaaattggtggacccgttattttataccattggatcatatctattattaaaaaattccaactttctctgtatatgatttaagagcta

SEQ ID NO: 10869 - DNA, 705 bp, Oryza sativa
ttctcctcgtgttccgcaacaaaacgatgttgttgaaagaaagaatcgagttttggttgagatggctagaataatattggatgagtatcatactcccagaaaattttaggctgaggcagttaacactgcatgctatatttcaaattgggctttcttgaggtcaaaacttggaaaaacttcttatgaggttcgatttcgacgtcaacccaaagtttcacatttgcgtgtttttgttgcaaatgttttgtcttgaaatctagaaatttggataagtttgaggcacgctctaccgatggaatgtttcttggttacccagcacattcacgtggctattgagtacttattttggagaataacaaaatcgttgggacttgtgaagtttcttttcatgaggctagtctacgtactagaccagaaattgcatgtacattgtcacaggttcagggggaggatagtcgtatttttgaagacgagagcgacgacgacgacaacgaggtcggctcggccagtcagaccgccggtacacctccggtcagaccggctccagacgagcagtcagaccggccaggtttgtcggcttccggttttgttgatgctgatcgagatggtcctccaaaggctacaacttcgaccagtgagggtacagaatgcgaaacaacttcagaagtcgctgctactttgcatattcaacgacaatatccgcga

SEQ ID NO: 10870 - DNA, 616 bp, Oryza sativa
actgctactaaaaaattataaaaataccactcgaactgtcattccagtggtatccttacaaaagtgaagaaaaccgttggcaaatttgcaaatgtccccaattccgaatctgctttgtctacgaataaggaagctaaatgggttggtttgataagacccttttttgctttgttgataaataataaaaaaagagttttttttctataacatgcttgttttattataacaagttctatatgaaaatgcctgctaaagagaaaatctatctgattgtcttttagccaatatccaattttagaattagaaagaaaatgtaagaagtctccccacttcaattagtccccgtgttcttcgaatggatctcttaattgttgagagggttgcccaaatgcggtatataaggcatacccagtaaagcttatgagtaaaccagatatggagatggcgactaaagttgttgtttccatttttatagaatttctagattacaatggatctaaaaaagactgtgtatttacaactacaacagtacccatgtccaggtccatattgaacatccaataccatttcaagtattggaaccacttctgcatctgattcctatatagcgagtgtt

SEQ ID NO: 10871 - DNA, 527 bp, Oryza sativa
cccgactcactagtcaacggcgaaccagttgatgtagtgaggcgaaggaaaagacaaaatatcatataaagaataaaataaatgatgacttagctttgtaatattccctcggtgacagcaaaagtagccgatgtgggaacaagcagtccatcaatggtgacaaaaacaccagtcggcgccagtggaaccaagccaatggtgtagatgatgaagcccattaacagcggcgaagtccgccaatcgtataggcaaaaacaccagtcggcagggcgaaggccagccggtcggcgaagacgtggacacccatgaacggtggtgtgaccaaccaaccgtataggcgaggacaccagtcggcggcgacggaggcaggccggcggtgaagtcgtagacgcccaacatcggcggcataataggctagccgtgtaggcggaggcaccaattggcggcgacggaggcaggccggcggtgaagtcgtagacgcccaacagcggcggcataataggccagccgtgtaggcggaggcacca

SEQ ID NO: 10872 - DNA, 1448 bp, Oryza sativa
ggaagctccatttcttgagccaagcctcatggtacaaactcggggcatgagattcttccaatgcgcaaaccttgatcaggtatgatttattcgttacaagttcaattaactgtactgaatacataaaacactaaccgatttctactccatcataacatcttacgtagacataccgtacattgtgcaactacattgaggtgtagatacggaggacccacaaaacgacggaacacgtccatatgcacgtagtgaattaagattggactaccttagatctctctttcatgcactaatcactaatcactactttcatgcacttacatctatttacacaatttttaaaataggaggaagttaggaaatgtcaattcgtacaatggatcgatacggtcagagttacttccattggtcaaacgataacgcaacctgagacgaccacgcaattcattcaggcatggatggagtacgaacatcaggtacaaattgcaagctttagactggaggaataatccattaggtttacctaaatggtcagagcgtccaaagtgtggttgtacagatcactgccaggtggatacctagtttgcagaacaaacaattggtaggagatactttgtctgccccaatgtagacgacgatttcgttgtacgtataacaaattccaaatttaactagcatctgcttattattactatcatatctgactaactatgtttgtttcttagggcaatccaggaaggtgcgcattcactttatggatcgacaatgtcaatcccacatatgatggccaaaagataactgagtctgaaacactggtagagtaccagcgagagaaggagcattaaaatgcaatacatgttgaacagcgcggaaggggtcggtagatacgctcaggctcgatttgtcaggactgacaaatttgtatcttttatccatgctatcttgtcattataatgtttcattattatggtgtgttgttgtatgcctcacgaattacaaataaatgggctctatcgttccgatttccaaagtttcttttacgccacgatacgttgtatccttaaaatttataagtatctgcttatatttttataacttccaccttcaattgtgtacatgattcaacatacgcgagaattatacataacttacaatttataggtaacaaaccccctcatttccccgcaaaaaaaaaaaccctcattaccctccaatctttatgaaaaattaaattattcaaattttataaaaatgtacttactttgttcgtttcaaaatgatattttacctaattttagctgctaaaagattaggtttatgtaaaacacctatttcgaaaaattttaagtgcaaaataattagatttatgtaatgaataatttgaaactattctccttctatttcgaaacgataatttacgtagtttataaagtaaccattaattattt

SEQ ID NO: 10873 - DNA, 2066 bp, Oryza sativa
attcctgcagcccgtgcgtgaaagaagattgtccgtggcgtgttcatgcatataagggtaaattgaaagaatattggaaaagttaacattgtgaccgagcatcagtgccacttacaaggggtcgagaagtatcaccgcaacatcacatcagcttttgttgcaagtgagatgtacaggagtgttgtcggtaactctggctttgaaccaagagcaattattagccgcattgaagacaaattcaagtacaccataacctatgccaaggcttggagagaaaaacataaggttttagagatgcatttttgaagcatcatatgataatttgcagcgtcggttagccaccattgcctagaggaatagcaatacatactatggcgtgcatacatttccatccactgttgatcctaacaagagtgtgttgcaaagagcctttttctcattgggtgcttgcatgaaggcttttgtgcactgccggcctgtgttatgtatagatggaacatttttgatcggtaaatacagaggtcagctattgacagcgattggagttgatgggaacaatcagctgttacctatggcttttgcatttatagagagtgagaacactgaaagctggtactggttcttggacagagtgcagagaaaagtcgtgtgtatgaggcccaatgtttgccttatacttgatcgtcatgcgggcatgttgcgggctattgactacttgcagaacggttgggatgagaagggaattccagctaagtggcccgatgttcagagtcggtgctgcatgcgtcacatgggtgctaatttctacaagcaattcaagaacaagcatcttatggatccttttaagaggctctgtgcacagaatcaagagaagaaatttaatgagttgtggaataagtcggatgagttgacaaccaacaaactgacgagcaatctcgtcgactacaagctgaaggtgacgagcctccagtacctcttggtgcactacatgatgacgcacccacaatgagaaggaggtcgggatcatctatccaaaagttctctcattagattgagaatgaaccaaaggagaagtggtctctattgttcgacaccgatggttctcgatatggcataatgacaactaatctagccgaggtttacaacttggtaatgcgaggagtgcgaggactaccgttggttggtatagtcgaatttatccttcacggcgcgcaggcctacttcagggatcgatacaagaaaattgatccctcaatggtagataacaagataatatttggcagcgtagtgactaagtacatggaagataaaatagcaaaggcacagaggcatagagttgtggctcaaggaacaaaagttcatcggtatgaaataatgtgtgttgataggagcaggcgtggaatcatgcgcaagcatgccgtgcaggaatgtgtactgaagtctgatggaggatgcagttgcacctatatgaagcctaagcttcgacatctgccttgctctcacatacttgccgtggcaggagactgtggtatatgtcccgatgtgtacgtgtcaccttatttcaggaaggaagcaatctttcatacatggagtgaggagatacatgggttcgggatttcaggatcatacataactcagaggtcccaagtttttttcattcccgatccatcgaagttaagggtgaaaaaggggcggcgttagactagacgcatcaaaaatgacatgaacgagtcggaagctggtgggaggactctacgctgcagcaagtgtgaccatcgcggccatacttacaagaaatgctcgaagactgcacagggtccaagcaccgaggatgttggtccatctggagaggcaagtgatggaagaagatcacctggggaaggaacaacaagctaataggaacaacaggcgtcctcatgcggcaggcgatgcgatggtctaatagtgaaattttgctcacgcgtgcgcgtgttgtcacatcaagtgggccagatgaactctcattaagtccatttatagcactagttgcggccctatataatagacaagctgaatacaacagcttc

SEQ ID NO: 10874 - DNA, 1109 bp, Oryza sativa
agaaccccagagtccgcacatcctcaaatacaaagcacttccctagttagatgtaggttagacttcccgttcgagaaactctaccttctacctgccctcaatttatgcacgattaatgaatgccacctgggtggaagcgagaggtggaaatggaaggtcttagttcggaggtgggatctctacctgatagttgcattgccattcatgatgatcccctggcattcgtccattcagccattcaccattcacccattcaactggaattttggttgaatgccggaattgtgtccacaaattgtggatggatagttggttggctggctggatggctggctggatggctggctggatggatggtgaatggctggcggcggttcggttgctttgaagcatttgttgctatctaaattccatttaaggtcgtaccttatcgcccagcatcatcttattctctatttgtattccctccatctttcagatacggatgtagccttggatgtgcccgtgcccaatgaagaggaagagcgcaacatgaaacgtaagtacaaaagtaccggacacccacccagatcccaatagaatccgccaaatcctgcgggaaattgtaatcccattcaccagctcctacatttaattaacaagagaactattgtatttatctaacacctggattatctccacctttcatttgatccctatttatagattacgctgcgttgctaacgggccgcacctcctatttcctcaagggtgaggaaatgaagtccatgtacaccacctacaatccgcagaatgtggtggccaccgcccgtttcctgttccacaagaagaatctatactactccttctacacctcatcgcgaatcggtcgtccgcgtgccattcaattcgttgatgatgcgggtgtaatcctggaggagcatcaactggagaccaccttggcgggcactctcagtgtctatcagaatgccacgggcaagatctgcggtgtctggcgacgagttccacgtgattacaagcgcatcctgcgcgacgatcgtctccatgttgtcctcctctggggcaacaaacagcaggccgagttggctctggccggaaaggtggccaaa

SEQ ID NO: 10875 - DNA, 13890 bp, Oryza sativa
ttaaaaggtaaacagatcgcccatttcttagttaaacaattgaagtgctttgcttaacaaaaaattgtaaatgcgagtcccttaatagttgtcagacctgaagaactgatactgttacaaattctttttctttgagccacccaccagggacctcaaatgccaaagcaacatctgtgttctgtttttcaagaaaaatccagaataagaagaagaacctaaatgccatgagatggcataaataactttataaatgccttaccgatgaatcagcagttcttctatattccccaccaacataggtagactttggctttgctggtccagttacaccaggcatgtcagacagaagtggttcagcaatagataccaattcatatgatcaacacctgttgcagctagaacaattcggggagcagtgtaattctcctgacatccatacaacaacaaaaaaagtcaagttatcgaaagcatgttaacagctgtaaacagatagaatacgacaagggcttcggacatgagtctcacagctaagaagtattctaggacattcgtattcaatcggctaactgaggattctgaggcaatcagaggggttgccaaagcaccagataaccagtagaatgaagagcctccaaaagaaaagtttcagggttacttgaagcttctgcaagctctgccttcagtttcattatctacaaagataaataagtcagtaatgaacacatgttaatctacattacagatttacagacatggatggcatgatattacgaggaaatacctgttccttgacttcccaatcaagaaaagcaggattgcgtacacaatcaataagcacctcaaccatttcaggcatgtaagttttcagggctgcataactgtagctcatcatctcacggttagcagatgctttcacattgccacctactgcctcgatttcacgcacaacacgcaaatggctcctgtttgtagtggttgtataggccatcttcttcaacagctgagtggcacctagtgtttcaggtgcttcatgtacagaaccacaattaacatatactccaactgaacaagatggtccctgtaaagcaaatacaaagcagaacagtattgctaactgcccacagaaacatgcatgaagcagttagatcatagaaatgaggagcacatactggagttgtctcagaagcaatttttacaccatttgcaagtgttgtgatttttgtcttgccaggctccacaaggtcaggtagcggaggtggaatggtgacccctggaagtgtaaaatctggaggaggtaatgcatttgaccgtgcacctgtcagccaggtccagaagccacctgatgacctctgtgcaacacttgtgctagcacacctaatcgcaacattcaacatttgaccatccagtccatgccgctgaaaaaagaggtaacaacaaaaattatgatcggtagcacaagctgtattggcctgtataataaattcaactactccaaaaaccagctgtctctgcttgtgtactgtcagagttaagcagtgcatagcacaacaatatttctatgtacggaaatctaatccatgaagttactagcatcctcatttaaaaggggttttctaagtccaggcttctgcactatgcatgatacaaacgaaagagcagcaatctgatgtcgaatggaaaaaaaaaatcatcaacacaacgtttccagtcaagtgaaatcaaatatcaaagatttttagtaagcctatataagaaatgttgataacataggaagtgaatcatctaaagaaagttatctaaactcttcagggtcatacatctaactgtatatatcattgcattcagagtaatcaactaagggacaacaaaaaacagaaccaagcataaaagataaaactgatactctccatattgagcgataagccgataacctcctgctctcaggatgattttagccgcctaactcatgaagttcagcaataacgagggaatgaccaacccagaacctattaaaactcaacataatcctatttcagaaaaatgtatgccctcatcgcctttccacgcctttgcagaacgtcaactgagatcaaacgtatccaaaaaaaaggtatgctacaaaacaaatccgtaataacaaccctcatcgtcatatatcaaatccaggcttttcccaattcactaggcaaccacgatcgctagctgcgacgaggggctcatgacctcacgcgcacacatcaaatccacaccgaagctcgctcgatcagaccactaaagcgtaccattccaccacgcatcgcgaagcgataaccctaagggggattcggatcggacgcatcgtggggtgataccatcagatctagcgaaatggagcgaggtaaggttcacggtttggggcgggacgggtgcggctgaccttgatggccccgaggccggaggcggcgcggtacatggcgacccggtgcccgcggaggggtcgctcgtcggagtcgtcgccggcggcggcgcggcggcggaggcggaggcggagatggggaggaagcgaagggaaggcgagggcccgtcagacaagtggaaggggaagaaattcgaggcgctggtccgcatatagaagtgggcgagagctcttaaatgggccgggccgaataagaggaataattctgtggcgattgggcccactttggcccattttctagatgcgttgggccttacccctctcgcctctcgtgggctcgtggggagtcgtggccatctgatctctctcacaaagccatcctccgctgcgccggcgctcgccgagtcgccgccgttgatgcgccgccccggctcgacgtctccggcggcggagacgaaggcggaggcggctacgcggagggacggggtaggcgtgcgacggcgacggttgtgaggctaacggcgccggtcgaatcctccctcaaagtttgcagatgagttgcttgatcaaatgccgattagggatgtcacgcttgaacgtgcttgtgcgtttcgtattttttttctcccctttctagttattgctgttggtgtctagttaattttgtcgcatttgcaattacgtctggggatttgctcctcgcgtggtagatgacttccaatttccacggcattgagtgaagagagagtgatggtttctgtgctgaaatcatccccgggtgggtatgcaatgcaactgatctgaccaccaccacctgtttgagggaattccagtttcagttcataaattttagcgggtacatcttctgttctgtctgaaagatgtgtcgtgtgcaaagttgtcgcttgtcagaatggtccaaatctgcttgttgagctgtgggctttcgacagattcaggacaagctgccaaggacggctctagatttcgagcatgtgtttggtgtatgcgtagggttggtgtatggaggtagttggttattgtgggcgtttgtgtagggtcttaacagttattgctttgatgtttgatcagatcacgcttattaggtggaggacctgtacagattagtcatttgcgtacaggagattgtgtcaatgctctcgcaggagacttttattcgtgtcaatgatctatgcagccatgcaggagaccttttagagtgcttgtgagacctaacatccgttgatcattttaagagggacacatattaacttgattgtaatgtgccttgtatgagggagtagctgctagctatagttgttggccaaccacagcaatgcattttgttcctatggtctttggatagtgtactgtccaatgtcaataaaaattttcactattggtggttgtatgttaacacaattttcttgcagtccttaaaaggagggcaaaaactttgccttgtatatgttaatagagcaggagaactctcttgcattatcagtttgctatgcctcccagttaggatgtagcttacatcctgagaatagaccgccatatactgtgttattgtctgtgtacatccaattggatgtagaggccgggtttaacccattttctaaaaatactgtgccatttggtggtgtgcatttggagcaaaacagattcatattccttctatttaagttgttgttattgattccttgaacaaatatattatattcttcctgttttcgatggaaaagttttacattgcttgaagtaacacaatttctgaagcacctggacatgtctgtgagacagcacatccacttaactgatagtattccatagtattattctgcaccttcttgttttagtgcaagcatctcagatgggaaaaactgcctgcagttgtaaaatatctttgttgtcacaatttcctaccagcacgacattttcatttagttcctcatgtaatgtttcttctctcaataaggtagctgttgcagagtgatcagctaatgattgttggactcttcttgtcaattaggtaaatacttaaaataaccgtcaaggcatcaagggaagcatgtgctggcggattgtgcttgatgatgtttaaaagtcctcatggcgcatgggaggggaactgtgctgcctgtgctttgagcatgaccgcagcaggtgcaagccacggttttatgcatgatctttatatgctcttttatgaaatgaatttgttatgtgtcgtaaacttgtaactgttcctcgaaagctcaccacaaattgtagttagcctcttgtatttcctatcactttcatgcagcatgtataggttcaattggtccgcgtaaaactgcgacaggctaacatttttccccgcatgatgtctgtttttcatcttccttccccccattaggtggcaatgtgttttcaataaatatgttggtagaatatgtgctctgatttttactatatgcatacagattaaattgctcaaagaagatatggcttagtttaccagcttcagaaaactatgtctctcatatgtctacatgcacaggtgaacggtcagctcgtcagaaagagatcggttgaagttgtacgcctgaatgcgactgcgtcaattaatgtgattcaacagaagacatgaattgatcaagagagttgcatgtcgttcaggtactttactctttgacattttcttgattgatttggtatactctgctaatgaatagtggagtagtatacaattatatacgcatttatacgctgtgacttgtgatcatatttttgtacgtataccaagcaacacattgcaattattaattatgagcttgtgcaggtccgtcggttggccagaaccacgactccaagtgtacgtacgtttaccacacacaaacctcttattattccgagcaactcatgcctcgtgcggattatgtatagtcaatagtcatatggcctcatgggtgatattcatgaaaccccccgtgaggtgttcctaccatatcattttttttccctgataacgagacacatgattaagaatgtgtttgcctaatgatgctgatgaatctttgccctgccaaatgccaagacggccggggctatcccccctggaattttctcgcaggtgagcaagatgtcgtgtcgacattgggaggaggaggggttatcagggtcataatggctctgatttgggcatgcatgagaggcacaatgcaacacacggccgcggggtagagaggtggactgatcggagcaggcaggaaggcagctgctcgacggatgagcccgatttttccctgttcaggatttatttacagctcctggagtaaggcgtaagcgaaggcgaccgcgcgaggagagacacagaaggagaggaggaggacgatgctgttccagtccaggtacggttgaacctaaccgagctaaccttatcgccgctgtcaatgttctgcaacctggtttatggatgtgtttagttcgtgaaaagaaaatttttcggtgtcacgctagatgtttgatcggatgtcagaaggggtttccgaacacaaataaaaaaactaatttcataactcgtctggaaaccgtgagacggatcttttgagcttaattaagccatcattaacacacgtgggttactgtaagcttaaaagattcgtctcgcgatttccatgcaaactatacgattagtttttgtttttatctatatttaatgttttatacatgtgttcaaagatttgatgtgatgtttttgaggaaaaaaaaaaggaaactaaaccaggcctatctatctgggcctgacgccggccgtcgtggtcgatcgatcgcgcccacaggcacaggcacggcaggctggccgtatcgatctgatctagctaaccccacctcactgcagcagcagcagcagcagcgcggggacctgatctctctccctgcccggtggggcccggagcaccagctccgctgctctggtcatgctttccatggcaggaaggaatgtgacacacacggtggtgccggggagaatggcagctgggccccagctgctagctgcgcgcgtgtactgggtcatcaattaacagttttcgtcagcttgtttggatgtggccacctaagctagcgctgaggtgacatacaaggagagcgtgtcgaaactggagaagacggggcttgctgttcaactgcttcagactttgcaggagggcactgcttaaggaggtaattaagcaactgtccagtgtcctactagcaatatatatattcgaagtacatccacattggatcaatcgtcctcgagtgaacagaggtacgacattctccatcagttatgagtacttgcatgcaggttctgtctggctcattggcagtttggcacaaaagcatttcaatttattgctgcaatttctgtttgtttaaacctgagcatgtagtagtagattattatctttatcgaatacggagtggattagatgctggccggcattcttgctgacacacaaaaggggttaattgttttggatgtctgagagccaatggctagggttctgcttgcaggagaaggttgctccctcccctgggcaggcatgcgaggcaacacgagcatataaaatttttatgtatgttctctctagccttagcttgtctacatgtacccttgttggggtccatcaagtgttgtgtagtactgctccatctgccttgggtgggaagcaagccctgggattcacctctctctctctctctctctctctctctctctctctctctagtctccaacatcacagactctcatgccgaaaaggatcatcattcgagcacaaggcctcctccatatgcccatgtgagaactcttatcacctgctccgtatatcttctttctactgcaatttgcaaaccccattattgtgcattggaaagaaatatccttttccatcattccgcgaaagcgaatgtgtgaaagaagtgtttcttcccagctgcatgcccaatacctcacatgattattttgttcacatcgtaattaatttagcactttctcctgtactggcaatctggatttaaagattttcttgttgagtatcaggatttcttttgtttgtttaacagcttgatgaagtgcatggcaatgcaacctttgatgagtcgatcgactagcacctagctcgccctccactcgtaggagctttatgctgcgtgtgagtgagtgcagtgcagtgcagtgtgtggaatctgcagtaacagctgtgatgtggtgaggcagcagttcttcttgccttttgctttttagttgtaggactggccagtctctcttaagctctctaaattaataaatatacatgaatcagctagctagcggtaaacgtctaagccaaaggtgcttggtgaggcgtcgggggtgtttggatccccgccaaacattgcctcgccaaacatgcggctgccacaacagtttggctgatgtttggttaatacgtgagttgtggcagccatactttttgctagttcatttgcatgcttatttccgccacagtgtggcgattatttctctcgccacaatctctggcggcgccacaatcttacagtcagttcaatttagcatagatgaaaggggtttgtgtgtcttgtgctatgcttaaattaacgatggagagagaaacagagaagcgatggagagagagtgagtgagagagatggagaggctaaggaggaggggccctttaacttttcctctataagaggtgtggcttcagttaaagtaggcaggaattctgctctctctctctctcttgtattaaacttgtgaaagcagcaggctgcctgcctcgattttttttttatatgtacacctctcccacactccttgctctctcgtttgctcttctactgctcatcctcctcctctactactcgtcctctttggtttgcttccggcctcttcttcctgcatagcttctgttattcgatttcgatgatcttgtcttctccttgaattgtgtgtgtattaattaactgtatgtttgtttgatcccttgcagctctattcacagctagcaacaagaaggaggcttacacatgcatgtgcacggtctctgccggacgcatatgaatcaggcatgaatagggggcacatcagcagctcggagctcatcgacgccaagctcgaggaacgccggatctccacggccaagcactgccccagctgcggcaacaagctcgactgcaaaccggtatgtgaagagtgaagtgatcaacttcgttttgcctagctcttttcagtaattgcacacttgcacctcggtcggtagcgagggttcttgggcttcttgctgcctggtgcaaaacttgttcttatggaattaattggtgtaactgcaagaaggattgggtggggctaccggcaggagtcaagttcgatccgacggaccaggagttgatcgagcacctcgaggccaaagtgagggaagaaggctcaagatctcatcctctcatcgatgagttcatacccacgatagaaggggaggacggcatatgctacacccaccctgagaaacttccaggtgagagtgagagagctaaggtagctatagctcaaaacattgcaccccccgcattgttttgatacagatatattcctggctttttgcaaaactttatcgggttttttttgctttccatggagtgatatatattgtatgctgggattgtttcgccatgaattatgggtcgtggttttggattttgggatatggcatatattcccttgttgttcttgatgtgctctcccccctctctattcttattactagtgtttctctacatgtgctcttggccggtatatgcaaagagaattattgtttatggaaagttgtgcctagtctcatctcccactctctcctctctgtcatgatggtaagatgcttctgaagtttccaaataggtttctttcctctcttcctctttttcagagaggtttgttgcatctgtcaagaagcataggccacccactccacactatactcttggatctcacaaaactctctatactaccttgatcctgctaattattctgtttgtgctgatcgatcgatggagcaggtgtgacaagggacggcctgagcaagcacttcttccaccggccgtcgaaggcgtacacgacggggacgaggaagcggcggaagatccagacggagtgcgacgtgcagaagggggagacgaggtggcacaagaccggcaagacccggccggtgatggtgagcggccggcagaaggggtgcaagaagatactggtcctctacaccaacttcggcaagcaccgcaagccggagaagaccaactgggtgatgcaccagtaccacctcggcgacctcgaggaggagaaggaaggggagctcgtcgtctgcaagatcttctaccagacgcagcctcggcagtgcagctggtcctccgaccgcggcggcggcgccgccgccaccgcatccgccgtgacgacggcggcggtgcagcaggatcagcagcgcaggagggacagcggcagcggcagctgctcgtcgacgagggaccacgaggtgtcggcgacgtcctactcgacggccgggtacgccgtcgccgccgccgtcgagatgcagcatttgaagcatgccgccgaccatttcagcttcgcgcctttcaggaagagtttcgaggaggtaattaatttaattaccacttgttacatgcatactgccacttttctgtatacatactgtatgaatctttgatcagttttcggagtaatgctggttaggttacgcatcctaatcagtttctctccaagtaaactgctggttaggttctgtgccgttttctgcatgcatcttaatcagtgcacgtcatgcagatcatgcaaattaaccatggtccatattcccatgcacgcatgcatggatatatatacactcgctcgcatggatatatactgactttctgtttttctaggtgcagattgggatacatatactttctgtttgattagatgagcttccttcaatttgttgcgtatggatgagcggtttggggcggggtagctgaccaaatgtgtaggatgcgccaatttaaagcaaaagatgagctacacatcacacagcagcatggacccttttagttcgagcctcacatcattttactcagattgcaagcaaccctaaaaccatccacgatccacccaccgtgaaagcaaaaactagtaatatatataattggcccggtctcattctttcaattattccaaccaaaaaatgtatatttcaagaaagttcaaataatatacatactactgtaacatacatactaactgaaagggagtgataaaagacaaatataatgggaacattatgcatgtatgttagttttataaaaaacattatgcatgcatgacatggaatttttccatttgtttgcatcaaacaggttggtataagtggtgatcaggtacactccaatcagcttgggaggtcggagcagcagcatgctggccaggaacaacagccgcaccggccgttgcttgcaaccacgacggcggtgcctgccacggccttcctgatcagccggccgacgaaccctgtatcaaatatagtgccaccagcaatgcagcatgcatctgtcgttcttgatcatgatcagttccacgtgccagcaatccttctccaccacgacaaatttcaggtgtgatttcatctcatcttatacattttctcctcaaataaaacatttccattatctaaaataattccctaaaattaatactaatttctctttttctagcagctgggtaatagattgggcacggtagctgttgaaaaaaaaactataggaacacatatatgcatgcatttatgaagaatattctttacatattcagaatgttaaatttaagtaaggagtaacaaaccatctccaacaaaaaacaatttcagcttgaaaacaagcaatggactcgctaggcagtacatttcatacttcccatctagacaaacttaattagtacggcttggtctaaagtccacattttcctccttcaagctaagagtttcttgctatcataggatccctttgaattctctaaaaataaactaaaaaccattctcagctttcaatttcaataaaaagaatcaaggatttgtgataatcttaagtgtcaaaattagtcatttttagttggtcatactaaacatattgggcaataatttatacaaataattgtgatatacaaaatattaaaaaaaattctagttatggcacttctaatgttgatttgtacatatgtagggtttttcaagtcgtgtaattactatttgatatgaactatgtttttttatatatataccaaggaagttgcatatggatgaaattaagctgtctgaagatgcattttctagactataaatatagagcctagacaattctggaaggattctttgtttacccatatatatatgtgtaatctggtaatgaatctgctttgtatttccaccgttcctatatatatgtatcactttaggtaaatctatatacaattgaactgtttatttcatatatatcaagatactaatgcattgtctcagctcattcttcatctctttggtgatttacttaattatattattgtagctcctttacttttttttttcgttttgctctttactaaagaatgctttagctactgttctatcccaacataattaacaacgaacatgcaacacagcagcagcagcaacaaaagcttgacaggaggtctgccggcttggaggaactgataatgggctgcacgtcttcgagcacaaaaggagtaagtttctcttgcatttttatttgattgcctcctcagcatggatccaagccgataatttaccagtcagaggctctacgcatgcagtaaagcattcctgcacatatccaattggaattaatatatatgcatgtacgtagcaattgcatgtgagacgcatgcatgtgtcccttttaaacggttttaatctgaacattagctcaggccaaatttaatataattgtagttatttatatatactgatttaaacatataatacatgggtgggaaagctgcaagctatgtcttataggcgaggtgaggggtttagaaaagaaagactgctcaggagggtcctgaggaaacttcagtgtggggcctcatagtttctttgtcgtcctagccagcactttgaaacaggcccttcaccttgacagctttttcctctcatttgtttccctatttttaaattcgccattttaggtgtgcttttacagcaagcatgccgacgagagagagagagagagaaatcttcagtactcctagtgagatagtagatagaagaaacatcatgaatatatgcaaacaaggaccaccctttgctttgcttttgagtgccaaagggggagagccaaagaccagcgtaaaaacaagaccatactttccttgctttcatgaccgtataggtgaaaacgagagctttctctccatgtcagtagcccctctcctcgcttttctgactgtatggctatagaatagttgtttactgttatctcttgcgaaaagagcaaaagaaaaggaggaaatattattcgtttcttgctctcttttgtctcttttctatgaaatgaattcacactgacaccatgcatgaggataagagaatcattattgtgaaatttgtttgcattaatcgttgtgaacttgttcttgtattacattactaaaaattaaaatcttgacatttacaaggtagtatatacatgcacgttcaggtaatatagaacaaaagtgtacttatttttgtcaaaactccattggatgattagacatgagtagtacatccgtctcaaaatataataacttttagctacgaatttaaacaagagtatgtctagattcgtagtcaataattgctatattttcgaacagatcaaggtagtaatgatatgtgtattgcatagttattcaatgagatcgttctttgacacgttggcctcattaataatatggtgcaatgcgttatattggagatcaatcattctgaccccgactatatactccgtataagtaagtgacaaaaagagttatgccttactacttttcccctcctttgttttcgcgttgaattatatgggagattaattaataaagtactgtgacaacacaactatagtactactagtctactaccgtggtatctgctatatctctcacaagagatccgaattggctaccttgatattatttaaatgaacatttctggtatcatctggagtgtaaataagagcaagtactataaaacttgctctaaggtagtccgtacttgaacagttgaaaattttgaattatttccctactgacattttaaagtgataccgtatctttcttattcaactgttgcacttcactgagctgttcttttttgacccccccttttccatattctattgcaggaagcttcaattcctcactcccaaga

SEQ ID NO: 10876 - DNA, 697 bp, Oryza sativa
attcctgcagcccgataacccaccaacaatgagaaggaggtcagggtcgtccatcagaaatttcactcagtggattgagaatgagcctaaggagaagtggtctctattgttcgacaccgatggatctcggtatggtataatgacaaccaatttggcagaggtgtacaactgggtaatgcgaggagttcgggtacttccattggttgctattgttgaattcatccttcacggcacgcaagcgtactttagggatcgatacaagaaaattggtccgtccatggccgataacaacatagtgtttggcaacgtagtgacaaagtacatggaagataaaatcaaaaaggcacggagacatcgagttgttgctcaaggcacacaagtgcatcggtatgaaataatgtgtgttgataggagcaggcgtggtatctatcgcaagcaagccgtgcaggaatgtgtcttgaaggcggatggtggatgtacctgcagttgtatgaagtcgaagcttcatcaccttccttgctcacacgttcttgctgctgccggtgattgtggcatatctcccaatgtgtacgtctcaaattatttcaggaaagaagcaatctttcatacatggagtgaggagatatatgggttcgggatctcaggatcttacacaacgctgagtgcccaagttttttatattccagatccatctaag

SEQ ID NO: 10877 - DNA, 4805 bp, Oryza sativa
attccatcacagatttacatatagagcatgtttcatcgtcacggttaattaccgatggattcgacagccactatacacatctctattcagaaacagatactttaacttttgggccctatagtccaggattcataaggcttcccttaaaacccatgcatgctacatgttccttgaacatgttgggaggtaggcctttcatgagcggatccgcgagcatcctttctgttcttatgtgctcgagactgattgtttgatcccggactttgtctttcacaacatagtactttatgtcaatgtgtttggcagcaccacttgactaattgttgtgagagtacattactgtgggttctttatcgcagtataactttagtggtttctcaatactatcaaccacctttaaaaccgggtatgaacttcattagccagttcacctgccccgtagcctcatggcatgctataaactcggcatacatggtagaccctgcagtggtagtctgttttgagcttttccatgaaatagctcctactgccagggtaaacatgtatcccgatgttaactttatattatcttttgcaaagtcagaatccgaataccccactatctggagcgattctgcttttctgtaagacatcatgaggccttttgttccttgcaatcacgcaagactttctataccaatttccagtgctctaggcctggattacttttgaaatctgccaaataacccggtaacaaatgccaagtcaggtcgtgtgcacacttgcgcgtactgtaggcttcctacagctgacgcatatggctttgttttcattttattgagctcatactgatttctgggacattgcgatgccccatacttttcgcctttgactataggagcaggtgtagcactgcatctgtacatattgaatttcttcaacaccttttctatatatatgccttttgagaaaatcccaatgcatactttgttctatttcggtgaatctctatgcccaaaacatatgaagcctcaccgaggtctttcatgtcaaagtttgaggacaagaatttctttatttcctgcagtagattgacatcactactagccagtagaacgtcatctacatacagaattaggaaaatgagtctcccattcttaactttgaatcaatacagttgtcctctacattctcttgaaaacccaaatttctttattgttccatcaaacttcaagtagcattgtctcgaagctttgctttaacccataaatggatctctttatacggcatcccatatttttgtttcctttcatgacaaaacctttcggttgcgccatgtatactttttcctccaaatctccatttagaaatgtcgtttttacatccatgtgatgtaattccaaatcataatgtgccactagtgccattataatcctaaaggaatctttacaagagactggagaaaatgtctcattgtaatctcttctctttgcgtgaaaacttttgccacgagtcgcactttaaacttttctatattccctctagagtcatatttggttttgtagacccatttacagcctactgttttggctcctttaggaatttcttctaaatcccagacatcatttaatttcattgatttcattttatctttcatggcttctcatggcctcttcatatgagatgggatcatcctccatatgcgattctttcaggccttctaggggcctcctattctggcacattatctgtttgaggctgtttcatctcctcctctgatgtggcaataatctctgttgaatcctgtagaacaggttcctcactttcattcattgttgccacaggagagataacaacaggtgttggtaccgcaacggcatgcattgctggcacaacattagcaggtagagagaagaaaggttcctgagtcgacggagcgggtacagacacccgcctctcctcaagatcaatttctcgaattaccgagctccccctaatcatttcgtcttccaagaagatgacgtgtcccgtttctacaaactttgtataactgtttggacagtagaaacgatgaccctttgatcttttagaatagccaataaaatggcagcttactgttttgggttaaatactttatcctttgcaggactcccccacacacggaggatccatagctcatacggtgttttgggcaccgatgcattctatgcattgtatgcattgttctaaaactgagaactccaatggaggaagaattacattcttaaccagtctctcaattctccccctcgaaatatggcctaaacaacagtgccataatttcgatgagacatcaggagttcgctttcttttcttttgtcaacgaggacacaacattcacattctcagaaagagataacaaataaaactgatcttgcaacataagaccaatacattcattattataccatagttcacatttgccatttccaaaatggcaatcatatctatcaaaatccaatttggatacacttattatcaagtttctttgcaaagaagggacataaaaacgtctggaagtaaaagtgtgaagccattcgcgagttctaggcgaagatctccaacagcctcaacttttgcttcaactccattggcaactctaatggatctttcacttctttgcatagtcctcattgaacggaatccctttaaacaattacacacatgaatagttgctccagaatcaatccaccatgtggatctagaataaccaatcataatgagattctttacaaatgtaataatgttctcacctttctttgccatgatcactgtcaggaagtcaggatgatctttcttggaatgtcttttcttgcaatgtagacactgatcttgtctcaactgtaaactgttgcttctgaggcagatgctgaggctgtttttcttttgaggagggtgacctgtggctcttttccttgttatctttgacaaggttaatggagtcaccattggtctctttgtgtctttcctcctcttgcacacaattagagatgagctcttcaatattccaattctctgtacttattttgtagttgacaacaaggttgtcaaagttctttggcaatgaggacaaaaccagatggaccagaaagtcatctgagatgcccaaatctttttgcttcaatttggaagccatattgctcatcctaagaatgtggtcttttacaccacctccatggtacctctctgtaacaagctgctttatcagctgtgtcgcataaaactttgaagaaccactaaactggctctttatactttcgaggtacttagagacagtgtcatactctgggattgagcccaatatggttggctcaatcgtgttctttaccgcagccaaacaattcttgttggctgaagaccatttcgcatgctcaatgtcatacgacatgatgagggaagcattgtccctctctctcttttgccattcagcatctgactctttttcacctctgaaaatttcagcaggttctataggacatggggtagtcaacacccagtccacctctcccaagataaaagcaaggtcgagttctcttttccattcttcgtagttatctcctttcagggtcggaatatctttaatgtaacccatcaaggagtagccatctgagataatcatgtattgtgagaacaaaattaacattaaaattattatgtattaagtctacatcaccgttgggcagaaaatagacataacacataaagccataactataacattgcaattatcaacgttggtcagaaaaattacaacatcatagcacataattaatgttcctaaaattaaaatctcccgttggttcgaaatttaattttagaaacactaattttcatcaatttcatctatttgcagcggaagatctatatacaattcatataaattgtaacaaaactctgttgtttacgctctgtaaaattctcccgttggttcaaatttaaacagagataaaacatgtaaaacaattcaaaattctattgtaatttgcatgaaaaatacaaaatacatgttcagaagcatttctcacatttatctattctctaaacaattttcacgttggttcaaattgcttagaaataaacacaatcattaaacatattgaaaatgcttccttcggccgagggacttttattaaacttcctttcttttgattcggccccgagggacctaaaatgaactttttcggcctttgccagtcggcccacggccgccttgcgcgcgggcgggcgccccctcccctttcgccaggccgcaacctgggcctgggccgggaaagtggcttgccgtgcgctcccacatgggccgatttcggtccggccgccgtcggccgtccgatcgctagggtttcgatcggacggtcgcgcgggcggatcgggcaaacaaaaccgcccccggccgccggcgccgaaaacctagctcctcttctcttctttctcttgcggttgcacggagcggcgtcgccgtcgccgaaaccctagcacagcgccggcggcggcatggcgacacggcggcgccgtcgcactccccttcgccgatgcgcgcactcactcaagggtgagtgcgccgccgtcgagcggttgtgccgcggcgccctctcctttctcttgcgggcgtgcgccgtgccgagcggcgtcgccgacgccggcagccttcgcgccgccgcgccatggccgacgccctcgcgccgccacgccctctattcttttctcttctcccccccccaccgtctcacccctccacgcgagtgaagagtgagagaccggcgacgacggagatggtggccccgccg

SEQ ID NO: 10878 - DNA, 12065 bp, Oryza sativa
ataagactatctccctaaattattgggtggaccaaacttgtaaggcgtataagctgcaaactgttgtcttcagattcttacagcttgagttcaaaagctaagataataattaaagcagttgcttcgtggtagtcccttatacgttttcaattggtcagcctaatttaagctgagccaaatcaacaattaatgaaatactcatgcgttacaaatgaaataactgagcacaaatcaataagtagtgttgttacttcctgtgttagcaaaattaattgggaacaacagacctttcggcatgtggttattggatcatcagaataaaatggtggataaccaacaagcatctcatacatgattgcacccaaagaccacctgtagggcaaaagaagtacattgataaaatctagttatcaagaatcaataaatgtggctgaacataaatttgtgtacatcataccagtcacattccattccatatcccttctttagcagaacttctggagcaatatagtctggtgtcccaacagttgagaatgcctgtgtatcaaattgcattttaagaatgagaagggctgtcaagaataacagaagttgtattcatattttaagtgtgtatcccttccaagcatgggattccacatgatatcatgaaagaaaaacaaaactactgacaatacagggtcaatgggatgcttgttgtatacactgtaaagcagacataccagttttcttctgttcatctgccagtgctgaagttgttcatgttgacttctccaccttctaccatttgttgtttcagagaaagagctatcgatatccattgattccctcaaattgtcatcacccatcggttcatcttcattcaatgttgagagctttgaacaatcaattggcttgcacagcccaaaatctgacagcttcatgtgaccattcttgtcgagaagcaggttgtcaggcttaatatctctgcaaaaagataacaagccaaagcatgtagatcagaaaaagggtagaaacagaaaatatacaattatctttaaacaaaaatgttatagctggacattatggtataatatatcagcggcgtcacaatagagataagtcaggaattggcaagtgctacagcagttggagaatcctaataagctctctatttgagtttcatagttttgtagtaagagtcctagtagtatcaggttactagtatgtttccttttcccttatctagaggcacctcaatatataaaggtaggctagtattaacacaagaaatatctaaaggggattaacacacaaaaaaaagtaacctgtggatgtagttgtgtttatgaatggactcaatagcaaggatggtctcagcaatgtagaatcgagccacatgctcagttaaggtatcctctctcatgagaagggtcatgatatcaccaccagggagatactccatgataagataaaggtactccgaatcttgaaaagaatagtatagcttcacaatgcagtggctagcaacttcagccagcaagtttctttccgctctaacatgttccacctgacagatataaatgaaaggttgttaaacatatcataaaaggtagcagtctttttgctaaattaggtcttgagaagccctacaagtcagtttacaacagaagatattttttacaaacatgaaaaagcaattaactatgtgattctgttaataaaatacagtcatatagagatatcatcacatacgtagagtaactatgacaaagcagttagacatgaaaacaaaataccagtggaacccttgtggacttcacccaaacaatggactgaacaaaacaagaagattatacaccagcttttgctttctagcaacttcaaattcaaagcactaaaaaaatgcccatgactaatgcataacagcaatggtagaatgttactaaatgcaaaaggtcctacatgttatgaatataaacatgtactgccaatcttttgtgttatcttagttttaaatataaccttgctgtttcgatttcacaattatgtcatatttattactttgtggtcaaatcaacaaacgtggttggagatggttaaaaactatgcacatgctactaactcacaattatacctattaaaacataaaacctggaataaatccagacaaagttatcttacttgacccctgacaaccatatcagacttctttagctttttcattgcataaatgttgctagatgtcttctcccggcagagtcgaacctgtcgtatagttaccgcaagtcagtaaggggttaaaagcaacaggagcaataaaataaacattacaacagataagcattaagcaaatatgtagtagatcaatgtgcaaacctctccaaaagctcctctgccaataatggtgagcagctcaaagtcatcaacgcagattttgtgccttttaagccgcatgtactctgtttcctttctctccagatcttttagtagattgatttgctgctccctgggaacttgggaagattccagttgtcgctccaatctaaagcgcctgcaatgcataaggtcttactatgtgacacaagaagggcaaagatttctgtctgggcaggggaatgaaaatccacttagaatcaaatcatagtatctaagtatgatgaaggataaaaaaaatcactcaagttacacagtaatagaagatggttgacgactgaaactaaggtatgttactctattataagactaatacgtccaaactctaggggtgcaggccagattgaagccttgaggaatcgccagctttagttgatataagatcaatatcagaacaaacctccatagctggtaagttaaatcaactgtttgatttcgataaaagattataacaatgttgttagaaatgaaaattgccacccctgttacatacacacctcgtatactaaaatccattataaaatgatgaaatgaatcctactaaatcgtatctgccacctagcattgtacaaatgtctttcactatgatgtttcctttcgataaaaaggaacacacaggtcttctgcccttggtaaaatagcgcaccaagtcaccaagattgggcaagctattacgttacatggactctgactgcaaatagagtaaattaatagaagtgattaatgaaacacaggcatacgtcgtgaagtgcggtatcaaccacgtgtacacttatgaatcaaaattagtacgtcatcaatcacgcgttcactcacaattcaaactatcacataatatgctctatttatgcgcacctacttgctgaccaaccgcttaatacaaacaaatgatatgcgacaagtgtattgtcaacggcacttaaagacagacataaccgtcgcatccacacaacatttacagcacatttctccactgaaaaccttcatgacagcagcatacaaaatcaagtcaaccaactaagcaagctgttagatagtaacactaagctcagttcaatttttttcacgcctattactccatagaagcagttacaaccatttttgcttggcgcaaactgagcagacgctaagcattacaaacaactagcagaatcaagtaccctcacagctaaatcgtgctactccaaccccaaattgcttaccgagcaacaattcgagaatctacggttacgccacagtagaaacacctcaaatcgtggctagcggagctactgctacacgactcctactccccccgcattcctcaagcacacgcccaaaacttttcccccccaaatctagcagctcgagtccccgagctccagcgccccaagctctaaacccgcccagcgcagcccaaacccgtcgatcgagctcccaccactcgagatctaccccaaacccacgctcgcggcagcagcagcagcagcagctaaaattcgagcccgaaatcgccaccgcgcgggtggggggaggggatcgggatcgggggggtggattacctctccttgcgctcctggatgttcttcatctgcgagcggtagtggttctcgatgaacttcttcgccgcggcgacgcgctccatggtgagggtggaccccaccgccgcctccccgccttcctccccttcctccgccaccgccgccagcggctccgccgtcgccgccgccgccaccgccggtgccggcgccgcgtccgccatctcgctctccatcgccgccgccgccaccaccacccaccccctcgttgcctcgctggtgttttttttttctctcccctctttttttttcgctgcctcggtgagaatcgagtcgagacgatgagttgtttgttcctcctctcccttgtcgctgtgcgcgccggctgtatatatagagccccgtggactgcgccggctggagagttaattaattaaacaggtaattagtgtgggtgattaaggagctaatggtgggggattaactgcgtcgacgctggtgacagacagacagctccagttttttttttttttttgctttccttttgatctctctctctgctgtgttgtgttctggcacttttttttaattattttgtctttgcttgtgttgttgtgtgatctcttctgtcatgtcgcatgcggatgctgcgtagctgtacacacgtaggcaaaaggggtttgatttggagttcttcgttgggttaatcgatttcctttttgagggaacaagatgaacaatgttcacaagataaaatgcattggtgtctttttttccttctcttttgttctcggagcaacatgtatggacgttggcttgtaaaaaatagggggttttttttagtgaagggataatgatgacattcggctctggatgcgggatgccatgatcatcatatgatggatgtcttaggttgatgagtgtgtgaatgatgggcataatcttaacgtataatccaaaacccgatgaaaactatggaggattctttggatggaaattcaccacctatttattcttatataaaaggaatcaactataaatgtgtgttggtacgtttcttttaccctccccaccctccccccctcattttcagttctacatgccttgtttttactgcctttctaattatcaccttatattatttgctctacacctttaaatatatatttttcttaaaaatatactatatgttctattaaaaatttaacttgtcactacaaccaagaagatagtcgacatcaatcccacgataatctctcaagtgatctaaagaattgtcaaaggtagaagggcatgtatggtttttgctgtccatgacgagagagggttgcattggtaaagaaaaccgtttagctaacacctgtcaatatttcccttttcaggggtgtcttcggatgagacctgcctatcacgcgcgtaaaacaaaatgatccattaacatgtgattaattgaatattaactataaatcacttaaaattgatcaatataaattttgaaaatattttttctatatatatttattaaaaaaataccgtttggcagattaaaaaacgtgcgtatggaaaaacaattgagtacaggttagaaaaggggagtcccgaacggtgtacgttgcaccgcacacgcgacgcacgcgcctcggttaggtaggcagctcgaccagaccagaccagagcgggtcgtcgtccgtcgctcacggcagccgcagcgaccgacacggtcgggactgtgaaaagggctttacacaccacaccaccagggtccaggggtatcgcatcctcgtatcgtacgtgttgctcccttcgtcgatagcaccaacacaacgcatttgcttcaaacacatgtcggtatcgtcagtacgtcgtcgtcgccgcatcggccattcggcccaattagccggagtcgatcgattcgatcgccccctgtcaaatcgcagccagcttacgagctcacctaatactcctatctatctacccgtacttaattagccaactcatctagcttaatcattttctcttcgtaggccaaagcacggtagaagatgtggaggaggaataatttggcatcttcttgttgtgatttgtgaatcgagtgatgtaagatagcaagggtctgtttaggagagtttatgattctgagaaacagctggttggtagtcagttcgtgagaatctggaaaagctaggtttctaacttctgtcttctaatttatatttaaaattctatatctagagtttttagaatctgaatcaagagttggactgtttgaagaagtttctggtcctaaagaagctgcagcgattaaaatctctccgaacaggatcaaagagagagagaagggaagagagggagaggcatggcaaacggcatgggatgttggggcgcggcggaacagggcgtcgcgcgaggcagaaaaaataatgcggcgtccaggctgggcggctacaggatgaacaggtcgcgcgtgtgatgtgctctctctctctctcgcgtgtcgatcgccagtggacggatcgatctgtgctgcaagctgctggtgcagatgcaggtgccccagctcagatgccaggctaggccgcagctgcgcgagagagaggccaccattattttttatctccatttttaatgcccatttgccggatctccgaactcacctcacctcacctctttggattccaagcctgtccagcgtgttagttaggttttttaaatattttttttgttgctgtgtgtgctttgctttatcttacacacggatgaaaatgggtagtgaaaatcttctgattgatcaaggatcgtttcgtaaaagatataccatttccattttctaacattataaaagtttggttattctaatttctatcatgcgtcgtattataatcaccactaaatagttattaattattataatcaccactaaatagttaaattaatagtaaatgtatacattataaactgaccaagaatcattttcgtaaaaattggattgttttcgtccctaattttatggattttttttttattttgttaattaaggtggatccctgacggttggatcagcgtgtgtttcggagatgggtgtagtcgagattgagcccgtaagggcaggtggtacagtgtgttgtcacagtagcgtacgtttgttgcttagtacttcctccattccatcatttgtactacttttcatttgtcccaaaataaatttaattttatagtaatcattatatcgaagcttgtaaaattaggaaacggttgtactataaaaagataaagtgagaaataattgtattgagatttaataaagtagagatattttagttttcttatttttattggcatgtgtaaaattgataaaaaataaacttattttaaaacgaaaatagtaccactagcgtgagttgctggtgaatccgtgacagtgccgaactggctgttttccactcggcgcgagttcagacgatcggataactatactttcatgttgatgaggtgacatcttcttgtacagagtcaaataaagaagacatcgtcatcatgatgctctcgtagagtcaagagaaacctaacatttctcagaaaagaaaaagggggaaaaatcctaagaatgtgtgatattagccgaaggcccagagaaatcggcccaaactttggaaatagtcaaggggcccaaaaagggaagcgtatggcgtacggttcctgtctgaaaacaaagcccgtctgttgaaaatgtgaaggcccatgagatatggcccatatattggcccgtcatcttgcctataatgttcccacgacagtgagtccaaaacatacttgcacttcatcacgcgttccattttcagtttttttttctttccatcggatgtctccgaactccgaagagactcaggttttgactccaaatatgatacgcgcgcatgtggcttttgtttggattttttgcgcatgtttttcgtttgagataccacgagtttggtcctgtttggactgtcgacggagaaggttattccacacttattctaattgtcacatctcgttctaagtcggtcttttatgggacggaataagtatcttttcagaattgagttgcttccctgtagattttttgtcgtgttccaaaatagcacaatgccacaaattcaaaggtacccaccattttcagacgagaggagagcaactgtagtgattagtgctactattatcacgtaacacatgcataaccccatagtatatccgtatatatgcagctatgcttgaccgattgaccctgcagcctccgctgcgtccgaccagttcccccatcgccagccacagcccactctcatatatgattccaatgtgaccgaccgcttgttgccacatcaaccagcaccaattaaagctgcatccacacgtacggacttcagatttgagagtcattcgatggcgatgggattgaaactgcacgaattacggccagtctcgatcgctcagcttgagctagctaagctatggtacggggcacttctaagggcccgtttagttccaaaaagtttttcccaaaaacattatattgaatctttagacacatgcatagagtattaaatataaataaaaagaaaatctaattgcacagttataggggaaataacgagacgaatcttttgagcctaattagtccgtgattagccataagtgctacagtaacccacatgtgctaatgatggcttaattaggctcaaaagattcgtctcgcggtttcccgacgagttctgaaattagttttttcattcgtgtccgaaaaccccttccgacatccgatcaaacgtccgatgtgacacccaaaatttttttttccctaactaaatacaccctaacttgtgaacgacgagccggtgaattgactgaccagaggcctcgagtaatagtagtagctagctacttcctccgtccaaaaaaaaaccaaacttaacatggttgggacattacttaggacaacgaatctagatatgctttgatctttttcctattttaaacttttaagtctgactaaatttacataaaaaaattaccaatatctataccaccaaattagttttgttaaatataacattgaatataatttgatagtatgtttctttcgaaatgctactgtccttttcttttataaacatggtccaatttaaagaaattttacttaaaaaataaaaacatattataatatgaagaaggaagtacaactaatttgagatacttcgcatctaaggctgtgatcgggaacccctcctccccggcacgcaaaacaaagcacctattattgtatgattaattaagtgtttgctatttttttttcaaaaatagatcaatatgattttttaagcaactttcgtatagaatttttttttacaaaaaatgtatcgtttagcagtttgaaaagcgtgcgcgcggaaaacgagggagtaaggttgggaaagggaggtaacgaacggagcctaagtttagtgctttgattggagccactattgaactactcccttcatttcaaaatatatgacgccgtttactttgcgcataacatttgaccattcgtcttattaaaaaatatatgtaaatgccatttatctttttgtgacttgcttttatcatcaaatagtatacttttacatatttatattttaaatttttaaataagatgaatggtcaaacattacgtgagaaaatcaacgacgtcatatattttaaaatagaggtagtttatgacctaccctgtcagccacccagccgactcaatgccaacttgatatatatccggtccggcgaaaacacaatgcaaaaagaaagaagaagacaaagagagagagagagagccactggaggtcaggtccaaccaacgccctcttgcttcccccacacgtcgcagccggagaacccgacagcgacggcaagcgcgcgggcgcgaggacggacggcgaagcccagaaaccccccggatcgagctctctctccgcccacaccgcgtcgcgtacttttcggcctcgtgcaacacaattactccgtcacgagccgcgtcacccagccacacgtcacgcgtggctcccgccacgccccgccccgccacaccggccgcgtacgcgcgcgcgcgggcgtcgctttcccctcccgtccttttatttttgttttgcaaaactggtcaatcaaacatcccgcgcgcttgggttttctttaccagtaggattctcgccacgccacacgctgcgtctgcgtgagtgcgtgcgtgcgtgcgcgtcgcggaggggcacgagacgcgctgaccaccaccacgcggccggcgaaacgtaaaacgcacccccggcccaaacatggaatggaatcatctagaattccgtgtccttaattccacccccgtcaacacaacacgggtgtgcgacagtgtgagcgtctgcacggcaaattgggcagttggcaagccgtttctaaactaaaaacacgaatattaaaaaataagcaaatatcaaataaataaaaagggtgagacttcgaactcagactagctaactcaccatcttgtagagctagccagaagatctcttggcaagccatttctatggggttgtttcgtacatataccaaggaaaataaagatatattaaaaaaaatcaaaaatcatagaaatacgactgtaaaatactccctccgtcctataatataagagactttagatgtatgtgacatatctagtactttcaatgaatctggacaagccgtccaaatttattgtactataatgtgtcatatctacccaaaattatattataggacaaagagagtggtaagtatatacagtgatgtgtatgtttggaacggaggaattttaattagaagatgtatcaattactccatagcactaatcactttccagtcatacattatcatgaggcaagaggcaacaaccagcctcatcattaactgctcgttcctgcccagaggaaaggaaaacatgaggttggaccggacgtttttatttcctgtgtttttgcttcaattcctatgaaccaaacatatatatagctacgatagctttccatagaaggaactgccctctataaaaaaaattcaatcctatctataaatcgacatatgcgtacgtgtacatgttcgtagctagtaccttttaaaactccttggaaaatcttatgatccgaacggccctaatggaggaattgatttgagttcctaaacaatactacttctactcctacatgggccaccccccatggtccatggatctgaccattatttgtacgtacttggaataatgctgcaaaagaaacgtgaaacttgcctgctgtacgtatagatctgcagtacgttgcatatttggaagagatacctgtttttgcttgtgccatatcttctacactactgctccccagttatggatcagccattcatggccaccaccattaacatgttgctaatttggacataggaggagattgtaaatatgtgaacacgttcgagaggaaaaaaaaaataatggcagcttgtgatgcattgagtttgtgctccaagttaagtaattactgatgcacgagatatgttactattactgctgctccgttatttacttattttgggatcagagccttatctacgttattatactcctgctttggaagatatactatatttttttagatatattttaatgcttctaaagatgtgaacatgtttgagaaaaaaagaatatggaaactagctgtgtgcattgagttgatgcccgaagttaattataccgatccacgagatatggtactacttaatactgcttctctaaagataatcaggtttggctcatatgtaaaccagatagaaacattagaagtccattactatttcttatctaaaccagctagaaatattgaaagtctactactgtttcgtatcaaaattttgctgtagcgaaagaagttcattgtggtgttagggttgtctatggatcacctaggtttagatctagtcgggtggttctatttgcgatggatgattgaacaacaatagagaataagggaaagggtttagggatgtgaccggttgacgcgttggatgaagaggaagtcccagccatcgtcgttgtcgtcgctctgctcgacgtgg

SEQ ID NO: 10879 - DNA, 10281 bp, Oryza sativa
tactttttaagaattaagataatggaaaattttcgtcacttgcttcagcagaagccaaaagccaaattattagtttgcagcactctatctgcatcacaaagtgataaaagaacgttattaagagcaaaccctattggtaaataattgatggcgctgattaacttggtagctgtttctttatactacttataaaattatggtttgaaatgaatatagcaatgtactccctccatttcttattataattcgtttaactttttttaatcatattttctttaagtttgactatgtttatagaaaaaataaatattagtacaaaacaaacatgttataaaaatatattcagtgttaaatttaatgaaactaatttagtgccgtagatgttgctattttttttcataaacttgtcaaacctaaagaattttgatcaagaaaaaagtcaaacgatttacaatatgaaacagagggagtagtttttgacctataaaatagtataatatactcccttagtttcaggttataaaatagtatgaaagtttactggcacgtcgttaacaatttgtttgaagtcatcgaagaactaaagatgtggtttagggtagttcattgtgcaacaaaggcaaagttacctagtctaaagtgaaaagtgaaaagattgaacaaatggtagtccaaagtgaaactttagcaataaaatatagctcaaagtaaaattaactcttattttttctataaatttggtcaaacttgaacagcttgactttgaccaaagtcaaaacgtgttataaccagagtagaaattattgctgatcaaattgaaatggagaatcaacgaggcgaacctatggagagaagtgaggagggttggtcatactattttagccctctgattataaatagttgatgtttaggataaaatttgagtaatattttaaattttgattaaagttaatttctgaaaatgcttagtttaaaaataaaagaaatggtatacacatatatttttgttaaaagtattataataatatcgtaagacttattagaatttataaacttattataattgccaaaattacaaaagtttgacaacattttgtcctaaaccgttaaatatttatgatcgaaagtagaaggatggtttgttcaatttctatgaaattaaggctctgtttgtttcagcttaagattattataatctagattattaaattagattactttaagctggattataataagctgacataaaataagttatgtgttgtttatttctttagattattagaggcatctaaggttagtgagtctttagccactcaataatctgaaaaaagctcctctagaggagattattggattatagcaaaatctggcttatagattataataatctaccataataatctacttgtttgttttagcttacgcctaataatttagattataataattctaagctaaatcaaacagggcctaaaaggtagtatagagtattctattaggttttttatgttgagacacgcctacgagtaaggttcatatctctgcatccaaattttggggtaaaagaacacgattactattgttgactactactctctctagtcaataatatttgacgtgagagaagattagttagtactctcaacgttaaatattattaactggagtgagtataaaagcatgggtacatgtttcatttcccacaaaatatatatccatcacatttctcttttttaaaactttttattgagcgagagataaatcacatttcccttgtaccttgttctcaccttctacattcaatccaacaaggcacctacaaagtacacgtatatagtagttgaacaagaatgaattaagtggttgcaatatctaagctattgtttgtcgatcataatcatcatgtcgtcatcaacaaaatgtggcaagacattcacttgccacgagcccgtgtttttctgtaacttctctacatacctctaatttcttaattactaaagtttcattatttgacagaacactttagaagaagcagttaatcagttcaatcgatgtgacgacagacgactcaattatcatcaatctgtgaacgaatttaactcgacttcttctctgctaataattaattaattaattaaatttctggtcggtgaactaaacgatgatctagtacttgcatcgatcagcggtcgtcgcagccacgatcagctttaaaaacgcggtgatgttcttagtttcgtgttctggatactttggattaagtcaatcaaattcatcttacttttttttacctaattttggaccacgacggctgcgaaagagatgtcctagtaatcatcatccaacgaccacaaaggtctcctctttatagaatgcgagtttgaacgcttattgcctgcacgccaaactaattctacacctaatgactttccctcaataatttagcccctaatcttcagcatcatcctcttgcttaattgtttctagggttgctataatcacaggtgcaactgtgcactatgttgtttcgaggcaggagagaggcaacctgcacctgcccatggaggactcggattagactagagcacaagatggcgtgcttgaccaagtatcagcacgccacgaatgcaacgaattaacgcgagagatgttgtataagtagtgtgatttgatgccaagttcttgcatcttgtcaaatagtatttgggcgtgttgatgatgagcgtgcaaatggcggcgtcgctacgtgtgatcgttgtgttggtgtgtgtgacggcgggcgccgccctcgccgacgcggcggccggcggcgtccgcgtcgggctgacgcgcatccactccgagcccggggtcaccgcgtcccagttcgtgcgcgacgccctgcgccgcgacatgcaccggcgcgcgcggttcgggcgggagctcgcgtcgtcgtcgtcgtcgtcttctccggcgggcacggtgtccgcgccgacgaggaaggacctgcccaacggcggggagtacatcatgacgctggccatcggcacgccgccgcagtcgtacccggccatcgccgacaccggcagcgacctcgtctggacgcagtgcgcgccgtgcggggagcggtgcttcaagcagccgagcccgctgtacaacccgtcgagctcgccgacgttccgcgtgctcccgtgcagcagcgcgctgaacctgtgcgccgccgaggcgaggctggccggcgcgaccccgccgccggggtgcgcgtgcaggtacaaccagacgtacggcaccgggtggacgtccggcctgcagggctcggagacgttcacgttcggctcgtcgccggccgaccaggtgcgcgtccccggcattgccttcgggtgcagcaacgccagcagcgacgactggaacggctcggcggggctcgtcggcctgggcaggggcggcctgtcgctcgtctcccagctcgccgccggcatgttctcctactgcctgacgccgttccaggacaccaagagcaagagcacgctcctcctcggtccggcggcggcggcggcggcgctcaacggcaccggcgtccggtcgacgccgttcgtcccgagcccgtccaagccaccgatgagcacgtactactacctcaacctcaccggcatatccgtcggcccggcggcgctgcccatccctcccggcgcgttcgcgctccgggcagacggcaccggcgggctcatcatcgactccggcacgacgatcacgtcgctggtcgacgcggcgtacaagagagtccgcgccgcggtgcgctccctggtgaagctgccggtgacggacgggtcgaacgccacgggtctcgacctgtgcttcgcgctgccgtcgtcgtcggcgccgccggcgacgctgccgagcatgacgctccactttggcggcggcgcggacatggtgctcccggtggagaactacatgatcctcgacggcggcatgtggtgcctggcgatgcggagccagaccgacggcgagctcagcacactcgggaactaccagcagcaaaacctgcacatactctacgacgtccagaaggagacgctgtcgtttgctccggccaagtgcagcacgctctgatcagacgagagttgtacagatcgattcatgtgacacgtgtacatttttctggttattagtagtatatgtttctggttatttttgtatagtttctacctcgtttcttgagggtcttgatcggtagaaatttctgtaaaaagcttcttaaaaaaatgttgtatgagactaaaacaggaaagattcagcttagaattcacactctttcgtaggaattgataatttgcatttgaccaggtggaaacagttttttccagtgatagtctaagccactattaattgtgactaggactttggaacacggcaatgctgtaaggcatcctggaaatttcaatgtgattgtaatgtttaaatgggagcaaaaccaaacaacatacgctgaaaatagttaacctgtaattcagagagtacatctggacggtgagtttgtgaacatgatacaactaagttgaaagcaatgaaaaaactgtgaaaaaacagaaataaaattagctataagtaaaagggactttactaaaatctaacttaatacccactcaattttcacttaacaatttcactaaagaatacatgtaagatgtaacttaaccagaacacaggaagtatctatatatgacaaagtccggacaatgacatactagcatatatctaaaaataacaaatgcggataattgacatttttcatgacctcgtcagtacgcatcaccaaaaccaccatagaaagttcaggcaaatatgttatccacgtttggtgtcctcaatgacctcatctgtcagcatcctttgttgagctacaaccacaaatgtgatttattttcttccattgtactttcctcttcgccgtcggtttccacctcgcccttgacctctagctcgtaaccagttcgtcctactcgttgatgcacccgttggtcggtcattatactgacctttcatgagcaacagcttgtgagcttcagcctctcttaatgtccatagcaggtcatagtacttctcatatcttgcagccctgtattgccgatgtagatgaaggttaattggatgaaatgtagataatgtcttctcaattaactcctcctgcgtgatttctctaccacaaattttgaatcgagagattatgagatggagagctgagtcatattcagacacaagcttgtagtcatggaaacgcaagttcaaccagtcattctgagcttgatataggaccctggccttctgctcttcttcaaatcgatccttcagggattgccataagacaaatggatctctttcagcgcgataatcagtccgaaatcctttgtttaaatggcgccaaagaaaagccaatgcctccctcttttgggtctcggtacactctgaattagagataagtgccgtacagagacctttcatgcctaaatggatttgagcctcaatagcccgttccaagtaattgcttccatcaagagcaagctcatcaaagtcttcgctgttgaaatcgaacatgttttcctacagttaaaagtatttagtctacagatagtcatgaataaaataaagattaaacaaaccatatatatgcgtcagggcttgcaatgatgtcaatgctaatatgcagtacatcctgtccaaactacaatctctgttctataaatgaggctttaaggagaacttatcatattaccaatatttttatgaattttatatgaaacctaactgcatcatccttaatactccctcttgtcataaatatttaacgtgtaggaaaatatttggtccatattgaaaatatactttaaccatagataatttttcaaatgcttagttttaagtaaaaataataatgtgcatagatttatctcgaaaagtactaatcacaatatcataaacacattttaatataaaactgatggccaaagtttcacaattttgacctctaaacatcaagtatttattaccagcatcagtatttaacggctaagcatacagcttagacagatcgtttgtcctgacgccaaatatagtattgtgaaagtgtaatttataaacctgatcaaataccatatctaaaacaattaactaggcttaggtctactcccagtgtcccaaaataaaataattcctcatcccaagaagattttagtaaggagggaaaatgactaagttcctcattaatcggagatggttggtggatagacaagaggtattgaagagtttaggaatacaactttccaaacaaattttgaactctgtgaatcaacttattttgagatggagggagtatattattttttgtgttattgtcttggttgtacttgggtgagttactataagacacgaaatgttcatgtctgtattagggttattatttttcttttctaggcatccctggttgatgtagaggttacgtgtaattcatttttaatgaattttttctcgttatcttaaaaaatgtatatgttatttgtgctactgatcaacaaattaattgttacttatgaactgattcaattgactagccataataaatactagacgaaagtatctggctatgaacaatgaagaacaaagaatctaaaagggacaaggtagccgaatattatcacacagcaacaaacaaggaattaatagtccataacacaatatctcgtcggagaggatgcccctctcgtacggcacggcggaggaaacgggagcaaaatctgggtagaactagagttaatctacatgtatgatgtatctcagcaatttatctttgtagggcaacgtctagagttgaaaatggtcaaaggggaaaatgcggaaatcaaatttcatatattggcgccggggaaggcagggaagaaatcgagaaaatcagtgagatcaaatgttgtgatcttgttgatgagattaataaaggagattttcaattgtgagatcgtggcttccgaacttgaaattggaacagaaaaaaaaaacctttcagtttcacaacactcaccatgatagtgccggacgcgctggccgctgtccgaaactgaccctaggctaaccgcgggcgccgggcggcggcggccgcggcggacggcggtgcagcgcgaccggaacggcgtggttattggattggaaccgacggcgactagcctgagagcgactgttccaatccaacagcggagtagaggcggagagatccatatataggggaggcgaaaaagaaactgacagcccagagaggaacgagtaaacgggccatccgtggacagcccacatggctctagccatccggcccatctagcccacgtcgcgtgtaagttgaaggttcgccgcgccacgcatcaaaccatatctgcatcgacgtgcggcgcacaccgccgcgactaccatttcgactgatagatcacccaccggatcgcacgcactctccatcaacgtgccactccggattcaactaacctcactgcgatgaaacaagccatatgatattatgattgatcaagcgcaatgtgggcagaaaacgcaacaaatcacaccgtcttcggttcggcttcgtgctctggtcttggctccaatggcggcgtttctggtatggattctcctcttgttaccgtacgttgccatttcgtccacggcgagccatggcgttcgtcttgagctcacgcacgccgacgaccgcggcggctatgtgggggctgagcgcgtccgccgcgccgccgaccggagccaccgccgcgtgaacggcttcctcggcgccatcgaggggccgtcgtcaacggcgaggctggggagcgacggtgccggtgctggtggcgcagaggcctccgtgcacgccagcacggcgacgtacctcgtcgacatcgccatcgggacgccgccgctcccgctcaccgcggtgctcgacacgggcagcgacctcatctggacgcagtgcgacgcgccgtgccggaggtgcttcccgcagccggcgccgctgtacgcgccggccaggtccgcgacgtacgccaacgtgtcgtgccgctcgccgatgtgccaggcgctccagagcccgtggtcccgctgctcgccgcccgacacgggctgcgcgtactacttctcctacggcgacggcacctccaccgacggcgtcctcgccaccgagacgttcacgctcggctcggacaccaccgtgcgcggcgtcgccttcgggtgcgggacggagaacctcggcagcacggacaactcctccggcctggtcggcatggggagaggcccactgtcgctggtgtctcagctcggcgtcaccaggttctcctactgcttcacgcccttcaacgccaccgcggcgagcccgctcttcctcggctcgtcggcgcgcctctcgtccgccgccaagaccacgccgttcgtgccgagcccgagcggcggcgcgcggaggcggagctcctactactacctctccctggaagggatcaccgtcggcgacaccctcctcccgatcgacccagccgtgttccggctcacgccgatgggcgacggcggggtcatcatcgactccggcacgacgttcaccgcgctggaggagcgcgcgttcgtggcgctggcgcgcgcgctcgcgtcgcgcgtgcggctgcccctggcgagcggcgcgcacctcggcctcagcctctgcttcgccgcggcgtccccggaggccgtggaggtgccgcggctggtgctccacttcgacggcgccgacatggagctgcggcgggagagctacgtggtggaggaccggagcgccggcgtggcgtgcctcgggatggtgagcgcgcgggggatgtcggtgctcggcagcatgcagcagcagaacacgcacatcctgtacgacctcgagcgaggcatcctatccttcgaacctgccaaatgcggcgagctttaggattcgcatgatcaaagagatacatgaccatatgtacataacttgaattttctatcagttgcttttgcaattattctatggaggtgttttcgttcccaaggcgacattccctctgtttattgcatgtcgagaaacacacttttcccttgttctcttgcatatgcttggttgattatgcgtgtgcttggtggtgtgttctgtgttcatgttcttcaaagaagtctgatgttcatctgacttctaaaatgctaaataatttcagctgaatgcagctcaatcactgcagctaaatctgaaatccaaacttaacatacttttatttacaagtgcgtgtatattacacggactgtacattattctccacatccatatctacaagaatacgcgctgacatatgaaaaggtgatcaaagccgaacaacaaatgtatgtaactcgaaattctagccagccaagagaagtacgatcaaataattaaacaacataatatgtacatatgcaaatacgcaatagagatcactcccatcgatcgatcagtacgtgcgtctcggtctcgatcagatcttgccgcaatccgcgggctgcacggacagcacggagttcttgagctcgtacagcacgtggaagtccatctgcaagtagttcccgatgcgcgagccggtgctcgacttgccgatcatcaggcacagcacgtcgccgccgccgccgccgctctgcttaccggtgtaggcgaagtagttaccgaacagcagctccatgtccatgccgtcgaagtgcatcgtcatcgtgggcacggtgacgacgttcttgctcgcgtcgtcgacgaggaagcacaggaggccgctcccgttgacggcctcgtacgtccgagacatccgcgccctgaacgcctccacgacggcggtgtaggccggctcgaccagcagggtcgccggcgcgccgatctggaaggcgacgccgcgcgtcttggccggtgtttgggttgaacgcgaacgtgtcgttgggaatagcgaggcgtgtcccgtcgacggagatgccgagcaggttgacgtagtaattggcgtcgtcgggtaggagaggggtggatgaaacgccattcccgtccatgctggccgtggacccgaacagcacagggctggcaacgttagggttcgacgcgaggcagtaggagaagcggtccaagcccagctggcccaccagcgacagtttgcttctacccagcccaactacacctgtgttcctgtttaatttgatatgaaaaaaagaagagcccacttataccacttaattaagccatcgcccatatatattcttaatttcttattactgtttgtg

SEQ ID NO: 10880 - DNA, 2635 bp, Oryza sativa
ttgcattctattagttacctactataaacatcaagattttgcccttacgataatttaattattttccccacttgttgaaaatatgtatagcaatgcacttttataacataaaaccagttgcgaagtgatggggaaaaaactaacatttttttcttctatcaatcttaggggcaattgagcagtggacttaaaatagcagtcaagagactagaaacatgttctttacaaggtttactggagtttcaaaatgaaacccaacttatagcaaagcttcaacacaaaaatctcgtcaagctgctgggctgctgcactcaaggagatcaagaaaaaattcttgtatatgaatatatggaaaacaaaagcctagactacttcatctttagtgagccctttattttctatgtgctcgaatgtgatgctgtttataatttatactaaatgttaactaataattgcaaatgttctgcaggtaatgtaaagggagcacaactaaactggtctaaacgtcttcacataattgatgggatagggcaaggacttctttatcttcacaacttttcacggttatgtgttgttcatcgggatttgaaagccagtaacattctcttggatagtactatgaatccaaaaatatctgattttgggatggccagaatattctattcaaatatggcagagtccaataccaccagaatagtgggcacacagtaagaacatagtagcacatccattttgttgcgcatcatattgagatttgagatatgcttctttcttcttcttttgggggttgtgtgtattttccttgggggagggggggcatgcatgaagcatccaatcagcaatatttaaattctatctttttcatcagtgacaagtatcgattttgcttccttcacacagtggctacatacctccggagtatgcatttgagggggtttgctcaatcaagtcagatgtgtttagcttcggtgtgttaattttggaaatagtaagtgggaagaggacagcccacttctatcaacacaatggaaagctatataatctcatttcatttgtgagtactgataccccaaatcctgatttacttttctatcataccagttgtttctataatgaagtgcgcatgacacttatttaacgaaagcacactattctggtattaggcttggcaactttggagagatggaaaatggggtgatctgatttattatcctccagggaataaacatcaagagatagaaaggtgcattcatgttgcgcttttatgtgttcaagaaagtgcagaatttcgaccggctatggagcgggttgtcacgatgctaaacaccaagaatgtgagcttacccatgcctatgcaaccagcttacttcaatgtaaatcctagcgaggaagaagtttcatcatgcaacattactgtaagcatcacattagaaaggtaggaccacatagccaacaatgtttttcactacaaagttgttctcaatgctgttaaagatacaagttatattaaaaaaaatgtttacatctaatatagtgatttgagattgcttacatttgttgggctgaacttctttggattgaatcttcattgccccttaaggcacggagcattcttgatcctatgctagttgtccattcctagaataaactgcacaggaggagtatagaggaagcaaagcagcatataggtcagtagctgttaccagcgaggtggctgtagttacagctgatagtaaaatggccccgcaaaaaaaaaaaaaaaaaaaaaaaaaaaggctgatagtaaaatggaattggcaatcaaccgaaaaatagtcgcgcttcctagctatccccattcgagagagggaccgcgaaaagggactcctaccaattaatagcggaagatttgcaattcctaaagcatctcgcacctatccaagttacagttttgctgccgcgccatcgatctctcgccctcacccgcagaaaagataagataatatcatccattcgctatccctagccaatctaatcccaaaaagtgaaatcgcgacgtctcgatgttcaattcgaaaagcagaacaacaataatgcagctgcagagacgaacctgcggtgtgcttcccacccccccccccccctcccccctcttctcgtccagctaggcgaggttcggccgcgcgcgcgcgcgcgcagcgcggacctcggaggcccggatccgccgtcacggtgggggtgcttcgccggtggagctcgccgcctcgccggcgccggcgccggcgccctcaaacccttgcgccgccggccaatgcagccatcctgggcccaaaaccgccatggatgacgaaaggcgacaggccgaagaacatttgttgggctggcgggcgtgacgtaagcgacgccggcccatttttggtggtcctttctcttgcatcttgccaaagcgaaacatccaatccaaccgtgtcaaaaaaaaaaaaaaaaccaaacatccaaccactgccattgattttataataaaataaattaaaatggttcatatcagagctcctctagcgaggagaccagacacccctttgtgagtttggttagggtgtaagttttaagctcgggtcacacatgaagattgatacaaagaagtatacagattcgg

SEQ ID NO: 10881 - DNA, 4064 bp, Oryza sativa
ttgaaagcaaatccgttttgaatgtgttttatgcaaataaaatttgctttatgctaaaaagaaccatactatgccttccttgattatataccttgcaagtagggtgtaggcttgtcttggtgcttgccagtacattatttctaataatgtactgactcttgctgtggaattaacttttgcttgcaggatttagacttagtctttgagtgatgcgggttatcgactgcttcttctaggacttgaacataatgggtaaacccctagtcggtgtgcttgtggattgggtagacaagtttccgctgttctattatttatttggccggtcggccaatgtaactaaagtagatgtagtttttaatcgctttcatcttatttgtgtttgctatgtataatcatgcttgagatgaaagtgtgaatctagtgcacatcctgggaactagattcacatgagtatgagttaggaatatttgagatgtagaactttagccatttttgtcaagtctcctgaatgtgtaacacatctggtcgccgccttcgagtggtttgacgggcacatctcaggctgaagttgactggcaggctaaaggcctagcaatatctccaatattcctctctcgaggcgtcggatatttcattatgcttgtttgatgacttgaattattcacttcatctctcaattataatggaaggtccggagagcctacgacataatgttaatagattgttgctagagaaaatattgatggtttacaactctaatatggctaattatagtacaaaactataaatgctacaagtcaactatatgggtatgggtacccattggatacccgttacccgcacgggtgtgggtatggggaagattttctactcgtgatgggtgtgggtatttaagtgggaatatttagacgtcacgggtgtgggtatggggcaagagaacccgatgggtatgcacccgttgccatccctagccgcgccgcacgcgcctgtcacgcgcgcgcccacgcgcgttgaccgcgcctggcaggcgggtcccgcctgtcggacccgtcttcctcccccagccggcctcttctctctcacgtgcaaacctagcgccgttcctcctccaaatccaccccattcaagccggctctttccaaattaattggggggttttaatccccattgaatcctcttcaattccccccaatttcccccttgaatcgtgcccccaatcgccgggaatgcccgcgccaactccggccaccttccatggtcgccggccgccttttccgccgccgttccgacctcccccgtggccggctccctctcctctcctataaaatggaaccccctcgccccgttctctcgttttagccccctcccgcgatctcctgtggtccctagccacctccccaccgtggcccttctctttcccccgcgccgggcgcctccagccgcctctccctcctcgaccgtgcgccggccggccgtgccgtcgccttccccggcctcgtagccgcctcctctcccatggcctgccctccgtttcgcgcggtgaccgccggaggcgcgttcccgccgtcgtccagtggcgttgccgccattataccacctccagccgcctgtgccgcctcgccggtgcagcggctgtcgtcgtcgccatcctccctcgacatcgccgcatcgccctccaccccggcctgccctcggtttcgccggaacgccgtcgtgccgcgccggcctttccatccgcctcgctggagttccttcggcaaccccttccgccgtgcccgtgtgccggccgacgtcgccgtctccacctccggcatcgcagcggcaaggtcgccctcggcctcgcctcccctccccctgaacaccgccggtgtccgtcgtcgtcttcaccgttcatcctcgccggctcgtcgtctcgcggcgccgcctccgtcgtcggattcgcagcggcgcgttccacgtcgtccccgtctccgtgcagctgccgccggctgccctcgtcgcctcctcgccggccccgggcgtcgtcgtcgtcgtcctctcgtcgttcccggtcgtcgtggcgttcgtccctccgtcgagccattctcgtccgtcgtccgcgttcgtcaagcgagccgctgcagccccgtcgtcgtcttcgtcctcggcttcgcatcgtcaagcgttgcgccggccgcgtctcgccttcgtccaaggatcgccgccgaagtcattccctcaccgtccgtctccgcctcgcccgttcgtcgttgtcgttcccacgcctcgtcgcgtggtggtaaggatccctctccctcgctgccccgtcctcgtcctttcggtgtcgcccatgcctattgtgcggttgtcggccccggtacccgtgtatcggtgtcggcagtcgttcgcttgtgcgtgtggtgaccgtgttagtgtgtccgctcagtagcagcgtggtttccacgtgtgcagcccgtgtggtgtctagtggagtccgtttgtcggccactcgcctcggttgacacacaggatccgcttccgtcgacccgtggaccgtctctgtgtactcggtctaccgcggtcctttatgttgacatgtgaggtccgcatgtcaacagcgcagccttcctgtcttttccaggttagcgcttacacatgttttgtagttgcaaaaccaaattacaataatccgtaaatctccatgtaacagcattaaacttcggatgatcatatcttggtcatacgaactctgaatcgacccgttcaagtctcctaatgtttgttataacctaaagaaccgtgtgctttctttttatgtattgttattgcttctttataggcttgtagctttgcttgtgtgcttcgcgtagcttctgtcgttccggaggttctcgaagcgtggtttgcggtcgtcgccgagggtttggaaggccgttctctctgagcaaggcaagtcacatcatccttgagcatattgaatcccagtttataaaattattttgatttaaattaatgcattatcgttttatttaaattcccgcgttatcactgttttatttagccatgcctatttacctttgttatgatattattattgctattgttattattaccttgttcaccctagaataaacaaaaccccaactagtgggcactctattcatggttccactagtatgaatttaggtagatgcttcgctaattaattaggcaacattaggtggttttataactctagactttgggaatattcatatcacttggacactatggaatggttggattattgtggaattggatgcacacctccccctctattcaaaaccctcaaaatggttttaggctgggctcggggtgcatggttttgatagtagcacctcggccacataaggaccggtcttcgggcctctgttgcaaagcactaccgtacttccacatgtctagtgggtaaggcttagtttgtggctcagtctggttataaacaaaggtacacggatggagatggacgaagtcgggggtcgatggacatctctaggacaaatgaaggctacacgggctgtggcccggtagtcgagatgtcatggcacagggttggtgtcctgctgctaggggctcaattctgcctgcctgtctgggggttccggccgtaggtgggttgggtcggtactcttgtctatggctaggatgggttggaaactatgtcatgtcttccgtccatatgccgtggtggtatgtggcacgtggttgcacgtgaggaagacgtgtcttgtgggtaaagatgtacacctctgatcagagtaaaacctattcgaatagccgcgccctcggttatgggcaagcctagcaatgtacccaagttagtgttttaaattcttaaaacctgcttaataactaaaatgtggaatggttggcctgggttggcttgggacgagctgggacccagggtcgggttgccagttcggtctgaatcatcgtaggccttgggttaaggcaggttcgtgtgggttcacggccttgattaataatactgtgtagctctaggatcgtctttataaaatggctttgggcaactaagtgacttttaa

SEQ ID NO: 10882 - DNA, 2507 bp, Oryza sativa
cttcaaatgtgccatacctcatctcaatgatcttttgtttggctctccaggcctttgcatagcttatggtgtacttgaatttgttctcgatgtgcctaataattgattttggttcaaagccaatgttaccaacaacactgctgtacatctcacttgccacaaaagctgaagtgatgtttcggtgatacttctccaccccttgtaagtagcacttgtgctcggtcacaatgctaactttccaataatcattccatttacccttatatgcatggacacgccacggacaatcttccttaatgcacctcacttcatacacataatttgttgacttgaccaccctaaactctctctgcaaggaaactgcccaatgcttcaccgcctccttcatctcatccttatgagcataccttgcaccctcaattacctcgttctccttatactcccagggtacatgatcaccctctgatataacaagtccagagaagtcctcatttgcccaatcagtggccattacatcaccttcctcatcggatgatgcgtcgtcgtccacttcctcattatccgaatcttccctctccatttcatcaacaattataccgactctctccccctcatccgccatgcccatagcctgctcctcccttggttgattttcctcattttgcatcgatggtccaacaacatcccctgcattgataggaccctctacatcttcggtttgcattgaaacatttatatctttctcttgtaccgacacaaatataacgaggggccatgaccgttcaaaagccatttccacataccgtctccaagcatcagtgctgtccatcggcattagttcccaaaaataaccttctgttgcacgactcactacaactgacactgacattgtgtagacttcttggtctattctaaatcctctcaacaaccaactataaattgactgaaatgttctctccgcaggcctatcgatgcccttagatgtcattacaaaatctgacagatcaacaccatctggaccaaatctaatatttccttcaccgtgaactatctgaaatgtgaccttacttgacattgtgcctgatgaaaacaataactgcgttaacctcgcatttctgtactacgccctaagttacattctctacaatattgttctctaaatttctaaaattacgttacattctctggatcaaactaaactacatcttacaattaacactactgtctatgtctcaattcatactattatattctatgctctggatctacacatatgtgttgtgtgctacagatgtgctaaaatatatggaactaaaactaaaacgcaacatatatactcaaacataacatattagtacaaatgcaaaagatgtatgggagcatacctgtgatgaattgagcgaaccagcagggcttcgccgctccccttctgctgccctcccctctctctctttcgttttttttggatttttagtgaatataatgaaatttcacagaggagggactgggctttatagggggagaggcaaaaatcgccctcgcggagggcggcaagggagccgcctgcaaaattccatgccccctcgccgcccatttgcaggcggccccccccacagtacaaaatcgccctagcggagggcggcaagggggccgcctgcaaaattcgttgacggccgtcgcccgagagcgaacggccgtctgccacgtcattttcgccgccctctgagagggcgatttttaaaaatcgccctcccagagggcggtaggcgactaattccgtcaattttcaaaatggaaaattatttttgtaaaacttttaataaaaaaattataaataaaaaaaattcgcttggaaggccggttttaggcccaaatccctgtggaaatgatcggcctgaaaaggttttcatggtgggctccaagtgctgtttaaatgggccggtttccggtttaaatccccggttgagcccatatctatctatctatctatctatctatctatctattattctattatattattaaaacagctttgaaaggaggcaccacgttcgctgtgggagctagaaatttccatattaatcggagaaaaagaaaaaaaaaaagaaaaggagagtccaaatagaagtacaatttaaaaatagctgaaattcggaattaaaaataagcaatattgaaaaaagtttccatataagaacccaatacgagattaatcaaaattcaaaataaaaataaaataaaatccaaaataagacaaggaaaggaaagtccaagtaaaaatacaatttaaaaatagctgaaattcggaattaaaaataagcaatattgaaagaagtttccatataagaacccaatacgagattaactaaaattcgaaataaaaataaaataaaatccaaaataagaaaaggaaaggagagtccaagtagaaatacaatttaaaaatagctgaaattcagaattaaaaataagtaatatcgaaagaagtttccatataagaacccaat

SEQ ID NO: 10883 - DNA, 2506 bp, Oryza sativa
caaaattaattcgtctagtgcatggattgatgaaccgttggtgttgattcgttgtcagatttttacttctttgtcatttcgatgtttctgttcgggtaatccaatccccatgttctgctcttgccggcgaatccccttctcttcgcggattgcaggctgacaccctctccgcagcttcacccgagatggaggatctccccatggggcggcggaacccggcggccagcctcaccgacgacctcgtcgtcgagatcctccgccgcctccccgtccgctccgtgtgccgcttcaagcgcgtctgccggtcctggcgcaacctcatcgccgaccgtgagcaccgcaagaagctgccgcagacgctgtccggcttcttctacaaaagcatcagcggcgagcgctgcccttgctcggcgcaccacttcaccaacgtctccgggaaaggggtgcctctcatctacccgtcattctccttcctgccccagtgcgacacggtcgtccccttggactgctgcaatggcctcctcctctgccgctgcttccagcccgggcctaacaacagcgatgatgagattgagccgttccattatgccgtgtgcaatcctgcgaccaaggaatgggtgatgttgccggatgccgactgggctaatggcgagacccgcattgcctgcctgtgtttcgacccagcaatctcctcgcatttccatgttcttgagtatgtggaggctgaatatgaagatgtcacgggggttgagatctactcttccgaaactgggttgtggactcttcatgtgagtggatggggcgatgatgtgtttctaaggcattgggccaatccgagaagtgttttccttaatggttttctgcattctgctacgtgtgctgctgagattgcggtggttgacatggaggggaagaaatggaggaccattgctatgccggagcctgaaggtgatactggcataattcatcaaactcagggtcgcctatgtgcttttaatgttgatccagatgacatcttcaaactgtcaatttggattcttgaagattatgatacagataattggatattaaagcacaccgttagctccttgaggctgtttggagggatgaaatatcggtttggatttgactaccaaataattgcagttcatccggaatgtaatttgatcttctttgtttatggatgggacaaaacgttgatggcatatgaaatggatcgcaaggaagttcgtgctatacgcaatctcggacatgactcctttgagccatatctaccatatgttccactctttaatgagtcattagcagatgggtgctaacgtgcagagtgtcgcttcacttctatcactgcaaaaacatccttttgcaccaaggataaccaagctaagagtgagaaaagccaatctctgatatttaattaggaagttcagtttgtactagaatgatgtcttttcctttgtgttgttttgagaatgctgctaagtctgatggtacgtagtaagtaaattggcttttggaaagtttgtcattgttctgaagtgtatgacttgttttattctactggtgttttactccatggtagttaagcttggatgccgtgttctaagactggcaggtctttttgactgtaccagtgttatcagtttagggtaccatgaccaatgaccaatgttttggaacttcaattggaagttaggaacatatcacatatgtacttctcgatttcttcattctttttctttttttcttattttctgaagtatttgtctacacgtttcttttctgtttggtgatcgatagtgatctcatttattcaaatattgcttcccctgccatttctggctagagactactatagttctaactatccaggctagccgctggcttcctctgattgttacccttctgaatttgcaaattacctgctacatccatgataaaggttatcaaaactgcaactactttgattccttcaactatcgtccgagtatgattcatatcctccaactacaaaaccgggtatatcgactccaactatcaaaatcagtgcaaacaatgtcccttggtggtggctgacgtggcggtctcgatcgatctttgccctgtgcggcgcttatgttgaattagaataaaaacaaaaataaaaaaaatatatgtcggaccatatgccattcgcacaaaaaaatgtattgtggtagccaccgacatgtgggacccacatgtcatcccttcttcctcctccctccatctctcttccccggcttctctcttcaccttggccggagcggcggtggggatggcggtggggatggcagtggcggtgaggatggcggtagggagcgaaagcgacggcggcgacagcgttcagccgaagcacgaagcacaagatcctccccgaagctggagcagtagtgtgactccgaccaaccaccccgctgccttcttcggctcaccccgttcggcccttcccgtggctcgagcgcaccgaaaaccccactagcgagct

SEQ ID NO: 10884 - DNA, 6005 bp, Oryza sativa
ccattgtttttattacaaaacttttgaaatttgatcacttgtcatgcactcatgcttattagcagcacaatgatgtctttgttttggcaggaaacattataaatttcaatgttggtgcattagttgatttagacattcctcggagcttttggagtcgtgtttcagggaagtacggaaacatgttcttctggaaagaaaaggtaacattttgttattcaatctagcagttaacaataaattacatattcatagtgatgttttttttttgtcctcctgattctacaattagaagagcactaaaatatgatcattagcaatggaaacagcacaaacttttaaaaccatccaatagaaactatcctgcagttacctttcaaataacaaaattcctccgactgatcaggttctctctttttgtgcttcagattttccttccttgtctaagctggtttcaatgtctgaatattttgaacaacaatgtaaattgttagcaaaaatatagtaagctcaagttttttttggacaaaattttatgttttgccctgtgaaattgtggataaccatgccagtccctgcttggaaactctcttctagtttctatatatgttgtccacaccattgccttcttgaaacatggaacagggggaggatgcatcaattgaagctgctgtgatggccgtatcacgctgtctgagagagcccactggggcaaataactgctctgaggttctgtagatgtgaagacaagcaagtgcaacatatgtatagaagcgaaaaaaaaagtccaagagctatactaaatagtacgaggccaaggaccattcaggtttcttttttcagttgtacacataaactcatcattttgactaattctgattttttagcaaggatgaagtctctcttgttaatagatgcgaactactttgagatttagggcctgttcactttgatgccaaaaaaaaaaacctatgttgctaaaattttggcaagataattattttgaatgtgttcactttgttgctaacgtacattctaccaaattttggtaacatctggtagcgtttagattgcatccgaagtttttactactacccaacagacgtgctgtaccaccctctgtcacctgattgcttcaagcagaggcggaggcggaatagccaaaatttgggctgcgctggcccatgccgattttggtcagtactgtgcaagttaccaaatttctagtgtttttaccaaaatttggtaagaaactaaacatatacacaattttagcaaatttaccaaaaaatggtaaggttagaaatgacatcaaagtgaacaggcccttaagaccaaataaactattaaccctttttaaggaataagttcatttgccttccctcaactttacgtctagtctgattgatatgccatgggacccaagttacacggttttgtatagtctaggaatgccaatcaaactcgttgagggacagcaagtgaacttatctcttgttttaatcatctccacatggacaaatccagcccactcatgagcaaaatcggcccacctcttatttcacgtgaacaaagtctgcccacctctttcactccaacgaattggcccacctctttaatgtgaacaaaggcaacccacaaaggaataagttcaccactgtggtctttttatcccttaaccacaataccgagtattcctctgcccttcatccccggtccgactcgccactgctaccctcccatgtccaactcaacatcgccaccctcccccgatccggctcaccaccgatgtctacttccttttttttctctcacctatcagtttttattttctcttaatttattaaatgggaaataaaggagaacattatccagtgtcagaaatggagcctctattgccaatttgtcacaagttattctcttgccagtttttcattgcaacaagtattatttttttcataaacatccatgctaattgtttattatcatttgcaataaatctacttgctataagttttcgcagcaacgcggcatagtgctatctagttttttttaattctaatgttaaataagcgtcacggtgaaagccacatgattatttttttaattagtatttgattaatcaaacactaataaaatctttcgtgggggagaccagttttcagcatgtcatgcattttacgtgcaggggagatcaattttcaacgtgccacgcggcccacgccgaacacagccagttggcagtatgcgcagaagaacaccaaaaattcacaattttccaacggccagaacacggcaagttgaaaactaatttgcccagcgcagcgcatccgtgtccccggccgccacgatgcttgcagctctcctaatccttctcctctcctcgccgccgtcgccggcggccggcgaccggtggttctgcggcaacgccacgacgtacacgccgaacagcgcctacacgtcgaaccgtgattccctcgccgcatcactcatcgccggagccacgaagctgcactcggctaccggcgccgccggcgcgggcgccgacagggtctacggcgccgtgctctgccgaggagacaccgccgccgccgactgcggcgggcgcctccgcgaggccttcgccggcatcgtcaacggcaccagcgtgtgcgcgctccgcagggacgtggcgctctacgacgagctgtaccacctccgcttctccgaccatgacttcctctccgccttcagcaactcgccggagtgggtcgacgtcaccaacctgaacaccgcgccggccgccgacgccgagcggttcgaggaggtcgtcggcgagctcctcggctcgctcgccgacgcggcggcgaggcgaccggagaggtacgcggcgggcgatgcgccgtggccgtcccgggagagggaccggactgtccggacggtgtacgggctggcgcagtgcacgcgggacatgccgccggagcgctgccggagttgcctcgacggcgtcgtcgccgagaggcggcggaagatcggcggcggcacgatgggcggcgcgatccatggcgtgaggtgctcgctgcggtacgagacggacacccagttctttaccactccaggcaagttaattagtatatagcaatactaattgagcagtattaagtattaacatccttcacccaatctgaacgaacattatgaaagtaacggctcctttgaaatgcatgatttttcaaaagacaaaaataagaaaaaaaatacatgtttgaaatgtcgtagcacctcaaatccaatagattgaaataaagcaagagagctactagaatgaccgtttggatgaagcctatgaaaagtgcatgaatgaaaacgatccccccagtcgttcaaaaaaaaaaagaaaagaaaaagaatcctcataggaaaattttccatagggttgaatttctccaaaattccttcaataatccagtcttccaaaggagccccaaggtcatgactccatttactgtgttattctaaaaatataattccatttggcattttccatataccttgaattctatttactgtttttgtcttcagagtagttggaccatggattggctagataaacctctaaaaaaacaattttgctttcaggctgctgaatgcatactaaatataaaaaggactgcatgctactctgcttgccaaatatgtatattttacatgtatatattgactgaaagtttaagatgaatcctttcggtatggtacaaattaagattcaatttagctgatcaatttggccaaaaagaaagaaacgaacacttgaatccaaccgtaaggcacactatcttagcaaaattcaggagctaagtctttgatattgtagaactgattcattcactacatgtaaaccattctatgtttcaaaattcagggcaaaagaagggacatgcaatcttgatcattgctactgtttactctctttccatcatctgcacacgcctgtttttctgtttcctaagcataagaagaaaacaaaaaagaggtaagcaaatgaataacagtacatgatactggcagctaaaatactagatcatttctacttacttcagttacatgcaagaactaatgaaggatgtgcatctagtgaaaataaacttgatggagcagaccacagacatggatgaagttatgcggctttggaagatagaagatgctggttcagagttctccttgtatgatttttcccagcttgctgatgctacagacaacttctcagccaataacatattaggcgagggtggctttggcccagtttacaaggtactttcttgtaacagtatcatctaattctgatggcatcatatgtatgtaggatttcattgatgaaatttacaggggctgtttcctgatggacaagagttagcaataaaaaaacttggtgcacagtcaagacaaggtctagtggagttcaaaaatgagatccagcttgtagcaaaacttcagcacaaaaaccttgttaggttgctcggttgctgtgttcatgaggaacagaagatactgatctacgaatatctgcccaacaaaagcttggatcacttcatttttggcatgttttactccctagctattgataaaaattgcatttattctcgtgtgtagtacaagtattaaaccttgagcctgcattatattgcttgtagatcctatcagacggacatcactaaactggaaaacacgaagaaaaatagttgaaggaatagcccaggggcttctataccttcacaagcattcacggctaagaatcatccatagggacttgaaagcaagcaacattctgttggactctgagttaaaccctaaaatttctgattttgggatggcaaggatattcccatcggatgcctctcgagcaaaagcaagcagacttgtgggaacattgtaagagcaagaaactagaaatgctagtagttactaaagtttctacctacacatttgctttctaactctactgcatgccatcttgtcagtggctacatggcacctgaatatgcatctgagggccttatctcaatcaaatcagatgttttcagttttggtgtcctgcttcttgaaattatgagtggaacgaggagtgcaggttttcagcactatggagaatttcaaaatcttcttgaatatgtaagcaattgaattggcagaaaaaaaatgttcctcacatatctattactgttgaggggtggttgtagatcattatccagttttcttttccataaatcatagggataatttcccttccttgctctgatttattgaatttgagtttgcatttgtatccaataactgaagaaatatatggatattcctaccatcacacttagcaattattttttttcaggcatggggaatgtggaaagacggaagatggtgtgatttcattgatcaatcatttggtgatgaatacgaacctggagaaatgatgaaatgtcttgtggtggcactaatgtgtgttcaagagaaatcagcggagcgccccaccatgtctgatgttgttgctatgcttagcagcgatgacatccccttaacggaaccaaagcaaccagcttactcacatatcagattagatgtatcagtagatgtcgatgtatcgtgcagcagaaatgatataaccatcacccttactgatggtagatagtacaatagatatacactagcaaggtgtgggctagtggtattggtcttcttgcactaattaattagatagggcattgtttgtaatctattgctcatattccatacgtaaccagattttccatgttatcatatatacgtgtttcaaaattatcagtaaatatacatttaagtctccaaaaacattccacaaaatattatcataaacctgctggaaagaacttgacaattccaaaataccagaacagatagacttgtgcagaatattcaaaaagacgtagtcattgacacagctagcaattttagttttttttttcacaacttaattaagatatatttcccggcttgta

SEQ ID NO: 10885 - DNA, 3851 bp, Oryza sativa
tgtttttgggtggaaggaggatatcactgcgcgcttcgagcaggtgatgcgccttccacacctaggaccgaccaccacccttcctccgtactctacagtcgggcctagcaaggcttggttgctccagttcactgtaagtaaataagttgttattatcatacgtgcttatttgcgaccgaatgagtgttttgtactaacatttcattcttaattgtaggcggaccttctgcaccctgacgctgatgattactcggtccgacgctcccttgaggcgtacctgttgtggttgttcgggtgggtgatgttcactagcacccacgggcacgctgtggacttccggctggtccactacgcacggtccatcgcggatgctcagccacaggacgtgccgcagtggagctggggttctgccgtgctagcagccacgtaccgtgccctctgtgaggcgtgcacgaagactgacgcgggagcgatcatcgctggctgccctatgttgcttcagctttgggcagccgagaggtttgccataggtcgaccagtggtggacagcgcaccctacggggttggtcgcagcgcgcagtggccagaggacggtcccacgatggggacttactggtgtcgacgtggggttagtgcaacttcgctgcgttataagtttatcagtcgtcttttttttttcttcacataacatgtctaattccgatcatgtttattgcagcgtcgttacgctcacgtccaggtgagacgtggttacccggacttcgtgttcgagtttgaccgtctccagccgagcgacgtcatctgggagccgtacatagaagaggccgtcgctgcgagagcaccgctaggactttcgtccttgtgcacacgcgaccaggcttactggctcaccatcctgccgatggtgttcgacattttcgttgagcctcactgcccgcagcgtgtgatgagacagttcggacttaggcaggtgtttccgggcaacgtgcagccgaccgtcctccctgccgaccactcgtgagttcggattgttcatttctaaatttttatgataattacttcatcgagccatataatttacctctcttcacaggttgactcgacggggacagctagcaggcgcactttgggctccacgtgtacagcagtacgttgacgactgggtgttagctacagaggaggtgatcaacgagctcttcccacacacggaggagaactaccgtgactaccttcgctggtaccttcctcgcactcgtgcgcgtgtgaccttcactccagatgccccagagccgcacgttgccgctgtcacggacgcgtatcccacgcaccgtgaccgagactacttcgtggcggtacgtccaatttgtattacttcttacaattatttcatttatcttgcataatataggacaactactgaatttgttatttccatcttgcataggctgatgccgcacgggatatcagtgccgatatcaccgcagtccaagtgaggttgaacagaggtttgcacttgactgacgttgagcagagggtgaccttcgaccggatgcaggagaagatgcgtgcggtcatgcgcgtcttctcctgtcgcagcgccgtggacgtcgtacctccagctggtccggtacaaccacggcctcgcgcgcctactgtcggagcaggacctcgacctacggcacctatttcgcacggtactgctcagcccagaggtttcttaagttttgtttctgtttttgtacgaaaacatcaccccgtcgtaacttgatgatccatcctcgcaggacctcgtttgccttcgagcgcccctagcttcggatcagtgcgacctacagcaccggtttcgcacggtacagttcagcccagatattagttcatttttgtttcagcttttgcacgattatgtcaccatgttttaactgcacgtttcctcatcgcaggacctcgtctgccttcgagcgcgttcgcaggcacgaccggcgcttccacgagctccgcaggggcgttcgccacctcttcgggcgcgttcgccagctcttcctctcacggagcgtcgatccctcgcccacacggtactttactttttattaatactgttaaatacctgtacgaaactgatggtccttgtccagcaggatttgcagccgggatcttcggtactggggcctcttcgtctcacgccggtaggactggtcctactagccagttctacgacgacgacttgcacggtgcagaccaccacgacgtactaggctcctctcagcttggaggagctccagaggcgcacactcaggagcagccagaggtcacacctgtacaggcaggacgggttggccgtgccgtacccccggaccgactcacgtactcccacgggcacattagggcgcagggtaggagggacaggggtaagaggcctcgtcagtagtgttctacctcttcagtccttatgtgaccgtttcttttggcttacaaacttgtaaagcagtactacttttgctattactactgcagtactacttgtgtttgtctcgtctacatagttcttttcattcatatggtactagaacaacttatgctcacgacaacacactttcggcgctgcacggtagtgtcagatccagtagcgcgcacagtccacaacagcacacatgaaaagcggcagctcgagttatcactatcaactttcggcgctgcctgtttacataaagtgaatcacgcccacgcgtgatcgtcttgtcatatctaatgaataatgtatctcattgagttcacatatattgcagtgaaaacgacgctatataattgacaatctgaaggcaacctcttcatatcttctttcccactagcacacaacacacgaaaatggaagcctattcattggtaatacgtaatctagatttgagattatgtagaacattcttcactacaattttacattttggcagcaaaccaaatatgatcaaatgcaattttactttaccaaatatttggtcgtgaagaaaaatttggcactaacaatccaaatatgccctaaaaattaataaaatatttgtacggtaacaaaatatttgtacggtaacaatccaaatatgccctacaaaataataaaattgtattttaccagtcttggagattttaatcttgtatagttttcaatataaaaagatttgataactattgatatttatacaaaaatatagagcacagtacaaaatcgccctagcggagggcggcaagggggccgcctgcaaaattccatgccccctcgccgcccatttgcaggcggccccccgcacagtacaaaatcgccctcgcggagggcggcaagggggccgcctgcaaaattccatgccccccctcgccgcccatttgcaggcggccccccgcacagtacaaaatcgccctcgcggagagcggcaagggggccgcctgcaaatttcgttgacggccgtcgcccgagagcgaacggccgtctgccacgtcattttcgccgccctccgggagggcgatttttaaaaatcgctctcccagagggcggtaggcgactacttccgtcaattttcaaaatggaaaattatttttgtaaaacttttaataaaaaaaattaaaaataaaaaaaattcccttccaagcaggtcacggtcggactcatgggtgtactgaactgcaacggcattcccacatcggggatgcgtcgccgccgcttctaggtcttcttcttctcggtgaccggcgaggcagccggcggcccggcgcggctttgccggcgagggctgtaggttgccggcgcgtgcgacgtgctccgcggtgagcgcacgggggctgccgtgacctagcggccgcaccacgcg

SEQ ID NO: 10886 - DNA, 913 bp, Oryza sativa
gagttcaagaaggaatacaatttaaaattagctgaaattcggaattaaaaataagcaatattgaaacaagaatccatataaaaacccaatacgagattaattaaaatttagaataaaaaataaaataatatccaaaactagaaaactaaaagagagttcaagtagaaatacaaatttcaaacaactgaaattgaaaataaaaaataaaaacatcaaaagaacacaatacggtattaactaatttttttttaaaaattctgaaattaaaaaaaaaagattttaattaggaatacaatttataaataactaaaatttgtgataaaaataaagattattgaaataaaagactatctaaaacatgtgacgagataaattaagtaacatgcctataaaagaagtagagtggtggcggttgatacgacatataaaaattgttaataaaacaccaaatagaatcctaataacgattaaaaggaggaacatcgggcaggccgtgaattaagcgagtaaggcggttgtcgagacttctataaagtaaaaaaaaataaaccacattgatcatcacattcgatttttaaaatctcagtgacaataaaaaggagaagcagcgggcggggtgtataagagtatagttgcagagccgccgaaggttgacgggacttctagaaaataaaaaatgaattccaacgatagttatgtttgatttttagaatcacaatgacaataatgagtaggcggcatacgggctgtagaggggcatagtggcatcgtttgatgggacttctaaaaattataaaaaaataaaattacaactccaatttttaaaggttcggaacttctaaaaagtaaaaagaaccaatgataatcatgttcgattttaaaatctcaaatttcaatgacaataaagaaggga

SEQ ID NO: 10887 - DNA, 12063 bp, Oryza sativa
ttaaatgcacttttagacaaagtatggttttagccggttaagaactacagttaatctagtttttattagtttgactgttctttgaggtaccaaatttagttattaaattataccaaaattacagtgagttgtatgtgttgattagagcctacatgaattttcccatgattttatcttgcatgaattattttagataattcgcaggacttatgtcttatatgtgtttctctttcctaaatgcatgtaaatgtttataaaagttatatttggactctcattaacatgaggtgatgttgatatgttagaattacagtttaccttacacatgtcataagctccttccctatttatgcctaagtttactttagtattaaattaagagaatgcttatagagatgattaagatagaatataccctatatgatataatttatttgttcactttcatgttcatgacatgtcttcagatggatgtccaaattagttttgtgaggcttgacattatccatgttgatttttttttaaggtgtatggtttctgtgtattattttccattagttagcactaggccctaatggtttagttgtttgtctagattgcaattatattcatgagacctattatgaaatgcaaatcgaaaatccaaatgcatatgaaggactcaagtcaaaatatgatttatgcaagtatgcatgctttcacttgggttgcatccaagtcctaggttaaagatgaaaaagtttttaatttgttctcaaattttattcttgcaagagttggatcaactccaactaggtttaaaatagaaatttttggtttacaaaattgaagaacttccctttcaactagttttgatggaattccttaatcctagaattcaggtatgttacacattagcgttcaaaggtaagtaaaaaattatacaaccacattacgtaatcaagaaatcaagtaataatttcatataactagaatggaacaatgcttaagatgtgaaaagagtttcatactatgatttagtagtcgttgaaacttatattgcttatagttttaggctcaatcaacgggtttttttcacccacgggttggtgggtatgggtgggtaaagaatggacccatacccacgtacccaatgggtaagagttttgcccattagtatacccatgggtacaagagttagaacacaattagatcctaatagagtaaaaacccgtcgggtcacggtttatgggtccccattgccatctctaggcgcggcctgaggaggctggggcggcttgggccgggcaggaaggagggaggggagggggcggcccagaaggaggaggagaggagggagtgggccgggaggggaagaggaggcccaagagaaagagggagagaaagagagggaggagagagggacttcggccgcgggccgagagggagaggggagaaaccttgggccagacttggcccaaagggaaggagagggttatttttaggtttttctttttaataaactctgataattgtttttgttgcttaataattatttccggtgctctgaaaattcaagtaaaatttgagggctccttttagaccaaggagaatttaacaaaaatttccgggccacatttgaatttttcttgtacgtattttagtgtttgccaatttcttttcgaattttaattaattctattattccttttagaaaatgatttttattttgagatggatttatcaggacgtgacaataacggcgaagattgataacataaatatatgtaatacaattgtatctttagaactaaataatggtatatagaggagtatagtgacaacgtttgatgagaattctaaatattataaaaataaaatccaacgagatgataaactctaaaaacgataaggtccaatttttaaaggttcgggacttctaaagagtaaaaaaaaccaatgatattaatgtttgattttaaaatctcaatgacaataaagagaggatggagcatgcgagccatagaatagtatagtggcaaagctgttaacggtttggcgggacttctagaaagttaaaaaataaacccgaacaataattatgttcaatttttaaaatctcaatgacaataaagagaggagacagcaggcgggccgtagaagagtatagtggcagcgtttgatgagacttctaaaaattataaaaatgaaactcaatgagacaataaactctaaaaactaccatgtcctatttttaaaggttcggaacttctaaaaacaaaaaaaaacaacgataataatgttcaattttaaaatcttaatgacaataaagaggggaggcagcaggcgagacgtagaacagtatagtggcaaaaccactaacgatttggcgggacttatagaaagtaaaaaatgaacccaaatgataactatgttcgattttaaaatcccattgataataaaaagaggatgtagcggatgggccgtagaggagtagagtagcaacatttgatgagagttctaaaaattataaaaacgaaacccaatgagacaataaactctaaaaactacaagatccaaattttgaagtttctaaggagaacgagtagaaatagtggtagatcgagtaatcaaataaagaatagggtgacttaaaaattataaaattaaacacggggtgatatggtttggtttttaaaagtcttaaaataacaagatagagaatgagtagaaatagtggtagatcaagcaagcaaattaagaatagggtgacttttaaaaactataaaattaaacacggggatgatatggtttggtttttaaaagtcttaaaataacaagataactattaaataaattttaagtaaaatcatattaaaaatagataattttatatggattctagccgcgcaattgcgcaggccaccagctagttgaggtgaagttacagcaagaatcaagggaaagaaaatgggactacctattgatcttttcaatagattcgaagttttaacttttgaatcttgcaaaattttgaaccaatggatatagccccttttttaaataaaataataataataaaagagacaaacatgtcaaaaaattgtaaatctaagatacaaaatcagttgtaaaatctaattttgttagtgcaagtgcactgcaactgagtgtaagtgtaataagtaactgagtgcactgcaacttcacttcaaaaatctgccacaagtgaaatagcaaaaaattaaaaagaaaactccaaactaacgaagccaacaaagaaaagaagaataacatgttggttgaattgccatcgactatgtcatcatgttctgttccttttggtttccgtctgatcataacaaatcatatacacaattgccaagctagaacttcaccaatcgtgattaatcgcttactacaatctgaatctacatgattataaacgtgcctgcactgcaaaatgctatctgccgtcctcctccatcaacgtgacgttgctcatgcagtacgactcgccgaaggagctggacgacacggccaggctggagatcctgacgttgaagtacgccggctgcctcggctccggcatcgtcaccccctcgctgccgagcatggcgatcacgtcggacatgttcggccggtcgtcggcgctgtcctggacgcacagcagcgccacctgcacgcacttcatcacctccatcgccgggaagtcctcccccagcgcctggtccaccagctcgtgccattgcccttcttgccatagctggtacgcctgaaagaagttcagaagttttcagttattagcggccgtgcattttcaggtgaatttcagtctttcagggtaactgaaatttgtgaattttggatgtcagagatttgtgcttacatatcctgtgagattgaagaatttgccgtactggtagaatccggcggtcctcttgccgcttatgatctcgagaagcaggacaccgaagctgaacacgtcggatttgatcgagaagagaccctcagaagcatactcaggagcgatgtaaccactgaataaaaaagcacaaaattcagtcattacaacatcatcaatgcatccgactgtagctatcactaattcttttctgacacaacaaaaacacatgtgctgtgtaacttgaccatcatcggtgattagtacttactgtgtgcccacaaccctggtcgtgttggcttctgtcacattcgagcagaatatccttgccattccaaaatccgagattttggggttcatctcccggtcgaggagtatattgcttgctttcagatccctgtgaataactcgcaaccgagagtgcttgtgcaggtaaagaagcccctgggcaatgccatcgattatacggaagcgtttgtcccagttcagcatcgcccccttttcagtgtctgcatatcaatacgtcaggcaagacaaaagcatcagcaacattcagcaggtttgcacaaagattttggaaatggacagagagaagttgaaagcctattgatcgagatggatatgtgagtgattgtaccaaagatgaagcaatcgaggctcttgttgtgcatgtactcgtagatgagcatcttctcgtcagcctggacgcagcagcccagcagcctgaccaggttggtgtgctgcagcttggctatcagctggatctctgtcttgaattccatcagcccctgcactgaacaggatgagagcctcttgatcgctatctcaagcccatcaggcaattgaccctgaaacatgtaagaaaagaaaacacaatttagtaagtagtcagatgaactgaaaactgaagaaacactgaagagtcgatcagtgtgtctgcaactctgcatcagaatgcaagaatgaatggagaaactgtgcttaccttgtagacagggccgaagccgccctggccgagcttgcaggcgtcggagaagttgtcggtggcgtcggcgatctggtcgaagtcgtagagcgagaactcggagccgctctcctcgatccgccacagcttgagcacctgctccatctccatggacatggtcggcacgctcaccgtccctgccatgttgatcactgattcagctgacagttagtgaaacctacagttaaccggggcagtgaagcatgggcgcgagcaaggtgtcagcaaatgcccgtgcgcacctctccttcttcgcctcctgatccagaggaaacatcccaagaagccgaggaggagcacggcgacggggacgacgatcgccacgatccacaggccaccgctgctgctgctccctgcgtgcaaacattgcagaaactgccactgtcagatccatggccccaacttttcaatgcccatccaatgctacgaattttcgacagaaaagatcatgcatgcgttttttcctgtaccactacaaggttttcatcaccagagtttgattcggttctgtctaactggaaatcccgactagtagtcgcaaaagggggaaaacgatcgatgaacgtgtgatgtgacaatattctcgatttcgacaacgatgagatgacaactacgtaggcgcatgcgacgcaggttcgtagttagcacggatgatgctgatgatgatgagcatcaccatcggttttgggcggtagggactgctcccgtagtcccaaatggcaaaggcgaaaccgtggttggctggacggtagtggaacggggccccgctcggtcaccggcaggcgcgcgcgcggtggacgacgaaggcgacgaccgagagaagggaagggggattcgtcaaacaccgtgggtcttttctctttccgccggctaaatatcccaagtaagctcggcgcgggaggtcgccgtcgtcggccgggacgacgacgacgacgacgcgacgtgacattccatagaaacgaatcatggcgagcaacttcacagcgaagcaaagcagcaaaaacgaactactgcagctgcggtactagtgaaatggcacgttgcctagtggttgcagtgatctgagtagcatcctaaggtcctgagttctaagtcttcatatagaacgaatttcagattggaatatttgagggctaagttctctgtttgatgggctaagttccaatttaaaaagactatatatatctggttggatgcagaggccggataaaaattaccctcttctaataaaaatataaaaaaactgccgcactatacagaggtacaaattctctcttgtcgcacactaggcagatgcatctggtatctggaggcatgggggaggaccatggctgtgcgctgtgcaaatgcagggacgacggtgtctgaggcagccggtggccacggtgaccgaccgtggaaagtgcagggagaaaggggaatcgaacaaatcggcggagatagatattctactgcaagaccagcttgtttgcagtgctccgtacttggcagtagcatcgcgtgacgcacgtggattcgctttcgtgtgtcgctggaacatcactactagctgtagctgcctacgaggggcaagagatcgatcgtgtgaaaagaacacagctaaaaaagggttaagaaaaccaatagtactatattcatatacaaatctcgttgctggctagctagctagcaccccgtctcatggcggatttctgaacaaagcaggggggcatgcatcagcatgcacattcatgttcttgagatggaacacgtttgattgggaataaaaatggacactatactgctcatggcgccccatctagtcaaaaacaaactacatcgatcatgtgtcgttcgagacgcccagatctcctgttccgtaaagatttaaaaaaaaacattttttccctgcatttcctggaccccgtacgctcgatcgattcctcttcacatgggaaagctctacaagatggaatatttttcttgtggagaaggggacaggagcacaccgagagggtaaaacaatgagcaagacggagacattaaaatatcagaaaaaaaaaatggccctacccaagtgtctggattgggcaatgggtattctccaagagtttaataaactaataaacacaaaaggtgtttggattgaggaaatttgatggtcgattcgatcatccatttgacatcattttagaacccttttctttttctcagatcttgaaaggcaagactttgatcgatcagctgtcacggctccgggtcgtagaatatatttgcagccggaactaatactcgtggccagcaaacaattcgtttctataggctgatgtggattggggaattctttttatggacaggaaagtcaagcgggtcctactttaagataagcacgcataacaaatgatgcaagcattgtgcattgacacagagtattttttttcccccaagtgtgtgaattttgttaaactcaatagaaggttgtgttatttattatactgattgatttatcaagttgggtatggaaaatttgttgacatttctgacagtatatattttgtctatgtattatgtcctataccctgcaaacttaagaaaagttgttgaagtagcgtttttttcatccttggcttacaaatttgaccatttatttagcatacaagttgttgattagctattgtgtagtgtagtatacctagatgaacaacgatattgatgcaccaaattatttaattaagttggaacctaattcccttaatcatatgatcaagaattaacgaaccgttatgcatcatagaaaagaaaaatgctgtttcatataatcatcacaacatcttctcgtttaacacgagtatacacaatgttcctccctaataaggaaaataataaactttgcaaaatgtaatcactgtctgtatagatctgttgcttagataattaatgccctttaaagtcatatggatatagtttagcttacaaaaattcaacgatgttcccattcaacaaaaactaatcaagcatatgaaatcaacacactacatactacttataatttaaaggaaaaacaactagctactcacgtgagaactcaacactactaaaccatcaattaatttacagaggaggaaagcatatatatagtttgtgaaatcaaataactccatcccatttcagaaaatgcaaatgccctgtacaaatcaaaggagcaagcaattgatactagctaactggtaacggcagtgaggccttgaaaattgaattgagggttaaaaaagaaaaacaaaaacaagactactagaagtccattgatatgatcgatgaactgggggaatgaattcatctctaaatttaaaccgaatgcatcaaatttcaaaatttgtgagaggatttaatttaggactaaccttgtgacgacggatccgggagcgggctaagcaccaccatgtcgttggggatcttgaagaatggatccttctcgtacctgaagtcgcagcgcacgccgaggatcctgccgccgacgcggccgctgaaccacttgggcatctggtcgatgataccggcgaggcagccccggcactgcggcggcgacaggtccggcgtgcactgcgcgatggcgtacacggtcatcgcctccggcgcgaacccggccttccccgcggcgtacctcctggtcgcgttgctcgccctgtcggccaccgcgttcaccagctccgccaccagcgcgtcgaacgccgcgacgtcgcccgcgtcggagacgttgttcatgttgaacgcggccgtctccggctcgttggcggcgccggcgccggcgccggcgaggaagtcctggtccgagtaccggagctggtactggtcgtagtagacggcgacgtccttgctgtacaagcagctgctcgccgcctgctggaacgacgacgccagccgcgcggcggagcagtcgttcccggtgaagtcgccgcggcagagcaagaggccgtacgccgtgtccggcgccgcgccgaacgcccccgccgcgtagcccgacgccgaggcgttcctggacagcacggcgaagaggccgttgagattggcctcgaacgtgctgttcggcaggtacgtccgcctggccgccgtcgtgttacagaaggaggagatcgggttgagcaccggcaaggcgcccccgccgtcgccggccaccggcgccggcgaagagacggcggcggcggcggcgaggaggagcaagaggacaagcatggtaggttgctaaccgaaaacacttgggagttgggaccgggctaacgttgtttgcttgctgtacatggaatggaatggctaagcctaaagagagagtgacacaaaagctattctgctctcattgctccagtggtttgtatattataggggggcatcaggattaagctaagttaattagggcttaactaagattatattaggattatggccaggttgattagtgcatggttgcttcagctaggatgacagtgacagtatgctagcttgagcttgagggggttgacctgttgcaaagcctgataggctgaagcaagctgcagctagccagcaactgatggggattggaggatgaaatgaatttgagaattttggctgtacttgtgtctgtactctctttaggtttttttttttttttctggctggttgagctgctccgttgctcatggttttcagagttgtttacaatggatgcttgatgagatgagtatggagggacgtgtcagttgagtgttttttttttttaagtagtaggtgtgtgtacagcatttgagatctatagttcaagctgttatggatatcgttttgagtacatcagatcatcggggcaatgtttgtcgccaaaaataattgactagtaccttttacctactatactaagtattatcaccagtagggtgatctcaattttcagtaagaaaaaagaatccactaccagtataaataaataagatccattgaattataaaagataatacttaattcagtctatactgatttcgagatagttgttgttgtaaaacatcttaaaattgaatttccgataatcatctctttattttctcaaaaactattgtattttggataggcacttgttatgaagtgtaaattgccaaccgatcgaatttgaattggatagaggtcttaccatatttatcttatatttccgaacaggtatatatgatggcatttcaatatttactactccattatcaagttattaacacaaatgcaatgttgtaacaaacatgaattcaaatccaatatctgtgtaatttggtaagctcatacaactacagttaaccatccatcatgcaactacaagcaaccaagcaactgcttctatatatattttatttgcgaggtgcttctatatttacttcacatgatcaaaatatgaattcatgttaaaattattaagattgatctaaattgtttagaaatattatgtaaagcatcctattttgaatgttgaaaccccatacatattcaaatacataattttcacttggtttcaactacaaatattatgtaaagaatgatgttctcttaaaacagcaaattcttgattggttacaactcatttgatttagggatcttgtttttacctttgtaaatattatgtaaatattttctttagtataatataactattaggcaaagccttgacagtattttggtaaaaaaaaataaagaactacaaataccatcgggggagaattcacaccattgtatgtattttcctcctatattcgttactctctctagatccagatattggataattcggaaccaattgatgccccaaattaggctccattagaaacacatgaattttcttttgtctaaaggtgaacacattaatttcacaagaatgtttcagtttcccagtaattggtatgaattttccaatgttccgttcagagctttatttatatctgtctatctgattagtcgttctttcgtgtacaagctaatagccattttaattagaagtgttaatatctgcagcttagatctactcgactgtgttaggtagctgttgcagattatcaaattgtaatttctcgatgactccatttgataagcgggtctctgatcagatttggcagcttctggctacagctagtagatgctggattgcctgtgtcctctgctcgatcttagtgtttttccagattgaactaacatgcgtgataaattatttgtggatcgaaaacattccgctagtatgtacaatgcacctggttttagtactctgaaaaaagattttgaattctagatattttaggtcactagatctgttcagaaaaaaaagatggcttgatctaatagcaacaaattccgctataatgccctatcacctgcccatggtataattcatgagaaatatttacttccgagaggaaccatatttttcagtgtaaattctactgataactcatcaatgttaagattagttagtataaacaaacactaagttacgatgtctattggtatctcctcgagtaccataaaaattattggagtatcattcaatcagtagcacgactcgatattctatatgtttatatgttaataattgagtgaagtgtataagcggttcctaaacttaagtgagtgtgtcatctagatatctgaactctaaaaatgtatttttaggtccttgaacttgtcttgggtgtcatatcagtctaaccaggctccaacccagtccatgtgttgatgtagcattaccacggtgacgcctatatgctagtcggatccacataccagttacataaacaaatttaaaaaatatattttctccactctaccttagattattttttaattttatcttttttctctctacctaagaggagaaaaatatatggtttttaattgtattttatatgactaacatgtgggtcccactgatatgtagacatcatcgtggtattgccatgttagcagatggagcgggttagaacctgtttagacctatatgacacccaagacaagtttaaagagccataaaagtattttaggagttaaaaatctaaatggcacacaccacataaatttagagatcgtccccatgtacttcactaattagagggcaacatcaacaaattcttctcattctattaagaaagcaattggttgttggatccttctagctaaatcc

SEQ ID NO: 10888 - DNA, 648 bp, Oryza sativa
  unsure (1)..(648): unsure at all n locations
tgagaacactgaaagctggtactggttcctagagangtgcacattgcagtggtgcgtatgaggcccaacgtttgccttatacatgatcatcatgcgggtatgttgcgggctattgactacttgcagaacggttgggatgagaagggacttccagctaagtggcctgatgttcggagtcggtggtgcatgcgtcacatgggtgcaaatttctacaagcaattcaagaacaagcatcttatggagctctttaagaggctctgtgcacagaaccaagagaagaaatttaatgagttgtgggacaagttggatgagttgacaacgaagcaaacagatgagcaatctcgcagaccactagttgaaggtgacgagcctcccatacctcttggtgcattacatgatgacccaccaacaatgagaaggaggtcagggtcgtccattagaaatttcactcagtggattgagaatgagcctaaggagaagtggtctctattgttcgacaccgatggatctcggtatggcataatgacaaccaatttggcagaggtgtacaactgggtaatgcgaggagttcgggtacttccattggttgctattgttgaattcatccttcacggcacgcaagcgtactttagggatcgatacaagaaa

SEQ ID NO: 10889 - DNA, 648 bp, Oryza sativa
cctgccaccgtcgaccgttcgattgattggcacgtcgtccgcgaggaagagtcatgtaaggtattggtttgtattaatttgttcatttccgattcaattttatttactttgcacgaagtagatggcgattgcccgtatccggtggaccgatatggaggttcgtgtgtttcttaagagctgcttgaaggagatggcagcgttcaccatcacctccaactcccccaagccgcaggcatggcagaacctaatacacaagatgtacaccaagtgcaagaataaggtgaacaaggctcaattggagtacatttgggggcagtgtaaaaagcggtacaacaggtgggtgtggctagaatcgcatgcaagcgggctgggtcgtgatccccatacatcagccattgttgccgatgatgagtggtgggaaagcaagaatgcggtacgtacacttgaccataaatattttgaaccaacaattttgcctacaattggtattatctgaaatttagtacatgcatgcaattatgaatacagttttgtaaggtgtaataatttttttgttcaaattgtgtgtgccaacaaatgactagctgcagtaaaatgcaaggattgtgatcacatatgtttcatagttgttactgtcatgtcgttttt

SEQ ID NO: 10890 - DNA, 691 bp, Oryza sativa
cacagtaaccttggaccttctcctgaagagaacaactgcaaaaaatgaaaggatcaacaataccacaactgaataagcgacgacggcagcgattccagctgcactctttttcttccctgcaaacaccaaacatgaacttcaattggggaaaccttgatttcactgtaacttctgttatttttttttcttcaggaaaaatgaagaacagagtaggtcatactccatacctgctccaggctctagagatagaaccggagcctcggctgctggtggtggtggcgccgacagctgcagcatcgcccggcctccgtagaacggccgcacatttccccaatcaagctgttgacgcttgtcggcgtctgatattgataaaaaaacatgttgagagtgaatgatcagcttgatgttattgaactttgcagagaaaatggtgaagatatttagctaaaattgagtggattagtaagtttggtggtaccaaagaggatctgatcgaggctgcggttgggaacaaactcatagacgagaagcctctcctcttgctccaggcagacaccgacaagcctgacaagattcttgtgctggagctttgcaaccaatgcgagctcgttcttcagctctcccactccttgtgctgaactcttcgataatctcttcactgctatttcatcgccatcaggcagagtaccct

SEQ ID NO: 10891 - DNA, 692 bp, Oryza sativa
aattcctgcagccctcagatcttacacaacgctgagtgcccaagttttttatattccagatccatctaagttaagggtgaaaaagggtcgacgccaaactagacgcatcagaaatgatatgagagtcagaagcaggtgggaggactttacgttgcagcaagtgtgatctgcgcggccatacttacaagaaatgcccgaagaatgcagaagttccaagcggcgcagatgctagtccatctggacaggcaagtgatggtaggcgaccacctggtgaaggaacaacaagcaggcgcgcaaggccaaggcgtcgtcgcgcagcaggcgattccatggtgtaacaatgctttcgatttaggaaataaaatgctgttgtgatgtaatgagtgttcggactaaatacttctatcgtgtaatttcaattcaatgttgttgtaatgagtacctccgactattgttgtactagtagtattgcgaattattcggtgttgtatcataatgttatcgtgatgagtgttcggactaaacacttttgtttgtttgtactcttgtttaatatgtgttagtaattcgcttatgaacatttattacttatgttgaactaattatttatatgtttctgatcaacctatttgatgcaggtatggcgtacgacacaccggcgctgttgaaccgtgggattgacaggaaccacc

SEQ ID NO: 10892 - DNA, 7852 bp, Oryza sativa
aaggtgacatcactgttatagcatcaatgtcagtgtcatctgaatattaggatatctgaactgcacgcagcaagtgcctgaggtgcatgtttgtcatatggaagcccaagtggagcattgtacatagtactttagtagtacctgtgagcaacgttgaattaaagcataagttggcagaattctttctgaaagcgatcaagcaggccgtgcgaaattgtttaacgatttcatagaatttgggtgaagtttaagattatgaggaaccggacaggtggctgcagatttttaaacagatgaaatttcagccaagaaagaaagtccaatagaagaaaggtaggcggtagaagtactgtgaacagtcaagaatttctgtcccgctgcagaatcagttcaaacattttgcacattcacattggcaatgccaattattgcgcatacaagcaaaagaaaaatgagagatactccgttacaaggaaattcaaaaacataatacaacaaatcaatgcctcaagagcagagatgattcggacaaaaaccaaccaaaagagaacccagtagacaaatttagtattctctgaaatttcaccacactttccaatctcgtttagtttggactagtccacttaaattactcaaagtccaagctagagccgaagtcactttcgttctactgaaactaaaaactttgtcctgacaaaacgagacaccaaccaaacagtacttaagaatatgcactcatccaagccatgttccatacgcatcacaattccacaagctccctgcagaagaaaaagcctcaaacatgcagatgctgatcgtttccctcctaatgcttctcctctctaccccgaatctgttggtagctaaacagcttcccttctgcagcaacgcgaacaccatcacacacatgccagagggcacctacaagaccaacctgctccagctcgccaaaaacctgatcaccaatgtcaaccagacgcagctgcactctgccaacggcacagccggggcggccggtcctgacacagtatacggcgccgtgctctgccggggggactcctccgccgagagctgcgctacccgcctccagagagtgcttgacacggccagcatcaatggaactagtggcgatgactctggctactttcagaaccagaagaatgtcaccttgtacgaccatgatttccaggccctgctaagcttctccgacaaggatttcatctccagcttcagcaacgcgccggagtgcactgtgagcgcttacctgaaccctccgccggatgctgatcgcgcgcagttcagccagcttttctctgagctcatggagaagatcgctgcagccgtggtgagtagacggccggtcaactacttgacgggcagggggtggttcgacctcaagagccagacggtgtatgcgctggcgcagtgcacggacggcatgccgccggagaattgccggagttgcctggacggcatcatcgacgaagggaagaagatggtcggcggtggcctgacgggtggcgcggtgctcgggatgcgatgcagcctgtggtaccagacggatgtcaagttcttcgccggcgacccagaggtgtcgctgcacatgcctacacgtacgtcccaccttcacctttaataaattgtgccttgttgatttggttcaaccagtctttcgtcttcacttagtcttcagtcttcattgcctgattactactcagcagggacattctttcatcttgagatgcccttatctctgtgaaaacaaatcaaacgatgagattagttcagcattcaagcatgattttcattaccccatcaacaaaaatctgcatgcttttttgagagagatttgataatttaacataaatgggtttcgattatctgacatcttggcccactttcattcactcagatgatcctacatgtcatcctcacaagtgtcaattaaagcaactgtgtaacgaaaaaaatgtcaaattatcaaatttctccttttttttggaagggtttaagttgggatgcacaattattcccgtgtgaaaatcaaccaaaaacgatttcaaaaccaaagaaactgttcaccttcccctgtttaatatttaccttcaaagtgtcgtgtggccttcctattgtttccactagtcataactcatatcaatggatgtgcagcaagcaagttttggatctgggttgtaattggatcgttctccctcatggtatctatttcatggttgcttgttcatatttggatcaaacgagagagaaaaagaggtaaataactaaatattagtctcacaacattctcctttgcgtaaggatatatgcatctgattcaattatatagctgcccgctaagagcctatatgagtgacaagaatagactgcttcactattttctttttcagaacaagcaagatttgaactacgattgctgtcgatggcagtacagaatgtaataaatctttggaggattgaagaagggaactcagggttttcattgtatgatttctctcagataaaagaagctacacaaaacttctcaagggaaaacaaacttgggcaaggtggttttggagctgtttataaggtaaattatatacttggctacttgcattgatattcaacttatttatttttatctgtatattttaaatgatttttagtttttaatcagattatttctgctatagttccattttcctttttcaaaaaacattagtgtatgcaagatccatacttacccaatgtcacaagataatgtggcactcaacattgtaattgtaccaatgtcagtttttcaaaataaaaaaaaaacagaaacaatatcctccactgaatatatgattctagtagcaattgtaatgttctttattttcagggcttgttgccgggtggtcttgaagtagcagtcaaaagactttcagcatgttctgtacaaggtttattggagttcaaaaatgaaattcagctgatagcaaagcttcaacacaaaaatcttgtcaagttactcggctgttgtattgagggagagcatgaaaagatgctcgtctacgaatacttgcaaaacagaagcttggacgtcttcatatttggtatgcctccatatttctacatactaaaatttgaagttaatattattttgagaatttttcaataacctcaattcatattctgtagactttgtgaaaggagcacaattaacctggtcaaagcgtctacgcataattgatgggatagctcaagggattctatatcttcacaatcattcacgagtatgtgttgttcatagggatttaaaagcaagcaatattctcttggacagtgacatgactccaaaaatttcggattttgggatggccagaatatttggttcaaatatgattgaatcaaacaccaccagaatagtaggcacacagtaagtacaaatatgcatctgaaactatcagtataaatgaacatgcatagttttatatgttctaataagaaaattgcatagagcagtccattttgtgtctacttattagttactacaattcctcatattattaaaaacaactcgagattttctgctggaaaagcatataagttaattatgaaattgtatataaaaatttctatacttcatgtatcttggtaatgtataacaattctactactgtaattcagtggttacatatctcccgaatatgctttcgatggggtttgctcgatcaagtcagacgtcttcagtttcggcgtcttggtcttggaaatcataagtggaaagaggactgctggtttctatccctatgatggcaaactttgcaatctcatttcatacgtgagtaaaatgtactccagataatctttatgaaacaaacagtgggaccaggttggtccagatatactctatattgcaaaccattattttttcttttttgttgacagaaatacgcctttgtcttttaacaggcttggcaactctggagatctggacaggggcatgagctggtctgttgccgtataggaaacaaccataaagtgatacaaaggtgcattcaggtggcactattatgtgttcaagagagggcagatgataggccttctatcgatcaggtggtcacgatgctaaacagcgaggaaatgacattgcccaaaccaaaccaaccagcttacttctatgtccgatccagtggctcagatgattcatcatgcaataacagtataagtatcacattggcaaggtagagtagtggattcccatcatagccattcaatagaatgatccaaaaactacggatcgacaatgtcatttgtgggtgcaagcgacggtccaatgcagttgcttctctgttatccgatttatttgtctttgtttaggcgtttaacccaaatgtgtttcagatctttttttctgtttcataatgtagattagtgtgattttgtactgctatatatgatgttctcttttcaaattgtctgtagacaaactgtaagacagtggacagtaatcagcataaacatggacggtagagtatcaggcagagctgcaattttcaaatctaagtacgagctgtcagccaccgattaacatcaatccctaatttcttcagcatttaacaacaaaacatctttagctttccaatcaggttccacaattttatgatcggaaaataggaggagctttcaagtttcaaccaaaaatggtggggaaattagacttaaaatgctgggaaacccaatgctcgaatccctaaactttaacctcgcaaaatagacgaaattttcgaataatctcacctcagatctgaaggcatttcagcccccgggtccccggtgcacgcccgtactcggagagcgacggccggcctccctcgccgacggcgacgttggacgacgggtggcggcgcggccacgattcgccgcgcaggggaggagaggattcgccgcgtggcggctaggtcgcgctcgcgccgcccttgggagtggttgggctgggccgcgccgccgtgtgctctggtgggccgtttggtgggctcgccgctcgtgtaaactggccagcccaatctttgaagatttgaaggtgatttgttttttttttcacgaacccgtaaaatgattacgtcaatatatattagaaaaaatacagagttttaagttacacggcgcaactagccagaaggccattgaaggtgatttgcacatattcctaatctcaaatttccattctctgtttcggtctaaatttcagattctatgctcatattccccatgagtttgttaaaagaattctttttgaatttttatatttcagaatttcagaacgaggaggattttggatggcaacatgagcatggcatcagctggaggtgcagctcgtgtaattacattacacattccgtaagttcatgatccagacccaaatatagagctgtcagatttcaacgattttattcgagtctaggatgacaggacaggcaatcctgcattaattcctcttcgtctcaggaaacaaacaccaaattgaccaagcttagctccggagaaaaaatctgcatataaatccagcaggataggttagcaatcatagaaattttgcagtccttgtctgctagcatgtcagtatccaaaggatgaaaggagaggtttgtctgattaacgagtttgacttggaattcaggcaactttcaaccaatcatgccaaggatgcaaacttctcattctggcattctgcaatacagcatgcgtggattacgaacagatcttggtttgtttgcacgttggactcaagagctaatctaaccgtgggtctttttttaagtacatgttttatttttttttggaaggaaggcaaaagctttgccttgtatatattaatagagcaggagaaaattatacagaggtatatacagggttagccaaagaaaaacgaatagcgcacaaaaggggaattaagaaattaagtgatatctcccaaaattctaagctcttgtagggttgttgcccctgctttgactcatgctcttccttcctccttgatctttgctagaattgaggatggtggtgacgcagagtttcggaaaattcttgcattgcgttcgcaccagatttcccataagattagaataatcaaagtcctaagaggcttgcgggggggtgtttggagactccgctacgagagttcaccgctgctcaatcgagtgacaagtttcccaactgcccatctgaaggtcagtgcctgtccatctctagatttctgcccatattctctttgttagtcctcatttggccaggaggtgtagggccgattcatccaccgtgtagcagagtgggcagatcttttggttttgccatcctcttttctccagtatgtctgttgtccataccctgttttgagtgaccaaccaggagaagaatttgcactttggcggcgcccatccagattgattggttgaagacggatcgcgcagcccaaggaactggagtctataagccgattttgcagagtattgcccgtctgttgtgaggttccatcgaatgttgtcttgattttcgtttagtggcctcatgtctctaatcattttccagaggcggacatactgttggaggtggctcgcctccgtgatatgagagatttcgatgtctcggatccagttgttttctattatggcatcgtttactgatctgttcttccttccagaggccatgaaaatatccggggcgatctgttgcggagtttgatcctccggccatttcgagctccaaaatcgtgcagtcttgccattgcccaccgttattgttgttgcggccacgaagaggtctctatctagctggttgcacggcaatgcggtccctacccaaggtttttctggcgccacccattcattccaaaaccatctgagccgtagtgctgatgcgaattgttgcagatccatgactccaaggccacccaggtctttgggcctgcagattcttttccagtttactttgcattttccgccagagatattttcgccccccgcccatgcgaccttacttgaacaggatctgttctataggctcgtaccgttgcatcctttaccagtacatgttttaaatgccagatgctgcgaaggttcaagctggtaactggtatatgtaactttcatccttaacaaggtactgtatttttttatgtaaatcttggtatctccacatactatatattttaaaattttaacatatacatatagtttctcaagaaatttaaaattaggaaacggctttgacgatgactgggtgtggcggcatcaacttatatccccctcatctcatgcttgcttgccggtgaggggtgttggcgtctttacgataggtgagtgccacaaggtggtggtgatggttggacttgtgtagggaagcacgaaggcagccctcctacaccgcagcctcctgcttgtgtttactggttggtgttatggcgctggtcgatggttgtgcaccaaaggtgctcgcagggtgggggcttctggtagttaagtggtcggactaggctttcaccaggttaccctttagcacgtacgaagcaacgatgaaattgtaaatgagatggtatgtgtaagtgagtccatccgtcagacgagctggactgcgcggttctggatggtgggctgttacaaatccttaggtgaaaaccacacccttgtttcccaagttgcgcaacaacaacaccatcagcgtcgcaacctctcaagagaggatgttggaggtcaatttctggccaaactcttatctagacggtgttctcttgtggcgatgtcctagtcatcacaaattggccacgttggtaggccttgtggagagtggatccacttttctctctcagggctgcagg

SEQ ID NO: 10893 - DNA, 664 bp, Oryza sativa
  unsure (1)..(664): unsure at all n locations
tctctttacactataaactttgtattttagagatgaaataagatagaagaaatatatatataagaactagtttgtaatgctgaagcatattgatcggataagagttgataaaagtatatagctagcatattcactggtactatcattaattgtcttcgtctacaaaagtatagatcacatttgccattataatggttatatacttggttagaactcgtacgtgttgccttttttggttgttcatattttcattttttagccgaggctccaaaacagaagcgatataaacttttgaattttgtgtcgtctttctgcgtgcaggctctgaagcatgagcaggagaagtgcacttgctgcagcaggcctnnnnnnnnnnnnnnnnnncctnnnnnnnnnnnnnnnnnnnnnnnnnnnnntgaaaggtatctatccttagtttggaaccctgattacggatgatactttcatatttccttgagagtaacgcatgcgtggatgcatgaaccaattaatgtcagtgacacaatccaaatcgaccgtgagcattttgtcgaaatgtgtaaattgttagataggacatggcaagggacatgtatatgcatgcctgcatgcatgagtgagtgcatggagctagctactccgaaatagcggggtgcagccattg

SEQ ID NO: 10894 - DNA, 33675 bp, Oryza sativa
  unsure (1)..(33675): unsure at all n locations
gggtctgttctgttttccatgtcctttaagtaaggggaaaatgaacatttgagagcacaagatgacaagaactgttgcgttcgaaaagtatgttttttctctactaatcggttggattatggatacgatgatttacttctaggacgagggagcctcgtccaaaataggctaggagggcagatatagatcataaaagggcattagggttgaaatgcacttgatagtgcagtgactaagaacgtgtgattttaaccctaaggccctttacttaaattcctagcatgctcacaatttaccgaagataccaccggtatatcattccaatggaatagctgatgtcatgattatgttagcataatatctaggtacaccagatcctatacctatcggatcatgctaacgtcggtatagtacctggtaccatatctgatgcatatagagtatcgtgctaacgacagctattccgttgtaatggtatgctgttatatagtctacctctttttattttgtcacttaagtttaaggcttgattagaattttagacagggcctccaaatttcagaggacggcccagtacgaggcaatactggactcctagcctcctggctagtgatgtgggcttaaaagagctgatcccagatgggcccttttattttaagcccacgacagcctttgatctcgtgtgttcttttccccacgttagtgaatcaatcaaccttgccaagtgccaactaacctactcctatagttgattccgtgaaatccctgccagtggtatagtcgtacatggtcctgttataattaatgccacttttcacgatcctcagttccttattatagtgcttatctatatgcatgtgcagaatagaatcatagattagccaatttgcagtacctttttttccctttgagagtaccaacttgtagttatacaccaatatacttaaccacacagcgaacagtaacacctccaaatctcaattaacaaaacagaggaaaagatcgaagtgtagtaatctccagacatgagtgaggtagtacaagcaacgtactaccagtctaccaccaccagtaacagcaagcctcgcagccaatcgatgaccggtaaaccgcatcaggttcgcgtggtagtacaagtgcagaatcgtgtgtggaggtactacgcgccccccgcgcgcgcgacggcgcgagcgacgcggatttctttaagtttttccgcacggtgttacatgggtttgcgtctccgctaatcgagcgcctcgcgcgcacacgcgcgacggttggttggttggttcggtttgtttaagattttggttgatttcatcgagcgatcccgcgagcgtagacgtgactgcgcagccgccgcgcgggggtttttttatgcagttgagtgaatgcgcgcgtggtcctctttctctctctcggctccgagtctcgtgacccccgctgctggagtcgtcggccgtcgtcgtcgacgctgattcggtgattctcgtcccaccaaccgggtttttctatagggtgggtttacactttacagattaggtcgctttccacgtcggccgtggccggtcgccggcgtgacagccttagcttacggcggcgacggcagcggcagcggtgttgtgtagcgcctgccttcgtacaaggatggtagggtatcaacaatgcagtcaaacttttttcttgtaaactaaaccggtaaaaaaatttgttaattatatttttgataagtaggagaaaaacgtatatggttatatggtagttttagaagtgacatggtaataacacatagccgttatatgtagaccgaggtcacacattttctccatagcgctagtggcttcaattgttatctttgtttttctatgtcagtttatgatattttctattacaatcatgttttacttaatttacaaataagttcaaagtattgcactaaacaccaccaaatctagaaattacaaaaaaatccccttgcactctctctccctcaatgtctctccctctacgccaataagctcgatccccacgggtgtggataaagagctctccagctgacactgcctctcctctatttttcagcatatatcaaaggcatctctctttttgaccgacgagatctttagctaagtcatcgttttctttctccaaagcaaaacaaaggcggatccactttgccaaaggatccactgggtgatctcaagactagggccaatgaggtcattgacagctagattcatagatcaggcgatgggtagcaggttgggagtggcccataaacaaggagagatggtagagcaagctgatgagctctacaatgatgggattgttgtggctgagggatgagatgagcatgggactaaatctacatcgacaaagcatcatacaaataggcctctcgatcttcttctcctccactgcgcttgttttcacttcctaaccccatcattagcctctcttttttttggtcgagctagcgaacactagccgaaatttattaagaaagtgcaagaaatttacatgctacaaccaacggcaagtcggtctccttctttcattggccatcacccgttggagctccgcgctcggagaggaggtggactgcaccgcattgctagagcatggcctcgccgaccatggcttgcgaaccatgcctccacgctcgagtacccttgccctgacgaggcgtgtgtcttttgtagggcacgactaaggctaaggtttaaggcccccatcctttggccaaatacatataatacgccattcggcgtattagcaaaataataataatttacagataagactttcatatatgtgtttttagcgacttaaataccaatgctggaaaataaacttcgatgaaaaactttaaaatttcaaattttggtagcggctaatgctgattgaaggaaacgatggggacctaagagcatctccagcaatagaccttattttgaagcgtctaaaagttaaatgagggctgcccccatttctcaaggactaaaaaatgcctccaactccagcagtagcccctatttcttagtccctactcatgtttatcttgtattttaaaatacaatccatatacagtatgtttaacaccacaaaaattcgaacacaattatttctaactcacataatttaaccatacttaaattcacaatttcaaacactacaattcgaatacaaaattaaaatttttaaacatgtaaatatggtatgggtacagtgccatatacgacaacaagatgcaaccaagattcgtaattcaccaatgaaaatgaaaattgctcataaaaaatacactatgtgaacccaatgatgcattatataatttaaaaataatacatcctacaaccatgaatgattcgattataaataacaaatctgaaagtaatatatgtcctactagcaagtgacactaaaattattgtggaaataattaacaaaaaaggactccaaagaccaatcgtgataatggcatatcctactagtaaaggacacatggatcatccaatagaatccaacttattccatcgaagtgctcaaacttctccattaccgccaccaaactcacctccaaagccactactaccatcaaatccaccattgagggcagccacctttgaagctgcaatctgtgccctcatagccaacacatacgttctcacatccggttccaaggtggaaacatcacaaaacataatcttctgttcttgatcccacactaacttacgctcagcaaataagagcttgcgctcttgaatctccttagtttccttccatctctcttctttcaatttcgcttctttctctttagcgtcaagcaaatctttcatcgcctctttgtatggtccatcttgtcctccattcttcaacttttcctttgcttgcttcctacctattggtctctttttagcactcggctgagataaatcaggagctgtactcttgctagcatcatctccttcatcttcttcaccagctctctcaattggggtcgaagacttcctagaccgtggcctcttgtgggattctagtgtttgaaactttggagaattcctcaacttgagccaacaatgattaaactgaaatgccctattctttggtgcagtggacgagtataatgcctcagcttcaagaacctgcaacataatttaagttttaattcacatacatacaagattgttattaataataataaataaacaatttaacttacaagctcttgatgtggtatgccacttggatgacgacgctcaatttgattgtagcaaccttgaaacttgcttacttccttctgaatgttaccccaatggtgctcaagagagtttgcattcctatcagactcaaaatcacggttagcatggtagtgctctgcgatcctctgccaatatgccttccctggttgctcattgccaataataggatctgagctaatgctctgccatgaaatgcacaattgaatgtcctccttatgagtatagttgcttgatcttttggcacttccttttgcaccatttgttgaagtacgaaggtcttcatttggcattagcacttcgacatcagtgtcctcggacatcatgcgcacaaaggaatcacctccacttgtcattgcaatctagtcactgcaataaatatataaattgacaacctttccaatctatctcagaaacatcaacaagtgattgcaatgtacatcaggttatactgtttgcaatatgtatttatttagcatatatattggttgcgcagtactaaggactcagtgcaaacacaaatttatttcttaaatattatatatgctctgcaagattagctctctgacatagaacaagacactgcatataaaacatgaatgatgacaatgtacgttttgctgtgcgaatgatttagatgggcctagacgcctagtaagcccataaagatcaaaatcaaacaaggagactcagacatacgaaactgaactttactattgtgatttgttttaatcaccatcatctctgaatttttttactgcagcatgtgtgcggccggtgatagatagctgtcgatggtcggcgctaggccttgtggacagcgggtgggcagctagttcggggaggacgtcgagactcacctgggcatgatcaatcggtgacgacgtgcgttggccgaagatgcaaggaggtcggcgacagtgagtgacggagtaaaaccgatgattgtgatggcttgaggcggcacaccatgggatctcgccgaagtttcttcccgagggatgtcgggtggtcgccgaccggagcaaaacgacctggcggcttgctcgctgggaggttgtgggaggatggcgatgacgcgggagggaggatgacgatggcgcgcgctcagaaatttcccccgccaaaaaaaaagaggatgggggctgtggggttgagccccccggactgggggcttggaggagtgatctaggggcctccctagattgggggctctagtagggaatctgctggacctatatttttttgcatcaactctcaaaacttatttagggactttgtttgaggaccctgttggagatgctctaagtaattaagaattttctttggttttattaaaattaagctggttactatagttggtgttaaaactttttattggacagcgacgtacgtcgtgaggggattaaagaatcgggcaagttggccgaaagccaacgtggttcgtgtgggcgctaccgcggtagcgagcgagaggtgcatgcacctgtcagaaaacggatgcaccacccagggaacggacatcttgttttttcttttttctttccggaatccggcggagaggaacgcctgtgcaatccatgaaaaccgcggctggctttgggggggctttagctacggaacaaaattttcgagatgttgcgcctacgcctcccgtacaggctacagccctgctgcagtgctgcgtcgtgacctgacgtgtctgtctagctgtctcgtggtactagtacgaaatttactgacacaacgcactagtgcatttcccagctgttgaatttcacctaccattggagtgaccctgtttaaatggtagttaaaagtcttttaagtccctattacatcagatgtttgaaaattaattataaatattaaacgtagactattaataaaactcattcataatcttagactaattcacgagacaaatcttttgagcctaattaatccataattagcctatatgatgctacaataaacattctctaattatagattaattaggcttaaaaaatttgtctcgcaaattagctttcatttatataattagttttgtaagtagtctatatttaatattctaaattagtgtctaaatacaaagactaaagttaagtctctgtatccaaacaccacctaattcgtactctaatattctcaaatgtactgctactactactacaatactgcatggatccaaatactcttataaacagttaacagatcgatattgtaaactacgagtaaaaagtattccctccgtactcgttttggacagcgacacggtctccaaaacataattttgacttcttgtttctataaaaatatatattaaaaagtgatatatgtatacttttatgaaaatatttttcaagaaaaatctattcatataatttttacattttcaaactcaacaacttgagagttattcatgatttatattcccaatgtttgacttaaatattgtcctaaacgacttccattatgagtacagaggaagtacaatttacccccgaactattatggtacggtagtacaatttaccctctaaactataataacatatattgtattcaatacctcaaaactcttaaaaccagacgaataccggggcactattttggacggttttaggctaggttagctgacttggcatttctaacgcggcaaaaaataacaggcccacttgtcagtgatccatatattctcacctcatctcttctacctccttccacctcgatctctctctcatccttgaaccgagcagtgaggagaaggccgcggtggcagcaaagactactccccgggttgcttgaggtggagcgtggtcggctagagaagcccagggcggtgacggtgcgcgacgatggccatgatgctaaaccgctcgttctcacggggggagcactgcgccgcctggagcacctcccgcgcgccgcggtaccgccctgtggccaccgaccgcgctcgtactctagcgccagcactgagccgttgccaccgctagagctgccgatcggattctattccagggcaacgacctcgacgttgggcccttgtcaccatcacatttgtcatcgcaagcctcaccgtcagtgccaccatctttctcgtgccgcgcagcacggtgacaacgacgatgtgtccctgttgccgtcgccgtcgcagagcgccgacttgcagagctccaacttgacatagtatccacccaggtcactgcacaggcgcacacgcagtccatgccgctatccctccttctcccgcctgcatgccagccccaagaacacggtgacgaaaatgaggccaacgtgcgtggccgactactgctaggctgaggccgacctgcggtcagagaggcgaggccgagaacgagcggccaatgctgtcgtcgccgttgaaggcaaagggcgcggccgacgcgctcgcgcgtagcctccacctcctggggtccatacttgtcgacgcccgcctcttgcgtagctccatctctccggcaacaccgccgtcgtgcccgacgcggacgcaccaccaacaccaacaccgcaccactccgccgttggccgcacgagcgtgcgcacgaggaagagagagtagggtgaccggggaggcgttagattgagggagaagtatgacaagtgggcccacggagtttttttaaaacttttttgctgactggactgacacgttggcatctcgtaggtaagctcaagtcaaaaccgctaagaacaatatttaggtggttattagtctagtataaataattgagagtgcaaaatgtctacgtgagccttcacgtatacacacaatgtatacaaactaacaaatattatttttttagaaaaatgtacatgtactttaaatagtatttatatatacgcgtgaagtcccatctttaaatttatcatatatatatatggagaaaaaaatctaagacttatattcataaagctattagaattttttttaagtatgaaatataatgaatttgaggataaaactttacgcatacgtataatagtattgaaagtatatgtataatatttttaaaacgttttagcgatatttagtatagttggtatgtacagtacggagtatggacatgaagtttggtcctgttcgagaacccaacaaagggcagattaagttctagattttcgtggcacgcttttcaaactgttaaacggtgcgtttcgtgtgaaaattttctatatgaaagttgttataaaatatcagattaatcttttttttaagtttgtaataattaaaatctaattaatcaaaagttattaccacctcgttttacgtaaaacatttgatcttcatatttatcttcagaagattcaaacagaacctttgtgtgcccaagatatgaacctcttaattaacaaatagatatagttgtatagctatagctgttgggcgcacagctttttcatccgtgaatggattacattgtagaagtaaaacttatttcgaaaactatactgtataagtattcgacactggctttaattagctgaaaggaaactttcatatgcccttttatggaccaacatgtcgcacggaccacatttggtataaatccactgaacacgtttgatcttttcccgcctacttagctggagccttatccattaatttcaaacagttagtaagtcctcaaatggactttgagagtcacgtgacaacaactagggttttttttttttggggggtgtccactcgatctttcatgcatattcacacctttcgccttttcttttgaaagatcacggttaatttagtgctatattaaagaaaagatgaatagtttaaaaagagagcaaattaatttaaaaaagatacgaatattagtgaagtacctaatatcaaataattagaagggataaggaccaaggtcatctaacccagccggaagacctctgggtgtttctctaaaaaagagcaaattaatattcagttgatttagaacaatcgggctaaaaccgccatacaacaataaatacactaactagcttttttttaataatggaatagataacatctcggcctttgctcaacagagctacagccaattattacaatctagcacttaacaaagagtgtagttcaaatagaattaaacacacacctaaacataaaaaaaatgaccagaccaatataaggagcacacaattatttaagtctatttgtgaatctccatccatagttggcaaaaagttgcataaccgtcgtctcaagcttacgacatataactttcaaaagctctccatcttcatcacacttttacggttgtgcccaaaaccggagccaatatgttgctctgaagaatgcctgcataaatgaaatagatagtgatttgtcaaaaatcatatcattcctactcaatcacagagcctaacatatagtacaagcttctacaagaattagtttgctccttttcttgttcacccccaaagccaaccatcaaacatacaatgtatgaaagtaggaaggtataaaccaaaagagtactgaaacgctccccaaacaaattttgcaaaatgacaatctataaaaagatattgaatagtctcatttttcatacataaacaacatcttaagctgccattccaattccgttttgccaaattgtctttgttaacataacccctttaagcaagtaccacataaaaatcttaattttaagcggcatcttaagtttctaaataatcttatttctctcaatgtaaccattattaattaaggcttaaggctagatacattgaccttacagaaaataaaccattttgatgataattccatctaaaatagtcagtagattgattcaactgaatatgtacaatagaagcacgcaattcatgccaatatacaagattctgaccaactaaaactcttctaaaagaaacattaagcggaacagatcccatggcattagcaatagataaatttttccttcgaactatataatataaagatggatatttatctttaaaagccatgttttctagccatgtatcctcccaaaacttcatttgttcctcattattcacaataaaaaaactcatattttaaaaaatatttttaactttcataagacctgacaaaaaataggaatcaccctaactagctagcaaagcataaccacgacaacaaaactaacagccttaaaacaaaacgcagttcactgtacattggtaaaaactcgccgtcattcgtcatcacaccaccgcacacatgatcaggcgactccaattttgataagaattaagaaccaaggaacacaactttacctgaccaaaaccgaagtccgtttgactaatgctttcgatgccacatatcatggctccgacttcacaaccaccgtgcgaccgaatcatttcatcattatcatatcttatcgaatgaattactaataatctatcgaatgaattactgcggcacaagctaagactatctctatcctattttttgttgtcttcctcttatgatattactccactgcttttggaccacactagtggagctaggtttagatgtactaggttttcaagtttgctttacttagaagatagctgaaacatgatttcaaatagacaaaatagaccaaagtggaattggatagagaaaagattataattgatgtatgagttaactaagcgtcaccacaaaaacatggtttccagtgttattgatggttcggtttttccttgtcatatctagtgagcaaaacatatggtttagtgcattgacccattcacacccaattgattattcatttcattcctaaattttgacctaattccatttacacataccgtgagtttattttttattttttgcggggaacaccgtgagtttataatacaactcgtaaagagacaaatcattgtgataaaattatactactgttagacatacacatgactcccctgcaatagagtttacggatgtgccgaggttaaaaaaccgctccctaacggcaaggtcgctaacagcaataacggttgaaaacaagtgaaattcaaacattttttccgcaaaataaaatttagcttggatttgtttgaacttaaaccagttatatcgaacaatttcaaatgaccatgtcgatctatccaatgactgtgataatcagtctgttagcgtcgtagaaaaagtctagatgagaaaagtatcgagaggatgggcgaacataggtcagctcgaccaccaaattgacccaaccaacttgcatgatcgatctttgccgttaactacgtacctcccctcctacgagtgcacaacaccacaaaccagcttgtttcctccatatcacaaaaggtaaatataaaagactgaggaagtataaacatttgccgccaccaccattgattatcgagttcatcctctagtccccgcagtccgcagcagaggaaagaaagcatccaaaaatctaagccacaccaaaaaaatccttttttttttcttcttccttccctttcctcgatcagcatcatatatccaacacaaaaatctagcaccaaagatgcagcgaaaagccgagagagatgcctgccggttccggggcggggcgcgcgacgccacctacggcttgctactgctgctgctgcgcagtgcagaagcccactccactccgcgcgagacatccacttgcccgggcccggccggtccgctggtccccacggcgccacacgccccgagaaccaatcacggggcctcgcttccctttaaaatcccaccaccctctcctcccacttgcgcctagccccaccacctccaccacctcacctcccccttcccttcccttcccctcttctctcctctactagctatagtataggccgcccccgtcgttttgttaattttcacgccgaaatttccacccacaccacgcgccgcctgcctacctgcgcctgcgcgagctgcagatcgatcgacgagaggccgcgtctcggtcgcggggggtggagttgatcgatcgatccaaggaggggtatgatgaggaggtttctgccggtggggggaggaggaggaggaggggtggagccgtcgtcgtcgtcgacgacgccgcagccaagggaggcggaggcggcggggctgcggttcggtgggggggacatctcgctgggcccgcacggcggcggcggcggcggcggcggagggggcggagggcatgggcatcagctgcaggacgggagcgtggacttgctggcgcggcacagcagctcgccggccggattcttctccaacctcatggccagcaacggtaagatcgatcgatcgattgcgctagccaacccattgttcgattttatttgttcatccgtgttcaatttggcgtcgcgtgcgtgcatagctagcccatcgtgtataggcgtatagctaattggttaggactactcagagtcacggatcttcaatttctagcttaattctgtcaggagagaacggctagctgtgcaaatgtcaacctcgtctttgccttcacatgccccatctctttctcgtcacacacgcacacgatcgaagtatcgatcgatcacatgaattgctgttctaggcttctagcaacaaccaccaaaaaaaacgaattccatcgatattattgttaatggtgttctttctctctcagtgtttcctccacactgtttcagattcttcccatacttatccgaaaccaaacgggtttgatcaatcgatcgatctctgtctacctggttcttaacttctatgcaactcccatcactactaactgccaaagccactagctcgctcggcgacgacgaaatgctgatgagctcgcgctatctagctaagctcgatcccttttgcaagttgcttctgcggcgcgcgcgtgaatcgatcatcgcgtgcgacttttcaccggtcctaactggttttttttttgggttaaaaagtggttttcgctaaggccgtcatgggaggagctagtgtgtatatcagactactatcagtatgcgttgtggatatccatggatgtgttagtctgcggctttttgctacgtgagttgccataaatagtatcatggagatcctctgtgcccatttttctactcagagccattagccataggctcctatatgtggttagtaacttttgtgtgataataatgcatgtttgccacagttagggtcaatatatatatatatatatatatatatatatatatatatatatatatatatatatatatatataagctgttaattaaggatccaccatgagatgttatatccatgagattatgcggcttaattgttttcgtgataatgtaatatgagttcaagtttttaaggcatatgttattacgaggagtgcacaaatttggctcggcgtgtaagaaggacgatggaaaactatgggctacacaggaggcgggttttctcaagtagggtatcatcgatagtgaaatgtggggtctagggttttgaatacaccgcttttattctttttacgtacgctttttataatcgagtgtctctagattgtcttattttctattgcaacttgctataaatggcttagtttttttgccacttgcacctggtgtccctctctctcatttgatccattattttcagttgcaaagtcattgcgcatgacaatccattcttcactacaatagtagacatggggaaaaaaaacaatttgaagctatagtggagagagcaaagagatagatgtttttttttctaatttaatttgttcataataagactagaaaaccatgcattcatcttccaggatttgcacaaatatgtacatttgattaattagtatcaccattcaccaacctagctagctaaaacaagctctttttaaaaatgtttttggcaagtattctcatttcatataaaggatacctatatgcacctcatttgatgaaaatcattgcaaaattatgcaccatcattatttattccatgagtattaaattaattctgcgtcacaaatattcaacgttttagagcatacagagataataaccctttaatgaaaacttcaaaatatcatttattcaaaaattaggaataagtgtgtcaatatctttttgaaatgcagatcaatatgaacatagagttatgttataattaattttcacactacatatataccaacatctaaaatggccttttgaccgagcaacctgtatacaacaattggtaaggataaaaatagtaccagtagaaatgtcgaaatccacatataagtactacaccagtactaaatttagtaattatactttgatcgaggtaggaatagcctcgagtaaagtttaaaagagtcaaatgtctttcagtggagcccatgtagcagcatttctttcaatgcggcagccagttgcactctagattctgctctagatagaccaacttgcgcatatatgatcaattaattagtatcaagacagcaagcacaattaaattaccagtggatcttagtgcctcgaaccctagccaaggcaaaaagaaaaagatgagggcatttgattaatttgtggattaattaatttttgatcaatggattaattagggcgccacttgccttaatgtaaggcggggaccacgtgtgtgtcgccgcaacttggcctgcggggtgggccccccggtttgtccaggttcagctcctctgctgatggcctgacggtgacgtcacggtcttgcctcgctaaagatagtgacctacggtgcgttgagatggcatgcgtgattgctcggcttcttgatttggcgtttgctttctctcttggctgcgtctatgtcagcgtgcgaggcttgctcatatgcacgggccggcacgcggcatgcacgtgctagcgtgtccggtaggcttcaatataccatctgttcgcatcgtagtacaaaaaaaccgaagaaaccatccgattcaatgaagaaaattatccatattcttaggttgttgtattttgaaatggagagagtacttgttcttattaatttgaggagaataagatcgatcccctggaagtagtcgtaggtacgttcaaaataaatataaaataaatatagtgtaatgtgtgcatgtcagttcactggtcagaaaataattttcgcgtcattcgcagcaatttgactagaaatttacattgtggaataaaaaaatcgtggggccaaaatttcaatgtttttaatgaaaattttaggctagatcttgggattttcttttttaacacagtacagacacaaacatgcatatatacacatgcatactcaacgctctgaacatacacgcacaccctatcactatataagcacctttaaagaggaccgtcatgaagtcgtcacagacactgtcaacatattttaaaagttgataaccaaccattttgctaagggcctgtttagtttgcgaaaagaaacattttgggtgtcatatcggatgtttgaccggatgtcggaagggtttttcagatacgaatgaaaaaaataatttcataacttgcatggaaactgcgagacgaatcttttaagcctaattaatccgtcattagcacatgtgggttactgtagcacttatggctaatcatggattaattaggctcaaaagattcgtctcgcgatttcctccctaactgtgcaattagatttttcatttatttatagagagaatcccttatataccaccgaaagttggtctaatcccttatatgccattgacaattagttcttcccttatatgccattgatccaaatttgcacactctctcacgccactcccgtcagttgacatgtgttgaccgttaattcttaaggaaaaaagacgtatttacccttctgagtatagggcatgcctaacaactcagagagggcaatatgtcttttttacttgagagttaacggtcaacacacggtcaactgacggtagtgacatgagagggtacgcaaatttagaccaatggcatataagggaggagccaatttttagtggcatataagggatcagatcaatttttagtggcatatgagggattatctcttatctatatttaatgcttcatgcatgtgttcacaaattcgatgtgatgttttttgaaaaaaaatttagggaactaaacggggcctaagttaaaaaattcaaatactttttgggcttctattgggacccaatagtaatccaaaatttgaaacctttgatttgaatagcgatgtaactattgggcatacaaggtttgaaaaaatggttacggccggattgctaactttgatattattttcatccaaaacgaccaatactgaattggagggagtagaaattaagttgcaacacgtaagtacatgtttgacgatgtgcttataagtaactagtaatagctagtaaagatgaacgcaaatgcaaacactaattttaattgtttttgtctctttcatatatataatattcgtctcactaacgatctactactctttctaattaaggtggtcgtttgaactcatctttctgtaagtttcatattcttaatacttgtgaccactcaaaatagaccttacattttaaaatggatggagtacaactttctggaacatatggttctagtcacgagaatattcctctcatatactccctccgtttctaaatattcgatgccgttgacttttttaaacatgtttgaccgttcgtcttattcaaaaattttaaataagtattatttttttcctatcatttgattcattgttaaatatacttttatgtatacatatagttttatatatttcacaaaaatttttgaataagatgaatggtcaaacatgtgctaaaaagttaacggtgtaaaatatttagaaacggaggaagtatatcctgtatctatcgtgctattttgtgctggggcaactcggccgggccacttttaatttcgtagtgctagcttgtaattttttttaattagttagtagtgcatagtgttgatgaatggtaattgttgtggtttaagttatgtttaactataataaccggtgattagtcaagtttaatttgtacatggatttcaaatagaaatttggtagtgtttaattatgaaaatatttatagaaccactatgcatatataacattacacctgcagttaaacacacatttgaacatgagaatcaaacctaaccttaattacgtgcacctactacagaaaaatattgtagaatcaaatacacactactccattcaaccttggagaagcaagtttgaacatcccatcacatctaggttaaacttattgctcaacacgtgtacctatagagctagctctaacggtatgctaataccgtaaactattgtttacttgtcacacttggcagttttcaactagcgtttgggtaacagtagctctttctctcacacacacagttaatttaactaattagcgatcattagttaatttccgtgcttgctacttggcaataaactaagcaggctttccaggctcaaaaggcgggggaggcagcggagccgaagcccaccaccacccttccatggccggcagcggcagcggcagcagcagcggcgggaggaagatgaagtcccagctgagcttcacggccgggccgccgcacctctcgcacatcgcggaggacggcgccttccccgaccgcgccggcgccgaggcctccgtgccccgcaccttctccgccggcggcagcagcggcggcggcgggttctccatcgtcgggccgtgggaggagtccagggacatcatctccaccctcggcgggtacgagtcccaggtaaagattgctcggcaaatttgattgctagggctaccttcattgaatcattgtacactacaaggcttcttgatctcttcatcccttgtttatatttactaacattcataagaatttggacacatgtatgaaacacatacatttatacatgtatgaatctattcaaaactcaaaacaacttataataattaatgtaaaacagaggaagaagtagtagctagctttgctgtgtttgtgatatatatatatatatatatatatatatatatatatatatatatatatatatcgcgatgtgttctgatttcttgggcgtgttggaaatgggggcagttcggcggcatggcgagcacgtcggcgctggagatggccggcatggacaggtacctgcagctgcagcatgaccaggtgccgttcaaagtgcgggccaagcgcggctgcgcgacgcaccccaggagcatcgcggagagggtacgtacgcaatatcatgatcaaaacgcctctatatttgcttttgctttctcttcagatcttgacacatgagcatgtacgtcggtgtgatcgatgcgcgtccgtaggaacggaggacgagaattagcgagaagctcaggaagctgcaggagctggtgcccaacatggacaaggtggccattacgatttgaactttgcataatgttcatacctatatttacatgatatttgaggaagaaaggaacatccctagctaagtattttcttttaaaaaaaaactttccacatttcttgtgccattagcacacagattcatgtttctcgccttaataatagacatggcaaatgcacacgcattcacccatgagtgtgcactgtgaagtgtcccttaacacatgctcaacaaattcatggacaccaagcgcaaaatcataacctaatagaatttctagaaaaagcgtatccatgtttgtgtagttaaattctataggcactgagattagagctttggtgcatgacagccacaactccaacaccataccaaacatgctttctcaacaaattcatgattattgtatatagatgaaaggggtcgtacgttctctcatctagttctagctaatattaattagcggtaacattttttgcgcatgaataatgcaaccaattgagtaattaattatgttcgtgttgcaacagcaaacaagcacagcggacatgttggaccttgcagttgagcacatcaagggtctgcagagccagctgcaggtacgcatatttgaggatttcttcacaaggactaatcccgcaagtaggggataagattgaaaattcacatttacattttttttcgtgaatgcgcaaaaggcgcgcccatcaatatattaaaaggaaaagaggttttgttacataacgcaaccagctagacgagcctatgcgaaggaaaggaagaaacgaaaaaaaaccgacattgtctatcattcccttttgttctaatcaatttgtcttatttaaatcttttccctctcaagtgatgtatgggctggtaattaatacacctctcaaggctgagagataacatattttctatttagatttgttagcgaaatagccgtgctttgctacaaataactacaaattatatgcatgctagtattgtttggaacaaattaactacgaggtgtgttagaagatatattcatccctggggatctctttacactataaactttgtattttagagatgaaataagatagaagaaatatatatataagaactagtttgtaatgctgaagcatattgatcggataagtagttgataaaagtatatagctagcatattcactggtactatcattaattgtcttcgtctacaaaagtatagatcacatttgccattataatggttatatacttggttagaactcgtacgtgttgccttttttggttgttcatattttcattttttagccgaggctccaaaacagaagcgatataaacttttgaattttgtgtcgtctttctgcgtgcaggctctgaagcatgagcaggagaagtgcacttgctgcagcaggcctnnnnnnnnnnnnnnnnnnnnnnnnnnnnntgaaaggtatctatccttagtttggaaccctgattacggatgatactttcatatttccttgagagtaacgcatgcgtggatgcatgaaccaattaatgtcagtgacacaatccaaatcgaccgtgagcattttgtcgaaatgtgtaaattgttagataggacatggcaagggacatgtatatgcatgcctgcatgcatgagtgagtgcatggagctagctactccgaaatagcggggtgcagccattgtgatcccttaattaattctcgatccactgatgattaattagcttgtaattctgtctttaaaccttttttttaatgacgaggggagagaaaaagaaaatgaaattttggtcagcatgcagaaagaactacattattaattcgtgccatttggggtgctgtttatagctaaccttctcgatcgatcacctttgtgtgtctcaagttgcaaccatactggtttaatttgtgctttcaatgtaggaggactaatgcagtgtacgtgttacgttgatgcaataaaaatcaccctttttaagttattgcagcaattgcgtatgcatcactactaagaaacgacttttggggcgttattttcgcaggcctttaagtacatagagtatttgaccgcctacaaaaatgtgttttgacggttttttttaagtagtgcatgatcatctcgtcgattcacctgtatcactgtatgtatggttaatttgggtttcggagttggactatgtctcagcttaaatcgtttccaatcgaattccacaccgcgcgcgcgccatgccacaacaactgctgcgtcgcacccacttgcacttgcaccgagcgccatggcgagtaggccggttcatccaatcctcgtcgcgttcttggcgctgctcctcgtcggcacttgccaggcaaggccggctccggggaaggccgcgtcgtcgtcgttgtcatcggcggcgaagggggcggtggtggacggcatcacggacatctacaacttcggggactccatctcggacaccggcaacttcctcgccttgatggagcacaccgtggcgcctccctacgtacggcgcggccatcggcagcgccacggggcagtgctccgacgacgggtacctcatgatcgactacctcgccaacgacctagggctgccgctgctcaacccgtacatcgacaaaggcgccgacttctcctacggtgtcaactttcgccgtcaccggcgccaccgccctcgacgcggcggccctcgcgaggatcggtgttaccgcgccgcgcaccaacaactcccccactggagctggacgctcagagagagctgttggtgtgcgaacggaattactggcgctgacggtggaaggatgagagtgtcacggaacgaagaaaatatcgcgtccaaatgccatattatgaaagtagtgcgaattgagtggtctatcctgaaaacggtgcatattcggtggcatattctgaaaattctcgagcaagagaagctggcgcgagcttgctggtgatggtgggagagatcgccgcgaacaggccgcgaacaggaggtcgtagcgccgcgcggacgtcgggcgcatgatgaccggcgtggtggagtcggtggtgctcgtaccagaggtggtgcggtcgcgtggtgagcgcggcgagggaggtgctcgagatgagcgcgacgcgggtggtgatcccgggcaacttcccgctgggttgcgcgccgagctacctggcggcggtggacgagacggagcgcgcggcgtacgacgggaacgggtgcctcgtgggtctcaacctgttcgcgcagatgcacaacgtgctgctgcagcaggggatccgggagctgaggcggtcataaccggaggccacgatcgcgtacgccgactactccggcgcgtacgtgcggatgctggagggcgcgcgcgacacggggttcgacggcgtggcgctgaccaaggcgtgctgcggcgggaagtacaacttcgagatggagcagatcagctgggatggcgtggcgtccacctgactcagcgcgcgtacagcgtcatggccgagcttctctaccacaagggcttcgcgtctcctgcacccgtcaagttcccgcaccagtagatcgtctggtatttgcaagtagtgaaaataatgtaagctgtgacattttttgacgaagatgtaacccatgatttagtcatatcatgtattccttttttttttcaattggtacaaaaaatagcagtatcaattctttttcactgatttcaggacgcttctaatttggatttgccgatgcttcacgagggtgttacaaagttgcagccacccctattcctactttatttctaaactgatgtacagaacgtgtatttatgtactccgtggatacaatacaatgtgcctcagctacaacattgtttatggaggagtacatatatgaactacatgctacggcctactcctcaacaggaggatccacccaacggccatggtccttgattaactgaatcaaggcgtcagtggccccctccattgcaatgccccgttgcacgacggtctgcacccaaaacaagtagaacttgtgttaatggaaggaaaatggcagctctaagtttttgtttcagctcaaagagcatatatatgccatgcagttaacatccctactgttgattgtgtttgcatgatcatgtacaaatattgacttgcagctatgttcaacgatataccgtgatttccattattccatttgatatgattcaacttccacaagtataggaaaaggttaccttgccaacataaaggtcgatcttcccaggagcacctccaacgtatccgaaatcagcatcggccatctcccctggcccattgacaatgcaacccatgatagcaatctgccaggcaaatgtagacatgattagccatcaggctagctaatatgcgattgaaaacaagggaggcagaaggtctgtaagagagtttacagagacgcctggcagatgagaggtcttctctctaatctgagcactgacttcttggaggtcaaagagtgtccgcccacaagaaggacaagagacatattcctgcagcattaattaacggtcagaaatcgccaaaagaatgttctgcttcacaagagagaattgcctaaagttatttatcctcttcggtaggctataaggttcatttactgttaaaagtgcaattttgcacttcttcatgatatctcacgagttaaaggttgacgttgttcatgggatctacagtctaacagagaagaattcatcagcttaccgtttttgtgttgcgcatcctgcagccctgtaacaagttgaaggatgtgtccctcaaaaactcaaattcctggtcagcagcttcaagaagtacaccatcaccaagaccatcaactagaagagcaccaacatttgccccagcaccaataacaaggtcatctctgcatataatttaactcaaataagcacaagagaataaaggtacagtaatttcaaggggtaaggatgggcggtcaatgcatctcttaataagcacttcatagtacctgttcacgcttttggggaattctatgtgatggattacagggaagttcaaaccgttggtttctaagtactcaaataacctgcaaaacattattaaaaaaaataaaattttaggtaaagagaagtacagaacaatggaaaaccaggtggaaacattggtctgtatgtcagttttctgcagagtcaaatccattttcatttttcatgcttaatgtgtaacttagaattgactatcggttcatcccaacaaatggtaataatggagggagtggtattaactggcctactgtgttcacttacctcctagcagcgtgtactctgccagtcttctcttcaccataaggaacactgtgcagtaacattgttatatcatcaacacccttaagaagatctagctgttcatatgattcatctccacgaagggtgacagccaatctagtgcctacataaaaaaaagattcatcaataaaacagactaagcaaaatgttaaaatacagaaaatgacataaacacaattcacaaaacaacaaagatcattatcaaattcaaatgtctaccttctggcaaaagtttgtgtgcaccgcttgacagttcatccacattgacaagagcaattgcatgtgggagtggctttgtcagttgctctgataagggagtcaacacacccatgctgatgtcaactaatcttttgagtgcaagcctctgtaccattttacagatttcaacacaaaaattttaaaggaatagaatgttaatataagcttgtgatttgtgaaaagaacaaataatgttgaaggaactcacagcttgagcatcttctacaggtgggagctccttcaaaagaatagaatctacagttgccagatcctgatattcatagaaaaattaacatcagtttagactgaagtaccaataaagtttagttgtttgctagaatgtacagctataaggatcagaccttgaaaggcatgccaaccacaagctttgcagcaagagacctataaaggagctcaggagcctgaaaaataagagagccttccatcattacaaaatgcatcaattgatttgattcagatagaaaaaaatcaatgccttctttttgctattgctattctcactatgtactatgaactatgcatagaatgcatggaacatggctactgaaaatatcatgttgtagaattgtatattacaaaatagactattgtcttgaaatatattttggtaaagttacacaagatcaacacattgcacaaaagggtaacaaatatgtgagttaccttcaactgatccaaggaaactgacatcaaaacagagccatcacggtgcaagacccctctgtagtctacttcctcaccctgtcataagtgcaactaataagaaatctagcactattgtttttatgataactatggactataggagttattttgaactaacctccttttgtaaaggcaactgaccacttctacgctggaaatcaaaatagcgcctgtgcttttcttcaaaaggagcctgagaacatataatgtatataaatagaaattcttaaaagaacaaatagaacaaaacactactaaaaatagtcaaaattaatgtgtggcattggcagctaaacaagagaaaagtgtaaaactagagaaaggtaataaatcgttaccactcctatttgaaggtctgcggcatgtgtgccaagatttgccaatctccggcaaggatcaatctcttcttcaggtggttccgtgagggagacacggattgtatcgcccaagccatcctgtaagacaacaaaaggaagacataaggcatgcttaccctttgcagatggaaagatatgatatatgcaatataatacacaaagtaaaaatgcaattaccatcagaagtgttccaatgccaatggcagacttcatcctcccatcttcaccctctccagcttctgtaactcccaagtgcaaaggataatcccaccctaggttatacatttctgctacaagcaagcgatatgcttggaccatgataacagggttacttgctttcattgaaaacacaaagttatggaagtccagcttccgacagatcctggcaaattccaaagcagactcaacctgaaattatttgtagaacatgtcattcatctatcaaaacgatcattaattgaagacatccatgaaacgaaaagttatttgaatgaaatccccagaaaggaaataataccattccgcgtggagaatcaccatagtaactcattatgcggtcagacagacttccatgatttgttcctatacgcattgctcttccatactgcttgcatttctcaaccaacggggagaagacctgaaatgatatggaagtggctatgcaagtaaggaaacatactgcacattcttactgactaaattaacactaaagagtgagatatttggaaccttctcgatatgctcaagctctttttgataatcatcttcagtatattcaagctgctcaaattgggcacggcgatcagctgcaagtagagttctcagcatatgcacagagttgataagatattgacactaaaatgatacacatcattatttcactcaccaaaattccctgggttgacacgaattttgtcaaagcattcagccactcttaaagcaactgtcggggcaaaatgaatatcagccactagggggatgttgtaactgttgaaatgcaaaagcaagatgagaattcattcatgaaaactcactgaatctggaaaaatgatgactcttacttcttctgaacaagagtgttcttaatctcaaagcaggcatcagcttcctttctaccctggactgttattctaacaaaatcagcccctttatctgctatcctcataacctggaccagtgctatacttcgttatttcactagtcatgaaacatagaacatctaaaagaacacatgattaatgcatgcccagcattcaattattcaagcatagaattaaaaactaaaacatagaacttcaaataggagtgtacctcctctacggttttagcaacatccttggtatccgaggtggtcatagtctgaatcctaatgggatgatcactgccaagtggcacattcccaaccatcacagtgcgggtttttctcctccttgtctcatatatagattcacaatacttttgcctgggaactaaagaataacaaaagggcaaaagacatgctgtcagattctttacagaaaaaatgttcattcagttaaaagcactaagaacaactaacacgaatatacatgcaaggtgaacaacagccggcgagttatacctaaaagtgggcttccttctgaagatggctcgagctccatggtatcagaaccggtacttgagctcttggccacaagcaccctgcctcttgatgagcccacccttagagtagcaggaaccgacaagatcttagcaaagtcgacgctcctcgtgaagccgatgccaccatcacggaccctgacatgtgggagcggcgctggtgccactccggtggccatggctatctcgaagcaccaacttctgggttaggcaatcctacaaacaggtgcatggcaatggtagagatgagcacagggtcatctttgtgggttttaatggacagaaatggaatattcccttattgcttccagtccaacaacaggacaaccatggtgtgtagttattgaaaattaactatttcacaattcgtacaaaatactgacatatcaacaattagcaaatttaataactttactttgctaataataagagaggttggtaggacagcatgaagaaactgatgcttctactacaattccaaagaaaatcaaagtatagcaccaatcaataagcctggtcttttaaatagcatttccacttagaaattgaacatgcttgcagaaaattgagataaatattttttttaaaaaaaaaaaactgattcgtgtatccttccggctaagaacaaagggagaaataagatggcatgaactcttgatagctcaaaaaaaactaagaaaaattaagaaaaatccctcctaatccaaagataatgctctctaagttgatcaaatcccgaattttcgcagccaatctcaagagctctacagccctctgaatcataaaaacccaaaccttctaattcccaagcagaagcacgaattccagcagctcccccgcagcaattagcaccgacaacgccagctcccccgctagaattccagcaaataaaccaagcacgaattgcgcccaaccaaccaccacaggaggatccacccgatcggcgtccccccaacacacaaacacacacacatacacaaagctactagaaatctcaggaagtagagataaggctccccaacctcgtagctcccctccggcgaccgcgacgagatcagcagcggcgaggcgatgcgatgcggggatggagacagagtgcgagagctcgcgagctcggcgaagaggacgacgaactggcgagcgagtggtgggctttctaccggattagcccatttatccccagaggccggcgcccccgcaccgcgcggcgcgtcgtgtggactcggtgcacgagcaccgcgttgccgtgggcagtggctgcgtgtggggtccaagagatgaggtgttggtggaccgggtgcatgggaggggaaggctgacggcgtggggttggaggtgtggaagtggggttccgggctctccccgccatgatttaatcgtgcccgtcgttttcccatgcgcttcgtaattccattatcattttgttttgtttttattttattttttattagttcacgatggagagaggctgttttgttcgtttattatttctgccatttgtttttcgtggccggcatgggattgtattgtaccatgaaaaaaaaatagtttaatctggtgcgagagatggtgcttgagccagataaaattgtctgattgttccgtattgttactggctagaggagaaacttcacgaatattcatgggtcatcgaaggatgttttttccttgatttgttggataattcgaatattttattgagaaaacaaaaagataaatttggacttatttaagacccaaagttctttcacggcagctgaggtggtggaatgggactgtctaagaatctggtgatagtttttgtaggaaaaatattttgaacataacttatagtgtaagttgtatatagttatattataattgctatgtgaagtatattgtaattaaggtgtaattttagttttaattcaaaatcagctgataatgttatttttaaagtatttgtaatgataaaataaatgataattatattttgtaataagataaatcataaaacgtatgcccgaaagtcaagatgctaaacaacaaaaaccatagggagtgcagtactatttattgaagaaataaaaaggatattaacattctttagaaataaaagaaacttgatgttgtttaataaggggagaaaaggacatcatttagttcattacatttcaacatttcttccatgcatgtactttcgatgtttgatcgtgactttgacaaggagatcgatcttaattagctagtgcagcttgaaacaaagctacctgcccaaacatacacacacatcgtcgtcaaacctcatgttcaatgccaaaggggagtgtggtttgagcggctgacttgttgtggagcaaggcatccgcgcgcgacggccgccgaagaccataatcaccttctggtccggtggcatggtatgacgggtagatgacaatattgagacgatggccagttcagtcacaccacatgtgttgacctggagcaaagcagatggcacgtttccctgagacaaccgtctccatgtgggcggaagttctcccacacatgttttgggtcgtgggaactttgggagcgttgaaaggtaggcataaaaaccgtggtggaaattttcgacccatcaatctagtgttttcgtaacagttatactgttttcgtttctagttatatataaaatcgactcatgttgttttaattttctgttatgttgatgtcgtcattgaatagttatactgataaatacggaaaattcttgacgaaccagtaaccgtttccaatctttttacctcagataaatgtgcaacctcatgtgaatttaaatgcgtgctagccgggatgaaactggtttggatagtttccgtccgtccgaaccatttttcggattcggatagtttctgtcggaattatccaaaaattctcggattcggaaacgaatttggatattttttctcggaaacgaaaacgaatacagtaaggatactatccatcggaatcgaaaaacggttaaaaactatccgaaatttttttcggatatccgcagatattgagcaaattttataaaaaaacatgtatatatacataactttttcatacggaatcagatgaagacaaacttcatatcaacattatagagctcgatgagatctacaactttattattgactattttattatttaaggtcatttaagggtctaaatattcattataatataccatattaaattttacaaaatctcagatctacaattcaaacgacatctgatggagatgtgttccatatcaaagttgtagagctcaacgggatctaccactttgtagtttataacatttgtacttgaaagcatttaaagtataatacatacattacaagtttcgaagatgtgaagtaaaataaataacatctccaatttatgcaatggtaaataagttatacatctagtaaaaggtcttggaatagaaaatgataatcatatttgcatatggatctcttagaggaacaaccatgaaaatcgattttcacatacgattgtggaaccgtctataaaattgacgatataaatgttggagatatttaactaaaataataagcgatatctctttcttaatcaagaaactcaatttgaggggttttttatataccggtaaatattcgctactgtattcgttccatcttatattcgctccgtatctgtattcgataatattcaattttatttccgtatccgagttttcgatttcgaatccgattccgaaaaaaaaatgaaaacgaatatgataaagctagtttccatccgttttcgatccgttttcatcccttgtgctagggcatacttatgtgggtgtaggtatgacatatgtcttccccttcattctcgctaagctaggaatcattcttgttcccgatttccgtctcttgagcgcgagactcccacactagagaagagcgagcgggagggcggtgtcagatggcgtgatcttaaatcgagcgatctgatgaggtgcgggtagaggaatctaatttctgttgttaggggggcatttttttattctagggaattaaatttatgctgtctattgaaaataagtatatttttaatccttaaattctcattagagaatgaaaggcagatttaggaagagactttcaggcaactcttggccatgctcttagagtgtcaaatacaggaatgtataataatacttaaccaaacaatattattagagtctacagtaattatcctagactgtttaattaatcattttatagcaaaaatgaaaaagtcaattacccaactttctccgatccagtctatgaagtccaacaaacccaatacgacagcccaatgtattacagattgagttgggccgcaagcgcccataccaaaaacatactgtgaggttgtcagtgcacgacgcgaaggaagcagagaaaggtcagggcacatatggttgggaccgcctatgcatcactcgggtgagattttttcttccgaagagaaatcacgcgacaaacgtttagcaaaatcgcatatggttttatttataaatcaaaacggctcaaacttgagtagttttgatcagaaaaaacgcgcaagccatgcaacaccgcctcacgcgcgcgcgctgttcgtgaaatttatcggaggcgggtgcacgaggccacggcggaacagcagctcggccatgacgccgtacgcgcgctgcgtcaggtggacgccgtcccagctcacgtacctccccgggtccgcgcacgccgccgtccccggcgcgccgcacatcgcgcgcacgtcgaacccgtacgcgcccccgccgcccttgccgcagcacgccctgaacacgcgccgctcgtcgaagccgagcgccgctgccccgtccagcgtcgcggcgtacgcggcggagtagtccgcgtacgcgaccaccgcggcgccccggtacgcgcgccgcagctccccgacggcgcggcgcagccacgcgttgtgcagcgccgcgaagaggttgagcgcgacgaggcatccgcgggcgtcgtacgccgcccggtccgtcgcgttcaccgcgctcatgtagctcggcacgcaacccagcgggaggttgcccgggatcaccacccgcgtcgcgcccatgtcgagcacctcctgtgtcacaaaacccacaaaaattaatttagttcttaattaattactttgtagccaggattattattttaaaaataaggtcccaaaaattaatggaaaagaatggtgtgtaccttggctgcgctggctatggactgcacgacttccggtacaagatcgacggccgtggcaacgctttcgatcatgcgtgtgacgttgccgaggctgtatccaccgtccatcggccaggtctggaggaaggcgtagttgtagtcgtttcctccgatctctcccagcataaccagtgacttcgacagcttttcacggatctctgcaatgcaatgctcacacaaaagaacttttttctttcagaaaaaagtatatatatataacacaagatttctctatatgaaagtcattctagcactgaaaagctgtacattagcttaattatttgtgagatacagcattgctgactggcactgatcaggcaccggtcgaaattaagctgaaatgcgtttcagtttgttcgttcaccttgaggagaactagttgtggagttcatgaattccttgaaccatctgagctgcacgtatatatccggttgaagtagtacctcaaggtcttaggttcatatcctctatggatggattgtttacagggttaagttccctacttcaatagccgtatatatccggttggatgtagaggccgggtaaaaaatacccttctctaaaacaaaaaaaatctgagctgcacgtcgagggggctgttggtgtgggggacggtgatccgcctggcggcgagcgccgtcgtgttgagcgcggtggcgccggcgacggcgaagttgacgccgtgggcgaagtccgcgccctcgtcgaggtacgggttgagcagagggaggccaagatctctagctgcacatcgatcgatcatatccacaatttaatccgaaacaaaaacgcatatatatataacgtaatataatattgtttcttccatttttcagacggaagagagagagaaattaaactgatgacgtcaccgaggaagtcgatgatgaggtagccgtcggagcaccggccggtggcgcggccgacggtgacgccgtagggaagcctcgtggtgtaccggagcagcccgccggtggcgccttgcctggcgaggttgcggtgtccgacagcgagtcgccgaggtttgtagatggccgtaatgccgtcgactactaccgtacgtgtcgccgtggacgccgccgacgccgccggcgatgtcgtcggcggcgctgatccgaggcatgagccggcgaacaggagcactgtcacgagcggaacaagagccatggccgcgcgcgctaggttgccacagggtacaggtcgctactttgaattattttcccacgctaattaaagtaggctcgatgcgaaacgtggccggtttttttcgttacgaaactcagctcttccgtagggaaacctacgcgacagcattaatgcattaatcgagttgcttgcacgaatctccaagtgagggaggggttacgcgttaggcgctgccacgtgtatcgatcggcacgaatctccaggcagtcggcgagggttaag

SEQ ID NO: 10895 - DNA, 1573 bp, Oryza sativa
gttacttgttcatacacaaatccaccaaacacaagagtagggtattacgcttcccagcggcccgaacctgtatacatcgcccgtgtctcgcgtttcttcctagctggcgatctttccacataccgagagagcttgagatttcaccctaagcccccggccgaaccggcaaaggggggcctgtgcggtctcccggtgaggagccacgagctccgtcagtctccctagttctacttggacaaggggacatctatgggtataaatacaagaccccctagaaggagggaggacacggaacaatagatcaaggcacaagatcaacatacaagccaatatacgccaagacacgccgccggatattgacttcagaaataagcatggctagtcccctacggtgtctatggatactgtcaggagagacatagcgctgtctttgatctcgccggatacggattcaaggaggaaggctaccctgttgtcgactacgagtcagcacttcagaccgccaagtcgacaacagttagataggctaccccaaatattgtactggtgtgattatggtgaataaaagcaacgaccggcttcggccaataggagtagggttattactctgacaatttaggggcccgaacctgtataaaaatcctcgtctccatcttttttactacaatctcgtatatattctagtatcaacgatccccatactatgtaaataccggaatcgcgacatcaaacatccacagtcgtcgtcagatttttcatgttcttcccatcagggggtcatccacgagaaaggcaaccagctagctccggtgaagaaccctccctccctcccccttcgcatcgacaaaaaggaggcagctagcgagcatcctcccctatccgagatcattgccggagccagaaaggccatatccctggtgcttcctccctcccccatcaccatacccttggcatggagctcggctcgctggatccaccggcctatgattcatgctatcctggaccttgccggtcccaccgcctccgaataaggtaggaacccgttcccggactgcattgcctcggcccgcttgaggatcagacgatgaccatgctcgatgtgtggtgccgcagtccaccatgatccgaacatcgacaccgctaatgtgtcccagagctcgctaatgaggagaataagggaaaaaaagaaggaataagatgaaaaatttgatgacgattgcatggttttaattttgcaaaaatttaaatggcacctaaccgatatcgtgaacagtagtgtcatttttttcaaattggtaaatttggaatggcatgatccaattaacaattttttaatatatgacttttgtacatacatttgattatccatctttttttatttgatttgttattaatattttttttaatcataacatatactttttatgtttgcagaaaaattttgaataagacaaatgatacaaacatttatcaaaatgtccacgacatcatatattgaaaactagaggtattatattataatattagcgtataaattgtgaaataaacgacatgtgtattcagtttttaacgc

SEQ ID NO: 10896 - DNA, 702 bp, Oryza sativa
tgcaagtacttcatcattgttgaagaaagaagagaaatttgtgtggagcccgcaatgcgagaaggcgtttaaactctcaaggaaaagctggtttcctcagccgggtgtttaatctgtgcgcggcatacctcgacaagagactttcatgagtggtattgtgaacgcttctcgccaaggattggggtgatgctcatgcaggacggtcatgtagtagcctatgcctcacgtcagctacgacctcatgaaggcaactaccctacacatgacttggagttagccgcggcggttcatgctctaaaaatctggcggcactatctcattgggaatcgctgtgaaatatataccgaccataggagtttgaaatacatcttcacccagtcggatctgaatcttcggcaaaggagatggttagaactcatcaaagactatgatgtgggaattcactatcatcctggtaaggccaacgtggttgccgacgctctaagtcgaaagagccattgcaacactcttaacgtccgtggcattccacccgaacttagtcaacagatggaagccctgaacctaagcatagttagtcgcggattcttggctgcgttagaagccaagcctaccttgctcgatcaaatccgcgaggcttcagaagaatgatccggacatgcatggactcctcaagaatatgaaacagggtaaagccgctggttt

SEQ ID NO: 10897 - DNA, 2005 bp, Oryza sativa
tatttgaatctgttcgcacatttttttaagctcgatctactgatctacactcttgtataagtaagatttaccttccttaactctgttaccagacgttttatacttatgaactcttaaaccagatgtgctaagcacgtattaccattctataccaattttcatttcatcatatcagtatttgattgatcctttcaagcttcctcgccaagtcaatcgagatcatgactgtgatacgatcaagtaaataaagtagtataaaacgattcatacgacgatttttcaagcgtaaactaacagttaaacacccctataaaacaggcgccccgaagtagccagcacagtacgaggtggccgtcgtcgagcacctcgatcgctcgcgccatggacgcctggcagctgttcgtccccgcgatcgccatcctcatccccttgctccggctcatcctcttccgccgcggcgacgacgggagacgcggccgcctcccgccgggtcctccggccgtgccgttgctcgggagcacggtgtggctgaccaactcgttgtacgacgccgagcccgtcgtcaagcgcctgatgtcgcggcacggccccgtcgtctcccttcgcttcggctcccagctgctcgtcttcgtcgccgaccgccgcctcgcgcacgcggcgctcgtcgagagcggggcctccctggccgatcgccccagccaggccgcctcggccaggctcgtcggcgagggcgataccatgatctcgcgcgcgagctacgggcccgtgtggcgcctcctgcggcgcaacctcgtcgccgatacgctgcacccgtcgcgcgcccacctgttcgcgccggtgcgcgcgcgggtgcgccgcctgctcgtggacaggctgcgggaggagcaccggtgaggcggaagcggcgccactcgccgtcgtagagacgtttcagtacgccatgttctgcctcctggtgctcatgtgcttcggcgagcggctcgacggggacgcggtgcgcgcgatcgccgtcgcgcagcgggacgcgctcctctacctgtcgagcaagatgcccgtcttcgccttcttcccggcggtcaccaagcacctcttccgcgggcgcctccagaaggcgcacgccctccgccggcggcagacggagctgttcgtgccgctgatcaacgcgcggcgggagtacaagaaacggcagggcggcgccaacggcgagccgaagaaggagaccacgttcgagcactcgtacgtcgacaccctcctcgacatcaagctccccgacgacggcaaccgcccgctcaccgacgacgagatggtcaacctctgctccgagttcctcaacgccggcaccgacacgacgtccaccgcgctgcagtggatcatggccgagctggtcaagaacccatccatccagtcaaagctccacgacgagatcatggccaagaccggcggcggcggcggcggcggccagcgcgaggtctccgaggaggacatccacgacatgccgtacctgaaggcggtggggctcgagggcctccggaagcacccaccggggcacatggtgctccctcacagggcggcggaggacatggagatcggcgggtacctcatccccaagggcaccacggtgaacttcatggtggcggagatgggaagggacgagaaagaatgggagaagccaatggagttcatgccggagcggttcctcgccggcggagacggcgagggggtcgacgtcacaggcagcagggagatccggatgatgccgttcggcgttgggcggaggatttgcgccgggctcggcgtcgccatgctacatgtcgagtacttcgtggcgaacatggtgagcgagttcgagtggaaggaggtcgccggcgacgaggtggacttcgccgagaagatcgagttcacaaccgtcatggcgaagccgctgcgcgctcgtctcgtgcccagaagggcctagatcaccatgtatgtatgcgttagggtcaccgtttcagtagcttagctcaat

SEQ ID NO: 10898 - DNA, 2038 bp, Oryza sativa
actcagtactatgggatgtaatatgttaatcttattcttttaataaaactagctgggtggcccgcgcaattgcgcggctagcatccaaataaaatcatatattttttaatatgattttacttaaaatttattaaatagctatctcattgtcttaagactttgaaagaccaaaccttatcatcctcgtgtttctaattatatagtttttaaaagtcacatcagttgctaccccttatgtcatcttcttctttatttgtttgctcgatctaccactatttctatttattcttcttggaacctttaaaaattgaattttatagtttttagagattattgtcacattgggtttcgtttttataatttgtagatgtctcgtccaacgttgtcattatactcctctaccgcccgtccactgtttcttctttttattgtcattgaaattttaaaaatcaaagataattatcatttgggtttatttttactttttagaagtcccgccaaaccgtcagcggctttgccattgtactcctttacaggtcacccgcagcctccgttctttattgtcattgagattttaaaataaaacatgattatcatggtttcttttttactttttggaagttccgaaccttaaaaaattagacttgtagttttattattttataatttttagaagtcccatcaaacgatgccactatgcccctttacagcccgtccgccgcctactctttaatgtcgttgtgattctaaaaatcaaacataactatcgttggaattcattttttattttctagaagtcccgtcaatcgtcggcggctcagcaactatactcttatacaccccgcccgctgcttctcctttttattgtcattaacattttaaaaatcgaatatgattatcaatggggtttattttttatactttctagaagtcccggcaaccgccttacttgtttgcttcacggcctgtctgatgtccctccttttaatcgtcattaggattatatttggtgttttattaataatttttatatgtcgtatcaaccgccaccactctactcctttctaggctgttacttaatttatctcgtcatgtgttgtagatggtcttttctttcaatagtctttatttttatcacaaattttagttatttataaattgtatttctaattgaaatcttatttttctttttctaatttcagaatttattttttttaaaaaaaatagttaataccgtattgtgttcctttaatgtttttatttttattttcaatttcagttgtttgaaaattgtattcctacttaaattctcttttaatttttctaattttggatattattttatttttttaattcgaaattttaattattcttgtattgggttcttatatggattcttctttcaatattgcttattttttattccgaattttatctaattttcaattgtattcctactttaactcttcttttattttcttttgctaactttggatttattttattttaattcgaattttaattaatctcatattgggttcttatatggactcttctctttaatattccttatttttaattccgaatttcaggtatttttaaattatattcctacgtggactctcctttccttttctaattttggattttaatttaattttaatccgaattttaattaatttcgtaatgggttcttaaaaggactcttctctttaaaaatccttaattttaaattcgaatttcagctatttttaaattgtattcctacttggactctcctttccttttctaaatttggaatttattttaaatggaatcccaccttgaactctctttaatttttctaaatttgggtaatattttattttttattctaaattttaattaatctcggaatgggttcttaaaaggattcttcttttaaaaatgcttatttttaaatcctaaatccaccaattttaaattaaaatcccacctggactcctcctttaatttcctttggcaaatttggaattaattttaattttaatccggaatt

SEQ ID NO: 10899 - DNA, 511 bp, Oryza sativa
attcacttttcccacctacctccagtactcatccaatcataatcctccaccattcacttctacctactttcttaataaccgtggccaactctaaaacgtcttatattttgggacggatggagtagtaaaaatctgagtagatacaattcccccataatatttcttacccaacagctgtgactgatacttacaatgaaaccgttcaaaagatgagctccttttaacatttgatgccgaactttggttgcctgcctgatatactcttctgtatataggtaaccataacaatgtacgactgggacacagtgtgcaagtgcaaagttattggatctgtaactgtagccgttctcggtgaagacgaagcaggagctacttggttcgacctggacagtaaatctggtcaggtaaagtgtaaaattgatgaataagtgatattgtctaacttaccactattgctgtacttcaaatattcaatgaacttttaaggatgtatttacaattaacgaaatat

SEQ ID NO: 10900 - DNA, 43094 bp, Oryza sativa
  unsure (1)..(43094): unsure at all n locations
caagcttgacaagagcaagttcgagcaacggctgcagctctgggcgctccgcatccaccgcgagctcgcctacgccgtcacccgactgctccgctcggggtaacttctctctcgctggtcgacgaatccacgatccaatccattcaagaaacggagagcatagccctaggattgtttgatgctattagtaggagcgaggggtagtgctgaaagctgagctgagcttgtcttcccccctgtttctaggtacctactggacaagccgcgggtgaagccagtcgtggaggatcccgagagcgacaagaaccggctcgtcgtgttgtcggagaagatccagaaccccggtatgcttttccctctgctctaaaatttgcaccaaatcgctcgactttgcaaagtagagcttgtcaattggacctcctgtatgtatgtttttcaggctgtgtttgttcttggtagcctgttcttatctggaattgtgaattagaactaagcaaatattgtgagttgctgtaaatatttgaatgccgtcaccaatacttgattgagtctagttagatccatttggttgctcatgtcttgagtaccatagtttaccatgcttgcttagcgccttttgatcgaaagaaaacttctctgttttagtgtttctaatctgtttcgcctctgttgaaagaatgcttacgcctggtttttggaatacagacctgtctgatattgaggagaaggtttacgattcactgaagcaaatttgcaacattgatgttgtaccttacagtttgacccttggttattcttactggagtgcaggtcggtttaccatctaattctctaagatcttatttctgttcttttgttgcagtgtgttacttaggcacattcaatcatgttttctttatgttatttcttgtgcaaagtagtagatggcaaattggtcttccaaatcaaggacttcttttcaaaagttccagttttctagttgtgaatgctactaatattctcttcttcatttgtgtaggaatgtaggattccatattgttaaagctattttgatgtgtagtgctgaatttcatttgttgggttttcatcccttttatttcctgtagatcatattctgaagcagatcttgcctgctggagtggaggtaccctcttcttttgaaacaattgttaagtatactaacttcgacagtgcttcctttctgttgtccctttccattttttggtggaaccttgttactaatagtaatttttatggtacatgcaggccatgttgcacatctgaacatacctgatgacttgcttccatacaaagatgtcatagcaaaggtcatctatgatgtaaggatatcttctcgagtaacttgctcaattcctgattcatcctttctaagtacacttaatatgatcaaagcacatgttcatgaacatgaagcatatctacaatttgtttctgaatgtaaaacagtaaggggctttagcaactctgattatagagagcaaccacaaatttacatttagcatgtggcttcatgcacaaaagaaagattctgcccatgattttactattgtaatgttcctaaatgtctgtcttgattgtcttgttttcatcctgtgagcagagaaccattcaactgtcacatggaaatagctaaaatagaattgcaacccatgatgtgtaagcaggaggcactgtaaaaaaacaatagacacatctagctattcactgtttgttctctaaagcagcaggattattcataactggcaagaatactatgtttgttcccattattcagataaaatatttttacatggttatatgcagaaaaattatccaaggattcagactgtggtaaataaagttgggaccattacaaacgagtttcgagttccgcagtttgaaatcttagcagggaaaaacgatatggtaactgaagtaaaacaatatggcgctacatttaaacttgattatggattagtctactggaattcgaggcttgagcatgaacacatcagattggtttcccttttcaagaaaggagatgttatatgtgacatgtttgctggtattggcccattttcgattccagctgcacagaaaggatgtattgtatatgcaaatgatttaaatccagacagtgttcgttatctaagaacaaatgcacagattaacaaggtggacgattatatatttacatataacatggatgccagagtgttcatgcaaaatttattggaagtgccttgttcagaaaataagtcagactctcaagttgctgctaattgttctagtgaagacattgaccctgctaatgaaagttcgacttcaaatggaaatcatagtggtatttttctttctctcctcctacatattgctttgttgcagattcgttcttcatacacatgatgaagctatccacttcctgaactcatgtagatgttcaagagagctgccataaggatataaatgactcatccatgataagcactgcgacaaaaaggcgtcaagaaagctcaaatggaggtaattacgtcatttattatgtctttaggaatcttgcaactcctatgtctgtcaatctactaagttaataacaactgtgataagcatgaagattttacctattatgttacttgtagtagagttacacttttacctctcctataggtgatgggtactgccaagaagatgctagtcatacaaagaagaggaacaacaaaagagtaaaaggctcaggaccaccacctgtcaagccatgggaacactttgaccatgtcgtaatgaatttacctgcttctgctctgcagtttcttggtaatgtttttgtacttttatcctctccatcaagcttttctgttacattctaatgatcacattatgtgctgggcaatttgttgggttacatgacatgctcacaagccatgttagtagtagaccattgataacatttctatactcaagacagcagtgttgtcctttttgttcttttgctaaaaacactagaactgaatcttcttcacagatacattttgattgctcaatgaagtccaaaacttaaccacagatccttcatctgtttgcaataaatttctgcaatactaaaatgatttagattaaccaatgataggcaattgtaggcactaggcaagtgacagcagggcataagcatatgggatctgtcatgcacaaataattatctttgaattttaaatttgtaacaaaaatgaccatcctatgaaaagccacacaaatagaggtgaaattttcttagaaagcagacattcataaaccatgcagtggcggaatactgttgaagcgggaaggtttcttttcttgtgaattgtgaagaccattccagattcaatggaataagtaactgtggataagtatcatacttggatgcatgtattgcaagttgccaagtttgttcctaggatttctacagtctgcatggaatgctaattttgtggcatttatacgacattttgtggcctaagtacgtgcagtatcaatctctagttcatccatgagaccatgactatatgttcttctcagaccctctgttggttttgaatttgttatatgatggggaatgctatttcaccaatttaggcccacattcttccactgatctgaaacctctttctccaaattttcaaacgaccaatttgaattgcaaaattttgcatgcctgtatttgtttgtcaacatgacattcactttcgccttcaaggtcattgttctgtgtcaaaatacatcattcatttcaatccactggcaattcaagatttgtctgctgatgggggagttctcttttctacataaagtacctttcgtttgtgttttaatttttataaactctgcataacttgccacgtgggcctggctcattcatagccataacatgtgtctgtaagttccaaacatgtagttgcactcttgtatttgtttgatgcatttgattctcatgttactaagtattgaactgttacagtttctctttgagtctttgttctagtccataattgtagatctgctgtgcagattgtttcagtggtcttgtccaaaagaaatactggaccggaccattaccttggatccactgttattgtttcatccgttcaagtgaatctgaagaattgatattatccgtaagtccatacctctttggctgtttctcaacatgagataaatcgcttttatatgctcttatatattttgcgaggcatttccagtttgttttaatggcccatttcccctttcaggaagcacaaaataaattgaatgcgaagatagcagagcccatattccatagggttcgtgatgttgcacctaacaaggtatcctctgtctcatataataagactaagattcatgtttattgtctgcaagattacatgcacaaatttctttattttgttgatcttaggatacagaaatctttttcatttgtttgagagcacaatgtatggcccaccgcccataatattttcctagcagaaactgtctcttggtgaatggtctttaagaactttgtggttagccaccaataatagtttttctagttttcctgcataatctgggaaagtaactaagcaatggatatttttttatgtttgttgctagttcttgtgacacctaatatattgtgttttatatttcttgcaggctatgttctgtttaagttttcagctacctagcgaatgtctcaaggatgaaactgaagatcacatacaatcagttgactgttagcctcttctatacagtactcttgaagttgtattagttttgcctgcagttttggaggttctataaaagaaatggcgatcatccgatgtctcctgccaagatggaacccagttgcatctcatggtgaaggggaatcaatgcgatatttttgtagactttaaggtgctttgcatggttgaaatcaattcggagccctatccgattcagaaatctgctgccgtaggtttgcatatctggttgcagggcttttcatgtctgcgctgcttctggattccaatgccttatcagttttttctagagtgtgggtggagttcatgtaaaacgggaaaggatagtagttcggaaaattatactgtccattatcgttgttctctgtatttttagttccagattaatcctattgtttacatcaatctcatggccgtttgccagtgtatttatgttcagcccattttcccttgtgcttgctaattacctctgttccaaaataagttaatctagcatggaatctgataacttatttgaggcggtatacaggctggtgtttgcctttcagtcttctttctgtactggtaatctctttctgtactggtaatctcggaagattaaacataagagcagagcctggagctcattttcagaaaaacttatatcagattgatcactgatggcatgggacggaagcagagtggctcaaatatgtcacagttgagcaggactaacgttaaacacaaaagctagcatacaagcagaaaacacaaggacatggcaaaacccaagaacacaggaggaggatcttctcctctggaacgaactcctcttcaagattcaaccaagatcagggacgatgaggtaatcctcctcgtcgtcggggagctcgacgcgggccttcttgctctggcggaagccggtgcccgcggtaaaggcggcggcggcggtcctggtcggcggcctgtagtacgccacgtcgttggccgcctgcgaagcgaagagctcggggacctccgccgtcgtccggccggcggcggtgccgcccttgggcgcctggttgtggaacaggtcgatgtcggcgaaccactccagctcctggaacccgagcggcggcgacgactccttctgcagctgcagtataatcacaaggcgtggttgcgccatgagaattgagaaagagggaacccaaagcatggcatggtggtttgatggtttcagtttgtgtaggtgcttgccttgtcgccggtctcgtagtcggagaactggaggagctcgtcgacggcccagccctgcggcaggaactgcggcgagggcgtgtcgacggcgacggtcggggccggctgctgatgatggtgatgatgctcggaggagcccatgggcggggcgtggtggtcggagtcatgggcgtcgctgccgccgtcgcagggcgaggcggaggcgaagccgacgcggatgccggtggcgaggtagcgctggtggttgccggagagcgtgccggggacgtggatgggctcgtcgcagtcgcggcagaagagcgcgcggtcctccacgcagaagatgaacgccgccttctcctggcacacgtcgcagcgcgggagcctcgccgagagcgcctccagcggcagccgctggtgcttcccggccagcttgttcgccgcgtgcacctccacgtcgcacgccgcgcacagcgccgccttgtccgcgcagcacaccaccgccgccgccgcgctctcgcacgcgtcgcactggatcttcatctcctcctcctcctccccaaccaagaacacaactcaagaacaagataagacagccgcaaaggtgtggctgcgcagctgcgtgctgcgcgtcggcaatggaaaacgagcggcagaagaaggggatccagaagcgcggctcggctagtggcgcatataaacccgtggcgcgagggagcacgcaaccgcgcggggcgcgagcaatcaaccaaccaaccaagcgagcgagcagcgcgcgaaacttgtggtggagaagaacttgtggacgcgagcgcgcggcggtggactactactagtctgcgcaagtcgcaactcgcaacggctttttttgccgcgatcgcgcagctgcgaagattttgatctcgatctctgctgactcgactggccgatacaagaagaatggagtagattagtaagattcacgataaaaaataatggaagcttatggctggctgtagctcgtgcagggcgcacaggggtcgcagcctaagcatggccacccattcgcgtgcatgcaaaattaatcaaatcagatcaaatcagattggcaatgtactcggtgttggtgtgcatactttgcatgttgcatcggtttctttaatctaggagtaaaatgcgctctagcgattaaattagttgtgaatttgtgatcgacgtttttgcattgtttttttaatatagggggagtatcatactgtagggattagattagtacgtgatcgatatttctatttcgggtggctatgacttactgaggaactagtagtggaaaattccttcaacttgaaccgagtgcatgatgcaactgtagttggtggtggactggtctgtgactctgtggtaagtacgtttaggaggattgcagttggggcgataaaccaagctggggtgatttaggttggtgctgggtcattattgcaaggattatcggtcagattggcggtgtccctgtcgtgataaatgatcaagtttctggcttttttaagcctccgctgaaaaaattatgaggttgtttctttttcgtcttgttatttttgtgtaagcgtatagtatatcagtttgtcagctattctgcattctttgccgacatgggatactgttagtgatctgttcctcaaaccacagttgctattgttaggttgtggacacgatccttctaatctccaacgctgtagtattactgtatgcaactcaacgctgtagtattactgcatgcaactgtacatgtacactagtacaaattcccagtggaccattgcttggctagctatcacgcatctgttctctaagcagcaacttgttaagatataaagcacgctcgtgaccacgaaaaaagccccctcttttcctgccaaaaagcccctctaatcacatcatcaagacatcaaccctgccggccgccaagttgctttcagtaagtttcagcgtttgtggctgtggatgatcgagttccttcggggagggagagatcgagatcgaataataatcccttacaactccttatccctttaattaacaacgtcaatatgttgaaccggttgtagtcctttcgttctaaaatataagaacttaaaatcggataagacattttctattactaccaacttggatacttggatagatagactatcaagattcatagtactagaaaattttccattcaatcttaggtcattatagtttggagatagcagcgtacggctccagctacgcccaccgccgtttggcctattctatttggaaattgctacatacgattggtgtgtacgacttgcatccgaccagtacttacccgctccttgctctagcccatatggagagtagctggctcgtactccctccgtcccaaaaaaagacaaactccagtttccgtgtccaatgtttgactgtccgtcttatttgaaaaaattatgaaaaaaattaaaaaaataagtcacgcataaagtattaatcatgttttatcatctaacaacaatgaaaatactaattataaaaaaaattcatataagacggacagtcaaacattggcacgagaatccacggtttgcttttttttgggacggagggaatatgaagtaaattgattgcagatacgacagggtcggataggggttgaataatagggtcggatgtatagcagtactcattctattttgcaaatttctgcatgtgatgtgaggcaggcagctcaacttggcagacgaccgtggtgaaaaatccgaccagtgtttagacttgtgtcactgtacagttggcttggattattgcaatgcaaagcctcgtcttttcaagtataaatcagcccggccatcacggcatcaatcacccagctagcgccaataggattagtttcggaaaaaaagaacccagcacagcaccaatcattcagagatcatatcattaaataagaagaggaaaaaaaagatcgagagccaacgccagccacacgtacactgcctggtagtagtacagtgcatgcaccaagctgacacagctcgctgctgtggcaggcgcagcaacagggagtagcgctagtggcaatggcaaaggccgaaacgggccggggagacgacacggtcacgagctccgcattcaatttgccgacgacgacgacgcgcgacgacgtacgagacgcgaccgctgagccgccgtgcgccactagctcgcccgatcccctctccctctcctgtctcgccgcctcctcgtcgccgccgccgccgggtttgcctcttgggcgctgggcctgatcacgagcaggcgcaggtgcatgcacgcctcctgtcgcgtcgcgagtctcgaggccgcgatccgcctgaaccggcaggtcaggcaggcggctccgctcgctcgctcgtggccgtggacgcacggcgagtccgctttcgctgcgtttgcagcgcattcatgtgcagaggtcgacatgggtttaggctgggacgaagagacaatgtcgacatggcttgtggcttgggtttttttttggctgtttggataatacgggggccatggaaaaagtgctggggcattttgctgttgtgtgtactgtgcagcgtgaattggatggcttgttaaatttttgacgtggaatgcggagtctcttttcttcttcggtcgggacggggcctttcatcgatcgttcacttttctatgttcctagacggggttgcaattgcatgtcaatgtttcgcacggctgataaatttgtggatgacaaatttagcgcaggtcagctgagccatcaggtggagtaggcatgtagcctagctagcgggagtaatcgtccaagaaaacgtacgtgagagatgagcgagagtaccacattcactttccaagatcgtttatctagtgtacgtgtcatattgagacacggttcaaaagcaagagcacacgtaagctatctatctggagtactgtaagctatggtcaaactatcataaccccgaatgtttcattaagtgatcgaaggatattagagatcgacattcatatttggtttgagtattatcttgccattgtccaagtatgtggactgtggtaaaccatccgaaaagtaccagttataaccaagtgtgttacaggtagtatgcacttatgcaaaattaggcaaaaaataggttaggtgagatttaagttctcattggttgctcatattctctaataagtcaacatgactaattagggaataaaaattaatttacaggtaaaacttttatatatgtgttattatcacttaaaagtcaatgtaaaaaaatacgttgaaaatatcttaaaatccacttcaaaattaaatttaaaaattcaaactttgatatatttttttggcttattagggtaaccaatggggctcaaggaggtataataattttaaggataaatttaagatctaattgttcgaacgctaactttaccacaagttaatttgtcaaaagtgtggcaacaaattattcataggtgtagcaaaatttagctacaaaatcctatctttctataaagttagcctactacatcctaaggctcaatatgtaaagatgcaacatcatccactaacatttactacatctcaaatctcatgcaagcatgctaatttattaatttttagagctttaaaatgcaagcatgtgaattaaattatcatcccacataattcacataatattttaatatatctctccatcaccttttataatatcctatatgcctatagttcatcctcacttaaattttatagctttaaaaaatccaagcatgttaaatcatcattccacataattctcaaaatatttcaatatatctctccatcattttgtataatatctatatacctatacaatttattcttatttagttaatgttatttctctcttctctcattaagccatatcacctcaattgcttctatccctcaaatgattaatctatggttggaattatctctcacattttcttctcttataaagccacatcatattacttttaaatttgggtcatcattctatatactgtttaaattatgataaactacatcaacttatgcaagtttctatcatctagctatcttacacattatttctattttttattagggaaaattggaaccatgccattatcatatcaatctcccacagctacgcgcggggtttcacctagttagcatataatatgtgagccaacaattaactgaattgtggctagtgtttgttaggcaagttcaaccaaacgctagcataacaaagggtagcgcacgtaacatgtggcgtggcaaaccgtgacagtgaaccgaatctcatttgaatgggatgattcttaatggagtttctcagaaattacaaagatttaaatgaaaatcatgtataaaattttatgccatacaaataagtagatgttaaagtttgaagcaccacattaacgctgagttcgataaaactttttggctagcctaatcaccaatgttctaaatctccggctaagcctcttaacggttgtgctctccaacagctaagagcggctatagcgggttatagctacaactaaggtatttagcagttttaaaaaatattaggggaaaaataaaaaaacttatagaatttgggctaaaatttgacatgtgactcactatttgattgcacatgttgctgctcgaggtgccgtaggagccgccaccgtcgccgcttgggggctggaccgtagaagccactgcagccacttgggggcaggaccactggagctgccgccatcaccacttggggcaagactacgttggagttgccgccatcaccacttggggcaagactacgttggagcagctgccgccgccgccgcttgggggcaagagagtaggagccgccgctgccaccgccagtcaccactgctgggggtaggagccaccatcaccgggagagcacaattctggagttgagactaaagaggagcctcgcacgagtagggggactagggagtgtgggggatttagggtttggttttgagctgaatttcgtggaccacgatgccaaaagcccattttcgcgggccatcgctaaatgctgtatctattttctgttagtttagcggctatctccggctaagcacaactattagcgcccaataaatcttagtgtcaaaactgaagtctcctagctgtcccctccctatccgctatctccggctatagtggcagtatagccagacatttagaacattgctaatcacccatacaaagcgagatggataattaagtattaactgttataaatttaataaatagattatttgatttttgtaaaaatatatatatatatacttcctccgtctcataatatagcaacttaaaactgaatgggtacaaatttgttgtactataaaatgtcctacattgttatattatgggacgaagggacgaagagagtatcatatttagcagtttggaaaacggtgtgagaaaacgagagtccgaatacttcagccgtcgcacgggcgcttgcgattgggctgcgcttcgatcttcgcggcccaatcacacagaaagcacaaagatgattgggccgttggaccgatgcgtgattgccatttcagcccgcacttcccaagggctccaagcccataacgcctgtctcacaaaacgagtagggccccacatgtcagtggccgtgagggagcacaacccgcatccggtaaaacccacccgtccccaacctctccgtccaatcccccaccgcgccgccgcatccgcctccgccgacgccggcgccgcccgtggtcttcctcccgcccgccgcgcgccgggagatcgatcgtcgcagctcaccggatatggcgtctcagccgcccgccctcgatatcctaggtactctttgcccccttcccacccttcgttttgcgccccccacgatctcttccgcgaggttggctacttagtacttacctagtctaccacccgtttgacgaattgctcgacccggggcaaccgcagtgcgcgagccggatggattcagcgtgtggtcgggcccgccttacccgacgggctccgccccgccggtgaggctcccgaagacggcgtgcagcgccacctacttctcgagcgacgggtcccgcctcctcgccacggtggcctcggcctcggccacggtctacgactgccggacgctctccgtcgtcaggtcgttcgagctcccgggcctcctcgccgccgcgctgtcgcccgcggggacgttcctgcagaccttccagaagtcgtcctcgccgcaggagaagaatgtcaccgtttggcatgtcgacaccgccaccgcgctctaccagcactaccagaagaatatgtctaaggccacgtggttcgttttactgcaactttgcttcttagaattatgattcttgaactcccatgcttaatattacaatctgatttgagagcttttagtatgtgcatgttttctggttgtgtcataaaatttttccgcatattatgcttgtagaactttgtaagaaggagcgtatattttctttagttgcttacattctagtgcatttgttgttgcaatcattttgtctatagtaatagcagtttgaaattataattgtaaatgaaccttgtcaatgctcatatgctactgcaagtttgtttctctttttatgcttctaatacaaaacttctgaagaaaataattctagtaagaaatttatcctatgcacacgatgctttgactggatactggttaaatttgttgatcctgaatttgtgagtgcagtattacttgtattataattctaaatggattaggtgaaaaatatgacctacagcagcctgagagaacttgtattcatgaatttgaccaaatctcgattgccaaatggtttgctgtgtttaaatttgatggaacatgtcatgttgattcacaggccaatggttcaattttctgcggatgagtcagttgcttgccgcatgatgactaatgagatacaattctttgatccaaaagatttcacaaaaggttttgtgtacaagctaagaatgcctggtatagctgctatgcagctagcaagtgcaccgggatctcatgttgctggatttgttcctgaggcaaaggtctgatttatcacaaccactttgatcatgctttcacaagacacaagtctcacaagctgattgtttttttatttccttttttctctttaagtagggtgttccagctagtgttcagatcttttcttgtgacaaggatgcacagggccaagctgttgcgcgtaggagtttttttcgctgttctactgttcaatttcactggaataaggggtccactgggcttctagttgttgctcaagctgatgtggataaaactaaccagagttactatggtgaaaccaagttgaactatttaacaactgatagggcctttgaaggaattgttcctctcagtaagtactaaattcatagatattgatgactgtttctctaatatctgatcattaagcccatcgttaactggcagaaaaggatggtccggtgcatgatgtgcagtggtcttactcaggttcagaatttgctgtggtctatggatgtatccttgcagtctcagtttttacatgcaatgcggtaattcaagtttaatatctcaaatactttgtgctccctttgtctccttggagtgttccttgacagaatctcagttatgccggccagagcaacaatattcaacaaaaaatgcaaccctcttctggagctcggtgaaggcccctacaatacaataagatggaacccaaaagggcgatgtatccttagcaataatttgatccagtagcctttgctgtgtggtctgctttgaagggaacacactctttataaaagttggtctgttactgttcaagtatagccatataaattttacaggtcagtcatgatttgcctggtgatatccttgacctcattttatcgaccagttatcgttttagcagggtttggtaatttgcctggtgacatggtatgttactacacgactaccatatttatatgagccttttacctttatatgggaaataccaccgttttcttgatatactcttttaggagacaatcttaaacaaactagaaaagctaaaaaaatgatttaatgttgctaggcgatttgcaaaatagccacagtgtaactgacagagtattttctgcctaggcattctgggattattcagaaaagaaattggtaggaaaaacaaaggctgaatgttctgttacgagtgaatggtcccctgatggtcgccattttatgactgctacaacagctccgagactccaaatagacaacgggtacattttttgcagcctttggagtattaatgaaaatgggtagcatcattgtgatctttatctttcctattacaggattaaaatatttgaccacaatggatctctgcagttcaagaagatgtttgaaaagctgtatcaggtatcaccgggcacctgttcacctcagtgtgaccagtttgttgtagacgtgcatgctatgttggttctgcatgctaactcctaagtcctaaacaatttgtaacgagttgataaaatatttccataatcacacacactccatccttgatttttctttttttttgaattacacaggctgactggaagccagaagcgcctgaaaaatttagtgacattgccgacctcacgatatcgttgggtagcataaaaattgaagaaacgaaaaaacaaggttctttacactttcttatattccatgttagtaagttctggtcaattgatttacatacttcattttctgtatagtttcagcacagggttctaaatcagcacaaccatcaagcaaggcccctgcaaatatagcagcgaaacctacagcatatcgaccacctcattcaaagaattctgcagatgttcaggataaggtatatattagagatcaattagtaagccgtgttagagttgcaacaaaaagaagtgtgcataaatcttgtttactatttgttgcatcgttgtgctgagtaaatccttggttatgctggctcaattgctgacttatagtttatacacatccaaggctgcaaaatccctatccaagcaaactgctgtggttttgtgcagaaacaagtagtattgtttgttggtcgcactcggccaaatatatttggctcctttttttccccgatgttttattggctctatttcaagttgttaaagaactcaaatttttgatattgtctattggcttaacacatttgtttggtgaattgcagctttttggtgggcttgcttctacggggttagtttcttgatcgataaattagttttcttgtcttgttttatgtaattatttttacctctatgcatgatcactaacattgcaactgggacagaggagagatgagcaaaaatgcactgagaaataagaagcgcagagagaaacagaaggagaagaaggctgctgaaggatccggagcctctgctgatgacaattaaatccacttctactcagtgaaatggtgtctcaatccagaaaaatggcattttgccatttgaaatgtaatcacgcgaatatgctgtcaaagtaacactgcctgggaaactgtccttgattccgcgcgattaatgcaccctgcttcttagatctgttgtttcttgatacaagaacggctcgaaattttgatagtttttgaagtttgaactgatggtttgtatgacaaaaccaaaagatactatcaaagctactcctttcatttcgttagtaactgatgattaatagaacttcactgacgatgtgaaaattggagaacagagaaatacgcatggtatcatgtgaaaattgatcaaggaatctttttcacgtggaatgatagtgaacttatttcggatgtacacgtctatggttagattcatatataaaagtgagcttattttagaatggggggatatcttattttgatgcctagtatagtcgacacgcgacaagaatgtataattcgtgttgagagaataagcactgtggtccgtactactcgttttacattgaagattatacatttggagccacgttgtcaagggtgacccattacattccaacgctaaggaaaccaaaccaaaatgcacaggaaccaagctacaccgcttgaacttcaacataatctacaatttgacgcatatgacatgagacatcaggtgattatatatgcgatgtcatcaacttcaaaacgggcatcatggttctgactaagattgtgcttaacagaactgttaaaattctgcttaacgatcaacggagaagcgatcactgccccgggcaaggaacgctatccagattccaggtcattgcaccagccatgaaaacagtactgctcatcgccacatccatgtgcttcagaaggccaaaaaggaacaagggagcacctgaactaagactcctgcgcatgcgggcgccaatttcctcggcagagttcctccataagatgaacaaacttttgaggctgttgccaccaagttggtttggaggtggctgctctttcatactggtcttcttgtgagccttcactttgcataaagctctctgagaaattgcgccatttttgcatggcacgtttcaaccgcgcagtacgcttgccagtaacaagatatctggtgtagtccctggcgaggcgatacagctcctcacctctgattatatggatgtactgcaatattacacaaatacaaattagtttcttaatatatatttagtgcctgttgtttattttgaagctacattacaccgactttttctgtgactacaccgagacttttatggaatacccagataatattgctcttaacagtgaaatggtgctctcagtctccagtttctatgcagtttcaatgcatgtagcaagtcttttagtgcattgaccatggagctatctacaggtaagttgtttcgacattacagtatgtcgttaatagttaagctaatcataataagatacttggaaagcaggactatgctacaaattggggtaaaagtgaaagtgtcagaagaaataacattcggaaagagagtacaaacaagaatgtaacgttagttaccacaagaatgaatgcaacggttgctaagataacttggactagttcatccaatgattccttgaatgattcatcttctgggccaccagaatcaccactgcctccacgacgatttcggtttcctccacctccaccagatccttgttctctcagcttagctatctgttctttcagcaagtcttgaataggccgtggctttttggcatcatccatggccttcttcaaagattccataaagggctgcaacaaggcaatatacatgcattgttaagcagataattctgcaaagcaagtgcaatgctaacagaaattaaatctatgtaaaaattgtaaatgcatgtttctagcaaaaaaaaagtgtagtgcaataaactggaaatgcataaccatctctccatataaacttatgtattttgtttcagtatgctagagtactgtttcaatatgaatagcaaactaggacgtctcaaataaataagatgggccaacagatgctcagatccagtaatgaagtactccctccgtcccatcccctcctaggttgaggttttttggaacggagggagtaagtaattgtcacattcagaaaaagattatgctcacgtaaatatgagccacaactacattgacttcacttaaggtcttacaagatgacaagagattgagagtttaaccaatacaggtatcaagagatataaaatagaaggaaacaacagtttgataggcagaagtttgttttgggagaagatggagcacatatgaaaaaaaaagaaaaagaaaaggggttgagcaaattgatactacaaaaattgcaattatcaaatcagaccatatgttccatgctccatcatacattcatgcacaaaaaggacatgccagagacttacatcattttctgcctctgggttcacctttccactcgaggcacatagaggaggaagctttttctggctagcagcaacaagaacaagtcgcgggtacacctgcttttgaagcttgggaaatcgaacagaatgtgtcgttagggaatattgaggatgagatagtaatctgcctgtcctcccaagaccagcgacgggcctatccacaataagcccactgttcggcttgcaagtgaagtagctcatgcttttctatttcttgaatagttagatgcaccagatcctagcctgcaaatttttcaggcagcataagaacttctcatgaattacagagaagtgctaatctatcggaagatacagaaactaacatagttcaatcgtgtcgagtggaaacatagtgaattttataatagaaaaaagggaatgctgggctccccaactccctctataaagcattaagcgatgaatatctacttatatataccaaatattgcaatgtagactttctaaaaaaacagatgaatttgaacccttctgtctaatcatacacatccccttccatataatgaggtaaggagattgtccagtgtgacatttgcaagcaagtcataaatactaactaacctgtgtacccaaccatccaatatggaaatcacataaaataagtgacgtcttattgaaaataagactgttataggagtaaatagaactctacaatagaaatgttgtcatgagaaaaactctggttactggacatgaggacacaaaactacaatactaatcacataatcccatcaactcattggtgccaaaactatgccacaaatcacaagcagaatgccagaccacatgcattcaacatgttggaatggacggcacaatgcacctgtctttcttgctatttcacacagagggacaccggacacggaaaatcacacctttttttcccaagcaagtccaactcaagaaccaaacttaagctgagggggtaaaccacagcgcaaggcaagcatctacctccaccaagaaagcaccgccaaataacgaattgaattggtgcaggttacctcgaacaccaacggtgatggatacgtattccgtaaggtggttcatggcggtggacggcaggcggcgaggcgggggtgcggggttggtggttggacgggcgaggcggggtttccaagaaggcgggtgacgaggagaagacgaatcggaataccaaactagcttctcctctcgctatccccacaattccaaaactatccccacaattccaaaacgagcgaacgcatcctacccacaaagaggcacaaaccaggaaccttcccggcggcggcgacgacgaccaccgtccggagttaggaatcgggctgggcagtgtgggggtgggcgaggagaggagtttccggtatgtaaagggattccggggcagcacgccggaccgcctccgccgccggcgcggcggagctggctgggggccggcaaggatcgtggcgcgcggagaagaaacacgacgcggagattgaccggcgaggaggaggaggaggaataatacgaggagggtaacagggattaccggagaggacgaccgcgtcggcgccggcggcggccgggcggtggtggtcgtcggggttcgatgtgcgcgtcgaaccggggaggggggaggagaaaggaggacggaagggataagaatcgagatgcattgtatttttagatgggtcgcacccgttaggaaaccggtgagccttcaccttgggccccactttttacagcccgtgggccgtggcgcgtcttctccaacgtgacaaaggaccatgggctttaataacgggccgtcttttatgggccacctattccaattgccaaagatggcctaaatgcaaacagatgaacaatgaaaatgagatggagcgatggatgtaccagggttccaaaaacgaataccacgcccgagtggtcgttaacgatgaaaactggtaagatttggatgcattttgccggaaatttgaatttcagtttaaactctttcgaaacctgtgagtttacaaggtggtttctggatttaccatggcatttttaaacccgatggagaccctgtgcgaactgacagtaatagggctggaaccggacatagcaatggcaacacgcgtctcatgaaaccagaagagcaagagcaatcgatggctttgcaatttttcttttcctctgcacatggtgctctcgtctcatcgagacaaggggagaatttcgtcgccgtgatcaacttgcatgaattttcgctgacaaaaaaaatgccgtgagcgtacaaaaatccccctcctattttcgccctgcacggaacgggttgccctctcccgcgcgcgcgcggctcttccgccgcgccgcgcgctgcaacggagctcacctcatgtgcgcgtccgatcctcgcatcgcgtacgcacgcacggcacacatgaagtcggcaaagttcaacgtcgatggctacgtcgcgcgcagcaaacacctgcgacgacgtttctacttctagatgcccatatccactagttcgtcctgcctacgaaatatatccagtaggagtgaaccaacggcacgcacatgagcaatttagtccacacaagtggacgcggttcggttcggccaccatccaaccggaacgtgcagatgccggcgtacgtacgtggacgtcaacgcatttgaaccggtcctcgtttgaacaatctcgcgcccaaagtcagaccatgcatttgccggtcgttatcgattgtcctcaactcctcatccatgcatcgcctgtcagctctataaagccacacgagccaccggaagcttgacatcacaattaaagtcacagcatagtaaccaaccgaaccaatcatcagccatggcgcgaaggctctcgctgctggccgtcgtgctggcgatggtggcggccgtgtcggcgagcacggcggcggcgcaaagctgcgggtgcgcgtcggaccagtgctgcagcaagtgggggttctgcggcaccggcagcgactactgcggcacggggtgccaggcgggcccctgcgacgtgccggccaccaacgacgtgtccgtggcgagcatcgtcacgccggagttcttcgcggcgctcgtcgcccaggccgacgacggctgcgccgccaagggcttctacacccgcgacgccttcctcaccgccgccggtggctacccttccttcggccgcaccggctccgtcgacgactccaagcgcgagatcgccgccttcttcgcccacgccaaccacgagaccataagtaagcagaaacaccaaaaaaaaaacatacagtataatactaccagtagagaccacggtatacctaacatgacgataacgttgttgcagagttctgctacatcgaggagatcgacggaccgagcaagaactactgcgacgagacgagcacgcagtggccgtgcatggcggggaaggggtactacgggcgcgggccgctgcagatctcgtggaacttcaactacgggccggcggggcagagcatcgggttcgacgggctgggcgacccggacgcggtggcgaggagccccgtgctggcgttccagacggcgctctggtactggaccaacaacgtgcacgacgccttcgtctccggccaggggttcggcgccaccatccgcgccatcaacggcgcgctcgagtgcgacggcaagaaccccaccgccgtcagcaaccgcgtcgcctactaccagcagttctgccagcagttcggcgtcgaccccggcagcaacctcacctgctaattacagggattgacatatgctatgtatgtgattttgtacgaataataattgtcataagtaatcaaataaaatcgtattgcattacgtcaacgttgtttgcggcataggagtatatatatttccgtggacagattttctttgtcgtctcagtcaaattttgtggctcctgaatattttcacgtgacttgtttgtttgtttgttgtgtttttggatatttctccgccatgcaagatcttttcgttggggaagctgtcttaatctgtttgaaccgagtcaccgagagtgtgcagcaagtatacgatggaaagtaagtatgactagtaagaagcttaagtcgtgtacaataaatacttgagatacttttgtgtcatatatatgtttaactatttacgatggccatcacccatatttgcaatttttgagagtattctagtatgttaataagctcaatatatagtatgttaactatgcacgaactgcatcgcaagaataaaagtggagtaatttttaagattaactttaaaaaagcttatgataaggttaaatggccttttgttcaacagacttaactttaaaaaagcttatgataaggttaaatggccttttgttcaacagactttgaggatgaaaggtttactcctaaatggtgtcagtggatagcttcttttatacaggggggtcatgtgggtattaaagttaatgatcaaattggtaataactttcaaactttaaaaggtcttaggcaaggggatcctttatctccaattctctttaatttagtagttgatatgcttgcattgctaattaagagagctaaagatgctagttttataaatggggtgattccttatttagtggatgatggtttatctattttgcaatatacggatgatactatcatttttctggagcatgatttacagcaagcaaagaatctgaaactgattttatctgtgtttgaaaagctatctggcttgaaaataaattttcacaaaagtgaattattttgttttggtcaagcaaagaattattatgatcaatactctagtatctttggttgtaagctgggtgcttttcctgtaaaatatcttggtattcctatacattttagaaagcttagtaacaaagactggaaagttattgaagaaagaattgagaaaaaacttagtagttaaaaaagtaagcatatgtctgttaggggtagattagtgttaattaattatgtactttcaagtttagctatgtttatgatttctttttttaggttcccaaaggggttcttcagaaaatagattattataaattacgcttcttttgacaaggggatgatcataagaaaaagtacagacttactagatgggatattatttgccaacccaaagatcaaggcggcttgggggttcataacctggaaattcaaaacaaatgcttgttgagtaaatggttatttaagttaataaatgaagaaggggtttggcaagacttgttgaagagaaaatatctttataataagtctataacccaagttgttaggaaagaaggtgattcccatttttgatccggtctaatgaaagttaaggatactttcttgaatatgagtttttggattcatgaataatagggaacaaataagattttgggaagataaatggttaggtaacttgccttttaaagataagtatccttccttgtataccattatccaaaggaaatgttcttcaattgctagtgttatgagttctgttcctcttaatgtgtcttttaggagagcattagtgggtcagaatcttgtttcttggcatgatttgtgtgcttctattgttcatatccaattgaatcactcatctaattgttttaaatagaactttaatcagaatggtatgttcacggtaaggtcaatgtatcttgctttaattaataatagctatattgagagaaacaagataatttggaagctcaagatgccgcttaaaattaagatctttatgtggtatttgcttaaaggtgtcgtgttaactaaagacaatctagcaagacggaattggaatggtagtttgagatgttgtttctgcatgaaaaatgaatctatccaacatctttttatagattgtcattatgcaaagtttttatggagagcagtccaattctcttttctttataccttcctagtagtataacccacattttttatggttggcttttggggtagacaagaaaaggagtaagcttgtacttgtaggagcttctgcaatatgttgggctctgtggttgagcaggaatgatttggtttttgataaatcaccatccatttcttataggcaggtaattttcagggcaacatattggctctgatactgggcgcaactacaaaagtttgaagaagacagagagtttataaaatttacatgttgcaagcttgagacgacaattatgcaactttttgtcaattatagttggagattcacaaatagacttcaataatgtgttctccttattttagtttcgttacttattttgttcatggggtgttctcaatgatttgttgaactacactcttgtttgagtgctaatatgcaataattggctgtagttctcttgagcaaagaccgggatgttatattccattatctaaagaaaaattcgtatatcattcctacaattataaggctataatctacaatttctctatatgtattttgttagttgtggggtgtttggttgcatccacgaagcctgactcacattaggccatataaaatagtcatgcactagcccgcgagctaggacgagacgatgcaaaagtgtcctcccagctacgctgagcataaaggtaggagtcgagtattagagtgcgcagcccggcccacatattatgggccacccatgtcacattgggtctactccaccacaggtctatcggagtcacaactttaggtcttaggcttacacaacacaaagtctttcgggttgtgtaggcccatgacctaaagttgtgactccggttagacctgtggtggagcaggtccaatatgacatcggtggcccacaatagatgggctaggcaacgcactctaacatcgagcttcacaactcatcttgccccgcttgatgcagcgcgctacatccgcgcgtgcatcaggtgcatgagacgctcgatgagatcaccaccccgccctttcccccttcctcgtccctggacagagagcgaagccagaggtgatggcttggcgatgagctcgacggaaggaacgatgatgggcacggcagagggcacctttctatccatggccgtctcgcaccttcttccgccgccatccccaacatgacggtgatttagttatacagtgaaaaccataccatgctagttttaccttttctacaataggaatggacaatttttcagtgatatatattcgatgttgtagtattgtaaaagctgatgtgtttccttaccattgtattaagatatgtcacattcacttaaaatctcttatattttgggacggagggagtaattcactatcatgttcaatcgagctagaactagagttattatcagaggaaagaatttgtaaaaaaaaaaaaaaaattggcccaataactcgagcccagaaaattcagcgcattcaaatgggccatggaagagggaatgtcgaaatggcccaactcgaattcagaatagagcgccggtcgctgctcgaaatgaacactgagccaaggctattttatttgaacttgcgttcaccggccggttaactttgctttcctactgttaatttgtgctattatggcagcttatctacatgcatgtctaatgtcaactttgaaagtgcaacaagcatttcgtgagcaggaatctcctgctcctcaacatacggccccaaccaaacaacaaccccaagttatctgctagttgtcggttgtcgcgttaacttcggctagcttttgccggtgaattcctgccaagaagaaataggtgccaaatttaaaggtcgaccctatatagcaatagcataaagttactactactaaaacgtgttaataagtttttcttttttctaaaaaaaaatacgtacttcctccgtttcacaatgtaattcattctagtatttttcacattaatattgatactaatgaatctagatagatatatatgtctagattcattggcatcaatataaatgtgtgaaatgctaaaatgacttacattataaaacggaggaagtactatatatatgtcgagtgaaacgaaatataatgcatgttaaaaacagaacaaagatggatctggcatcacaattactccaataggcaaggtaaccttaagcttctcacattgttccagcagaaaaaagcagctggatcactacaaaaaggaagagaagcaattgaaaccgaagaaaaaaaaagaaaaaaaaaaggaaaaacgacagaacccgatcaggacgacaggacagcttcttccaaatgcacgaaaccatggggaaaaaacctcttcgtgcaaagggagctctcttatcttcgccccttgcacgtacatacatacgcatgcacgcacgtctcatctccagcttaattagctagtgaccggggcctttctggctcggcccggccgggagctgcgccgtccacgccatgaccgtcgtcgtcgacctcgccggcgacctctcacgcagcgtggcgtacgccgccgcgtcctggctctggactaacgccggcgccgcccggcggccaccgtcgtcagctgctggccgcagctgcctcgcggcgtcgacggtggcggcgcactgcagcgccgccacggcgaacagcaagcagaggaagacgaagacggacgccgacgtcgtcgtcgtccgtgctgccgccgactccatagctctgcatgcaccaaagcaatgcaactaattaactgttccggctactatagcgccgaacgctactttggccttgcagttacacacaaggtcacactgtcactatcacagatatatgaactactccggtattgattttgtttgattgcggagtggagtagaccattaatttagatctgttataaaaactcgagtgttttgtcggcatacaacggttctgtgatccgtgagttcgcccgtattaattgtagcgcgaaaacaaaaccgggggaggatgccaactcccctcatcttttcacgagagcaaagtctgaggcacatgcatggcgatcgagtacatgaaaccaaggctacagatttcgtgcctattaaaatgcacactgccgtttcaaccaaactaaacgagctagagtagtagctacagcgagtgtgtctgggttgtctgcgtgtccagttgcagggctcgctgtagattcggagcacatatagtagctgcagtacggttggacactgtagaggtcgtcggcggcgacggcgccgggatcgaaggaaatcacgcgaccgcgcggtcgtcgtcgtcgttgcacctagctgcatatgcttgcactgtttgcacagtacgtacgtacacttgcagcgcagtagttgcatccgcgcggcgccacggagttggccgagcgcgaacacgggcaagctaggcggcgtagtgtacgagcggttcgtcgtcgtcgcggctcggaggacgggggattttgttagtttacggcgcccgacgacgggactagctaggggcctagggaggtgtggcttttctccggccggagcagagcacgaggaggacgcagattacgcatttcgtgccgcgatacaataccggaattaactaacccgtacacgcgcatggcgcatatgggccattttcacgtgggggcccggtttgccgttgaccaccttgcgcccgtgcacatggccccgcataggtggtggtctattagtttgattgttttttaggttctcaaaacgccgcatgagctagcaccgtattattttatacgcctgtactctgctcgtcgttactgttaacgggtttcgttttggaacacgaacagtcaaactaaaagaaagacaaacaaatgagtcttcaagaattgaaaaataaattaaaaacggagtttggaccatggatggatgacaatgtcgaggatggccaaattaatagatctgccatctactatctccggtttcattttaatgacgctttggacaatgacatactctacaagatatacctttgaccttatttttctattataatatatacaataaataaatgcatgtttatttttattatagtgttttgaaagaaaaatctatatatgtttttctagtttctttaaactaaatatattcaaagttaatgatggtcaaagttataaaagtttaatctcaaccttgttcaaaacattaattaatatagcaccagaggtcataaaaattagtgcggtccattttcttgaaaaatgcagggcctcttaaatacggttgatcagctgtttagaaatataatatcgtatgataccgtctttgcatttaaaatatgtaacatatagaagtaggaaattactatgcatatgacccaaccatataacttacgtatgattaaatttgatcaacggtttcctttagttaatctatggctgcatgttagagtcgtacgtctagcagaagtaatagcgaagcttcagacgcttatgacaaactaggactgattaagttacggctaagtcgtagaaatacgaacaagaaaaaaaatagtttatgataaaaaaatatcttacggtgttattattagagcaggtataataataggcttttagccagctataaacatattttaatgagataaacgataagagagaagagcagcaggctacagatttgtaaccagctgtagcacagactccaatacacaatatgtgtatgacaggtgataccatatgttaatattatagtaaacaactattgtatgaattgactattagattggctatagataaattggagctagtagtggactatattattaaacttgctcttagcgacttagaaaacaaaatatgataaaaagaaaactgctcaacgctaatctttaaaagttaaaatttggctaggacgggcctgccgacgagagttgaaaacgaaagcgtaagagtaagaccaggattatatatccaagtggaaacgttcggcaagttaacggtgagctccgtttccgcgtccggctggcggtgcgagggcagccgagaagagaaggtacggtcacagggccactcacgcacatggctgatcatctccactcacatccctctttgtgatggtacgccgcatgccaacttgccaagctgctcaagcagtccaactttgacctgcagccatccgcaccgatctgcctcagatttgcaacgcgtgcagtataagttcattttaggtccagccactgagtctgaaattcatctctggaccaaaataataacatatataacacatcttttaactttaaaaccaatataaacttgatcccaaaatagcttggatgacggttttcgactgacgtggtgtttatgtggtacacttgtacttacaatcataagaaatggtgagacccacatatcaataggggtgtaagtggctaacccgcgaaacctatttataggttaaaataagccgcgaactcgcttattttgacctataagtgggtttacggctgacccacttacacccctacatatcaatgagtatccggttaaaataaaataaaaaatttacaatggaacttaccgtcaaattaaaggatctaaagtgaacttattcctaatgcgtggccacgcgtgttgggccagtcggattattcccacccccacattaacacataacatacaccccttacacagttacacttgtcattttgcagttgcattgacaaaatcaagcggataatgagctaacaagcattgcgagaacgatatgcgggcatattatagggtgaccaaagcctgtccgtccgtattctaacttgtgaagttgtgattctgtgactatatacagtttacagcatgcagttataaagcgtgtgttcttggccgtgaaccttctgatcatgttagacgctgaactgctgctgctgctgctgctgctatcagcattctggcaaacctgtcagcatgattgcagacgctcatgttatgcgaaaaatgttctgttaccacttaccaagaacgaacagattggtccaagtgtaatatctaatttgtgagggttctgtatatagatcttcaggatgttacaattcttctatttgttggtgcgtaccactgtatcatatttgttcaccccacggctctagtgtcacagaccgatcgcgcttctctgactttacatatttgttcaccccacggctccagtgtcacagaccgatcgcgcttctctgacgtaaagtcagagggacgtatgttactgatgggtggacccaacctttatgggtcccacatgtcagtgataaagtctctttgaagtaagactcatctgtcacggacagcttgtacatctgaatcatggtttcagaggtagaaatgtaaagctacaaattgcattcaacgtcctaatttggtatttaagaattttcatggattttaatgtttaattctacgattcaatctggaatgcaagaattagctagtcagagggaatatgcctcctatgagttaaacgtatcctcaagtgtccacagtggctaaatatatcaggaaatcaggctatgtgaaaattcccatcccttctttaccggatgtatcatgtaccaccccgattcaccgaatgaacaaatgggtttcaagaggagaggatatcttcaaatttaaatttggatgatctgagacataccacaactctttaacacaattttggttgtacatgatcagcatcaactagaatcctaacttcacgtagctattacatcagttccatgttcattggtggtagtgcaaatggatatactcaggaaataagcatctttcccacatgaacctctgaannnnnnnnnnnnnnnnnnnnnnnnatgctaaaaccctcgaccatgtgtctagcgtcgatgccgacggtcgtcacgcctgcagtgacagaaaatcaaagtcagatgcacttcaccagaactctgagcagtgctaagtaagaagagtttttgttctataataacaaaaaaaaagacatacgaaaattacacatttgctgggtaccttgactagaaaatttaattaattcatataatacataatgcacagaatggaagttagtattgaactctacacaaatatatacatcccaatattttcctgaagaacatataacactttgatctctgaagaacatatttctatatttttcctgagaaattttgaattatcataatgaacctggtgccttcagttgacttactttgttttagcgcggtagtaaaatataacagaaattaattttgcataattccaactttatctgataagcaaattaagtaaatgtaagcatacccgtatcgatcatagtctctggaacggtccctaggggagcgtgaccttcggtagccccttgaatcataactatgggatctccctgattctctgtccttgtccgacctactttctctgtcatggtatcgatcatggcttctcctgcggtcataatccctgtccctatcacggctgctgcctcgatctcctctatggcgatccttgctagatgctctgtcacgttccaggctcctgtccctggacctagttatattagagaaaattggaacgtttttagtgccacacatatgaaagaattttgttttgctattaatcttagttttcttaagaattctaaaatatagagtaccttctttcatgctcagctcggtctatcttgcgccttttgtttttctcttcctgtacacattttaagcattaaaaaaaaaaccacatcttcatctccaataaaaagcacattcaggaacaaacaaaaaaggttaattatacatatccatgttagccaaaacctcgtaaaagacaaccaattctccaggcaaatcttgtttgtagtgcaagttaacttctctgctaatttcttatctacttagtagcttagtcagttgatcagttatcatgccctctctattctctctctttgtgacttgacgtttgaacctttggatcctctgaactatattttagacttattttattattaatatctgttttccagtaggacaatcctactgttcccataaaaaggcccttgtctaacatgcaaccccaccggacttagctccattcaaaatagcacaatttcgaaaaacctcacctgcagttcggataacttctcacgtatcagcatataacccatatgaagtttccctccaaaatgatctgccaaacgccggtcactgtttggaagaaaattgtaagctaagatattaattgtaaacaacacgcatgctattatgtaaaagattgtgataatttattagaattcttaacaagatatctataatccacaaggataaacatgtataaaataaacacgcacattctttagctgcaaaagtaatcctcgaaaaagtggacccaaaagcctgctggtgaaaaggagttacaggtgttcgtcaaaagctgaagcacttgaaaccccaaaattctcgtacattcatgacccccatgcagaaattgatggtgaagttaaaaaggataaatttacctgtcatatacgctcaagaatgctccacatatgtcacacaggcgcaacttttgatcagtctaaacagagattgaaaaataaaaatcatcaatataaaagcatcacaacaaaatgcatccacagttcaacacagtgataatttcttggagtgaaaacaaaacaactaaatatatcaattttttatgtgcactgcaatgagcgattcaccacacttacaatctgaacgtgagttgacatctttgcagagtccggaacaggctgtggccgagcaccaagctgtttaaacatgacaacagaacacataagagagatatggaacactattcctttgataacgaccatagaggatttattcctaaatttctaatcagttgcaccaacaaaattaaaagccaaggtcgatcaccttctttagagcttctgcttcatccaaaagtttctgagcttcatcgatcattccattctcacctgttcaatatggaagctagaaattaatgaatttttgtatattaacgatgaacagaagacaatgagccatgtgctttggtagttcaaggaaggaatatatagggagcatgattaaaaaaaatcaaacctagttcttctgcctttttgagtttttcatcaatcatttcttgtgtgcgtgcatctggagcagcagcaacaggtggtggtggaattgattgattagcagtttggagtgaagtcattagtgagacacggtccttattaaaagcttcaagtagatgctttgcctgaaagggtatgaaaagttatacaaacactaatatgcctgtaatcttccggtggcaaaccattgtatataaagcaatatgatggcaataaatttagtcatataaaaatatgaagtcctcgcactacacaaactccattgtggtacacatatttcatgatcattgatcacagggacaatacctgctcttcagccctctgttccttgagcttgtcaacctcttcagtagcccgaattttgccctcagtgtttccctcaagatctagaggaagagacagttgatacaatcaaactcaagagaacaaaaggagttgttttatgtagtgtactcggaaattattcacaacggcaggcaaagttagaaagattgagtaacaaagagtcaaagatttaagaaacaaaatagcgagggggaaaagcaaaaaatatttgagaaagaattggttaatttttcctaaatcaatactatcccattaggcacaataaagaataatttgataaattatgaaaaaaaatataaagcattcattttgattacggaggtcaaatttccatacttttatcatgatttcagcaattgtatgaatgtaaaacattcttaggatcatttttagtttagttccttcgacttcgcttatttaaaaaactccattgattaaacacaattaggcagaagccaatttggtccatgcaaaaagccaaacacatatttttccgaatatcttctttgtctagagacatttccttgttgaatgagataaagagttaaagcgaatatgtcatgaacatgatgcatcattctctctaattgaataattttcaggagaaaatattaataaagatatggtcaattcaagtggataggatgtggccatgatggaatttcaaacaaaacaaaggtaaacatcagatttaccaaaagcatcaatctccttcatcttctccttgatttgtttggagaactcaatcacttctttactctgcatttgtacatacatattgcaacttagtttatctccacagtcgtgggacccaaggagaactaactattataaaggaatatacctgtgtgacttcagtgatggaaattgctatagctgccttggcatcgtcctcctctagacgtttaagggctctctgaatcttcctttcacactccgatattagtctttctatagtttcttccaattcacggtcataattgtccatacctttggctttcgcttcttcatatctattactaagttcaggaaacaaatagaacagagctcttgcactcaatagcaaacatacagtacagactagcatgtgtcacaggtttaccaataagaacagccgaacaggccaaacactttctatgggttctggttttgagaataaccatactaaatctaaacttttaccaataattcctcaagaatcttctatttttctcaagttgacctcgaatcatttaattttggcaagaaaagaaaagggtaacatgtgactgaagccaaaaaggaaaaatattcacagctggcatgatctaacgcttaaaagaatgccggttcttgtcaccaggcactggcaggcactaaaatagaattacatcactaatattattcataacgtaaatctttcagaatgtaaaccttatacaccaaattgttgtagcatactcaagcatcacaacagttaatgttagcaataagtaaacacaatcaactccataaatatagatgccacatggcccacatctaaaaaaatttagaagtaccaaaagttactaaatatgcgttgaaggccatcctagccgaacaaatcgcagaccaaacatcccacaccatcgataaaatgtctaattcgtcgctctcgccttagaaccacctcggctgagcactccgcttctccgattcaaactaaaccgtcaagcaggttgcatggcacaaatctatttctattcacacacaaaatctaactgaaacatactaaaccctagttaccctacatgaataatttgaaggggatctccaaggatactccttgcgcagctgcagcgagtgcatcttcgggcatggccccatgtccatcttctgcaaaaaaacaaaacaacgcaggcgcacatcagccacgcgataaccgaatccgatggatggagtggggatataggagggggctccgccgcgaggggatcgagagtagcacggggaacgcacggtgagctggaacaggtcgtgggggcagaggccggcgaggaagaggcggcagacgtcgcggtcgtagtacttgcggctgacctcccgcacgtcgccgttgcggttggcgcccatgagctggtcgagctgcttccggatcgcgtccatggcgcaccgtcgcccccacgccccgtcgcccccgccggcgctgcccctcccctttgctagggttttgcttggctcgaggcggggctggttggttggttggtttggtgggcggcggtgccggaggaagaagaagaagacggctaagcacacccccacacaccgtgccgtatccattttcgctccacgggccgtcggatcgacgatgcacggtccagatgggctggatgggctacagaaggacggccacgcggcccatgagtccattgatgacctgttctttccttcctcctcttctcgtgggccttcttctctctccccctccccgtggcgctgacgcgacgcgctctcctccggcgaggtctctgactctccagcgctgcgcggcgccgtatcgccggccgcgaactcgaggctgggctgggcgggcgtatcgttcctgctcccggaggtaaccaccctcccctcctccgcatcctctcgacggcgcgtagccttctgtccgcctctcgtttccggcgtcgcttcgcttaccagttgctaggatcctcgaggtgtgcggcggtgttcccgtttcgtccgatgcgccgattgagtcttcgattgctattatcataggagatggattgtttcgtccagttttcaacttccgttttttggctccttgcatcgttggtgttgtgttgttatttggtactcgctactccgtatcccagtgtctccacattttcgttggcgttgtgcaaagcaatcatgtcaaatgtgtgggatgtgaagtgctagattgccaaatatctcattcagttctagatttttccaatgaccaattcatatatttgtatattggagtaattgggtttgattgtgctatagcctattgcctatagtagttggaattggttttgttgtgcatggactgtattgctggcagtggcattattgatctctagatagttgattcatatgaaacgcttctgactaggcgatgtgcagcccaattgtgagccacgtctagaagccatttaggtgttgtttgaacagtgacgcatctttggagaaccttacctgcataagttttaggcttcattgctttgaaaattttatgtatgttctttataagaatgcatgagcatatactagactaagtacataaatggtttgcttcattggaccttttcagaagactgttatgatgatttgaactactgcttggtattacaatggagaaccttgaatgcacagttgggaaagatggcttaaattttcagtgcaacctgtgtgattcagatgtagtgcattccatggcagaaatcctgcttcgtggattggcaactgcctcagttgacagcactactggtgatatcttcaagagcccatcttctgtagctgttggaatgaagagcgagctagcagaatatttgattcaggggtccatgacgcttgttcgtgaggctgtcgacggaggcgaggatcactcagaacaattaataaaagcatccaccatgccgacggagttcctctcagacttgatcgatggttttgtagcatcaaaacggaacttgttgagccatgtgtctgggtttttgtctagcgaaacccgcttgaacaaaattaaagacttcatacagaagctggagatggagaacttctgggcaccagatgttagagaggctactgcagggactattcttaagagtatagacatgaaatgcattatccattgccctgagagatttgacacacaagataagctggctgaacacaggaatctgtgtagatttaggatagtaaactgcaaaaatgatggatgtttagcttccttttctgctaatcacattgagaagcatgactctgtctgcccattcaaagtcctaccatgtgagcagttgtgcgagcagcatgttatgcggtgtgagatggacaggcattgtgcatcagtttgccctatgaagcttattaactgccctttttaccaggttggctgtgaatcagcctttccgcagtgtgttcttgataagcattgttcagagcgccttcaaatccatctgatgtatattcttgaactaactacaagacatgatgcttttgttaatgatatgaatcaacgattacacctccttgagaaggttagtattatttgtactgtaccctttgaagccatatttgaactatgcttatagcttaccctcctttcctatttagcttgatatctgctcagtgtaagattagagaataaaggattaacaattattcaagtattcaactcaacagctagaagcagtatgtaattgtagaactaatgaaataatacccatggtttatcggaaggcaacccaggacaatcgaagtatggaataccttttttcactcgttttgttggaggactgcattgaatttcattgacttgagacagagaatgagtacagttgggctagagcacacgcaatttttttcgtctgaaaaacaagcaactggttgtctgtactcagattaatttcctgagcttatggctctgacaattctagatatcgcaagcagtgggtatatttttgtttacaccaagttgtaatttttgaatcccgctggggcttgttacccataattattaagggaaatatgcatgtatttctgatgaatcagttcccaaataggatatctggattaattactattttcaatcttattacaggcccagtcactgaatgaactctctggggctttagataacagaaccctcactctaacagcaaaggagcaagaagcaaagatcaagaaactcgaacaggatctcaaagtgcaagagacaaagctgaagaaacttgaaagcgagtttaagtcagggaaagtgtgaatacatccttcggccatcccggctaaaaagaagtgtgaatgcgtgatgttgtgattatagtgttactgtaaaaaaccagggcgtcatactttagtagctgtaaataataattagcacctccttacagtttaccatacttctgtgtgttgttcatgtacgataagaaaataaggtttagaaaagtcagcttctcttgaattcttttgttagtttgaagtaacagtgtttgatcttttctgtatcatgcagtaagtacatatatattgtggagatgaagttcatttggatcatctgccatcttcttcaatgtgctggaagtatctgtcggtgggaactacacatgggtttacaactacagtttttcatgttaaagatattgcctcaatttcatgactggcttggttgtttgactcttcttttaggacatagtcacaggcagcttccaaaatcttgcaaacctctctcctgtactgcaacatatcatgtcaagaagaaaccattaaatcctgtttttggaggggaaacaaaatctttaaagtgtctctgttaccatatggttgcataattagagggctttgtggtacagagtgccctagaatcaattgttatcacccatttgtcttgcatctaatttttcagtggtggtgactgcttttccacggcattaagatcaaggagttcttaagtctgggaactttggtgactggtgaaatcattttacgaagtgacacaggaggttagaattctgaactattgttcatccctttttttatgccatagagttgtgaaatttgaagtagaataatgtgttcctagtctcatattcattttaggccaccttaagatagtattagcatacctcatcagttgctccagactttattttggattgcaaaatgcaccatttcttcatgtttactcctataatgtgcataagcataatgtaatatttaacagaaacatcttttgctagcaaaagtttagcttaatacaatgtatagccaacttaccaatctttatatcaacttgacatgttgaactggaggttgttcttagatgccacctgcagtggatctatgaccaaggtatcaatggcaattcctctctcaggaaaaataattacatcttactgggaagagtgaatattttgtggttttatacagagaaagaaatggttaaagacgggccacttggtctcctcttcattagcattagtatctattgtgcaaaatgagtactttactatattaacttcttagacaatagaaaagattgctgaaaagacatagaaacggagaagcaagtaacaagttctcacaaaattactactttcctgaccaaacaatctttctaatatttcaaattttctatttctatttgttcgtgttgtcaataatggtggcaaatacctcaaagtaagaaccaaatggaacatcatgtgcctgatgctttgtctcatagatctgaaatgagatagtaagtcataatttcattaaagaagaaaaatcaagaaaacctgattcacagtggacctatctgttactaatttaatcttaccagatttgttttgttctttgagaaagaagcacgttgccattctgtcactgcagtatctgggggacataaaggactgtggcatagagacctgaacatcacttcgcggatcttgccgccatactcatctgaggggtaccacttgctaagctagagaatgaaaaatcaaaacactataaattaaaaaaatgttggttatgctaccagtcactagattaacacatccaaggattgacatagcaaatagaacatgcgattggtgctactgacaaaataggaacctttaaatctgtatcttttcttccatgtcgatactgctggaaaaacattgaattgtcacctaatatgatactgaagaacttctcagatgtgccagggaaggttttctgatggacaatgtcatgttgaaaattaggggggaaagggataacaaattgtgcattgaatatgtaggaaaacaacttgggatgctcacactggttgcatctacaagaacatgttcattgatgaaaggttggaatgcttttgcttgttcaatgcttctttctgctgtctttaggtcatctattttgctacagatgacatcgctgcttcttctttgttgaagtgaatgcattctgacctgtttgtaggaaagcattacagatgctcagataatttctgcaaaatcaacagaaaatattcaagctagaataatttctggatacctgtttttcagcttctaaggttgccctgtaactctgcagagcattctccagggcccgaaatgtgcggtttctattccagaatgatgtgaatttgtacctgattcttcctgagaaatcaagccaggtattttcaacagaaaatctctacatagatttctaacatgaatagttaatctaaattgtatactccctccgtcccagaatataagaagttttagagttggacacggttattaagaaagtaggtagaagtgaatagtggagggttgtgattggatgagtagtggaggtaggtgggaaaagtgaatggtggagggttgtgattggttaggaagagaatgttgatggagaagttgttatattttgggataaatcctgagggctaaaagttgttatattttgggatagagggagtatctattaggtttatgattttctttgctagcgcaacttttactggtaaaagccacttcttttagagtaactcaacttgaaaatgatacagttcaagctctctggagttcaaacttgcacaaatgtggtaattcgattctatgatattaaactacttttccaatttaggcattttcttgaatccaacgttttaaaaattatgagattgagccaataaattaccattttgactgcatgaagggggtgttccatgaccacctgaaccggtacgaagaaaaatagtaattgctgggttgataagggaatgctgacttctttttatctgcgggataaagtgatgtggatgtctactatctcagctgatagaaagcaaatactaagtccacggaaagagcttcgtaggttgcatacctcatctatatcttgtaatggaataatcacctaaaaaattgcaggtcttagaaagcgaactggaagttctcaaaataaaagtaataagctcaagaaaatcatctaagggataataagtgtgtaaatttacttaacaatatttccatgctgttattgatttaccatggagataactagaaaggagcataaataacaatgttcagcttcaagtaaaataattaagcaatgcatgtttcttcagatccatgtactttacattcaactgtttggagaatacattggagtggaagcacagatgccataaggagatgtacatacgcccatggtgcaggaaagacctctccagagcacaagaataactttggtgaacaatctggaagtacaagagacagatggaatgtttcagcataagaaacatgaatcatcatgaggaagagtcaattctgatgagtatgaaatactgtataagcaattgtaatatcaggaattaatacttcatcatgaggaagttcaaatatagcttgtagaaggccactatcttgagttattggcaggtattgcttgcttagcatcatcgttctctcggactcgattccaacacattggtcaaacagactggagaaagaggggaaaaaggaaaataagaagattgcttatcatcaggtatgctcgttccccaac

SEQ ID NO: 10901 - DNA, 26352 bp, Oryza sativa
tctgaaagctcagctgcaagccaggcagccagcaatatataccgcttggccgaaggatccaaatatctaatcagcaaggatgaaaagtagtactagtacaatagtgcaaaagtatagctttgtatcatggaccaaggctggcatacaccctgtgccgtttttcacatagcatttgtctaatctgaatccatcacactcatacgtttttgcttttctcgcacgcttaagatgagaaaaacagactggattaaagctggattaactattttatctttttgggggcaacctgagacactatgattagagtttcttggtgtataatggaattgtaatgatggacactgcatcaccttttcacttgtgacacagaaacttggaatgcaattgagaaacatatcagaaattcgaattcacaacatggcaaactgttggtacctcaactgggagctctctaaccaggaagttgaactcctccccccacaacgggtttcttgagctaggcaccatggaactgcaaacgcattaggccatgcttgctttttagaatgattttttagctcagacatgattatattagaacaaaatactgtgtgaagatgaggcatagcgcagagaagttgtaatggcaggtgacctgaagcgtctttgctcgccgcaggagatgacggcgtaaggatcggagctcccgttcaagttggcgccgatgaggtacttggcacagagcagctccagctgattgcaaaaacagaaaaaggcacacggaaacaattcagacatggagtcaattaaccttgcagataatataagcaagtaccttgatcacatagctggttctgccccgagagtgagggctaccatctggaagagcaacctgcaatgcaaacaaattgttctgataattaagaaggaagtgcaaatgtgcaatgcaaacaaatataatgtggctcaccttgctggtgcctccaagttcagcggccgctggcttccccttcgcccgccggcgccggcagccgcagccaccacaaccaccgtctcggcggcagctcgcggctgccgtagtggtaggagagggcggcggcgacgaggaggaagccggggacttggtgctggactggaccgcctggtcgaggaagaggaggagcagtgccgcgacgagcagcgcggccgcggagacggcgacctccgcctcccacagcgacggcaggagaaaaccccgcatccacgagctgagccccgcagcctccatggcaaactcctcgaggcaaaaaccaaagctcggttcgtgcggggcgctgcacgcatttaaagcgagccaaagcccaagcgtagcgtggtgcaaccgcgcggttggtgatcacgctaccactgactagctagtgagattgccaaaggcgagagagcgagcggaaggacacgctcggcccggggagccgaaaggcacaaggctacaatgattagagggcaaaatttttgatatagagaatatggctgtatttagttcacgctaaaattggaagtttggttgaaattggaacgatgtgatggaaaagttaaaagtttatgtgtagaaaagttttgatgtgatagaaaagttggaagtttgaagaaaaaatttggaactaaactcggcctatgtaatagtacgtgctggcatatgcatgctcggacgcacccttccatagttgataactgattgttgttacacggacactatttgtcctgttcactttcagctttgtaggtgccagtattttgatttttaatgttgtgttatgttgaggggttagaaacccacactgcttaagtattagctaaaaaactgaaaatggattgatataatttttatatactttttaattaacaaaatatactatttagtggtttgggaaacatttttttctgaaataaaaagtagaagttggaaaaggggtaaaagaacacatgctagctacacctcgcgattcggggcgcagtgttgtgtggaactgtggactgggcgttgttgtcgtattttgctacagtgctggctttttgccgctcagtacgttactctgttaagtgcgtaggttgttctggaatgggcactctgcatgcttttcccatgtaatagttgcattgttgcaagcctgccactacgatacttctacaccattattctctgttcctcagcaaagcaaatattcggtgtcaatgtttgcatttatggactaaactttaatctttgtcacatcaaatatttagatactaatttagagtattaaacataaactacttataaaactagttacgtaaatgagagctaattcgtgagacaattttttaaagcctaattaatccataattagtacatgtttactctagcatcacatagcctaaccatggattaattaggcttaatagattcgtctcgcgaattagtctagagttatggaatgagttttatcattaatctatatttaatacgtctaattagtgtcaaacatccgatgtgacagggactaaaaattttagccctatccaaacagacctacatgtactgtagtgattggacaggaatggccaatgcccaatattatggacaagacattaacacagtcgcaaatagcactgatctagaatgtttgaatcatggaaatttcacgcaaacaattgaacaattgggacggctagatcgacgaagcagaaagaatgaagagcttgtaagttcatgatcgagagcggcaaattgaagtgcaactcaaagccacttcatcatgcggaattaattataagcgcgccggccgtagcatccaaagtttgatactttgccagttgcatttcttggtgctttatcattctattaaaccacgcaaatagctgcgatcatagcagcatcacagcatgcatagcaatttttttttcagctaaagctagcaaattaagaaacgcaattaatattgcaatgattggaacgactagacttgtagttgtggccttgtgggacactcgctattcgttaatcaatacgtacttgtcaccttcgagtttcgacttaatttatgtagcggtgaggctcgatcaggaggaggagagataaccgggatctgcccgagctgtaaagcgtgagcaaagatggtggcaggtgaagaagaacggaaaagaaaagaaaaggcacgtacgttttcggagagtccaattgttttgggggggtatatggtgctttcatcaatcattactaatctctccgttttatattataaaatattttaacttttgtaaaatcacctttttttcattcatttaaatctataaaaatacatagtaatatttttaacccaaaacaaatatactattaaaatatactcaatattatatttaataaaactaattaaatattaaatatattactaaattttcttaaacttctgtaccttccctttttttttctccagggaaaaccttggatgttgtatggtggtaaaaactttgtttctcctcctgcttaattaaactaaaaaaaaagtcatttcctccatgccggccctgcgcgatcgcagctactgtgctgtgtccgttccaacgccaccgtcgcgcgtcgcgagcacctcgccgacaccgacgagcgacagcatatctgccggcagtcgaaacggccccgacttcacgggcgcaccgcgcgcggtggacggatcgcgtcgcacttgcattacaatgtcatccggcgcacgcacgcacgccgtcgcaatccttcgcggtggacgccgccacgctggacgagcaggcgaggcgagccgcaccacgtaccgatccacacgcgcgaaccagtgttgtacagacgcgtgcgggccgtgacggtccaggcgcagccgcgcggcagccgaattagcgtcggcgcggcccgcagccccgcaggtgaagccgatatgggccatcctgccgaccttgccctccgggtccaactccaaaccccctgcgtatgtgtgcaattctggtggccgcacgtctcgcggtcgcgggcacgcgaatacgcgatactgtggaattgtggaagcgatgtggtgctcactaggcaggggtagaaatggtcacgaaaaagcgccgttccgtataatgagtaacgttttttaccgttactgtttatggctgtatttaatttttgttttttctattttctttatgcactgtattaatatcgacattgagtagtttaagtgatacatatggtcaattgctagccgatcgaacgtcgtttccgaagagatgctatcgattccgaccgttttcacccttttttggaaacggtcgaggaaaggtcgaaaaacagctcaaccatcctcgtaacctttttttttctgaaaaccaaaaaggaaaatggtataaaaaatgttgaggactctgaagcggaattgtacaaacagaaacatgtcagaatcgatcggatcatcggaaaccgatataaatgtgctttctcaagtaccctacaaattttcaaattgtaaactatactacctccgtttaaaaataattatctttctaggattcaaaatttattctaaaatacttgtacttatcccatacatcacctcctattaaattttgtccctattctactcttagtcaactcccaaccatacatcatttaatgaggaacattgtaatatttatttttaaaccttaatctatactaaactatctacatttaacgagtagaatgataaatatttgaggattgaggaagtatctttttagccttgctcttaagttagggatttgattgaggagctaacaggcctcattagatcaaatagagaaaaaccgtacatattgagggtatctagagatatcgtaagtaccatattataaaaacggtaattttcgcaagaatacggtaagataaagataaagaaacagtcgatataacagcgaaatcatttctatttttgtttgcatatttttttaatttcatcggttaccattttcacatgactcggttggtagaaataaaaaaatgagctttggttggttggtaattttcgtgaccgttttcacacctcattgctttgcgggttttgccttcctgcccctcgatcggtttcacgcgattttgccgacgagattacgaggcactactgaagtagtgcagtttacctgatgtgtgatgaccagcaggcaagcaggcaggctcagccgcagaaaatacgtgcaaccgcgggcggcaatgcacgagtcaatgcgctcagctggtgaaccgaaggcaccaccggccggttcagtgacaaggctccgacatcgagtcctttacaaatcacaatggatagaagtctacttctcaacccatacccatgccatattgccatacaggggttgtcacgaaatgtttatctgtaacaatctataaaatttattggaacgcattgtcagcaaggtggtcgtgccggagtggttatcgggcatgactagaaatcatgtgggctttgcccgcgcaggttcgaatcctgccgaccacgtttttttttctcatttctgccttctgttttcacaatttccattcttttcgtttctgccatctgctttcaaatttccctttttctttttcgtttctgccttctatatattttcacatgtttgaaaaagataagtcccagttttccccctctagtttaaaaaagatatgttccatttggtccaaagtacgcaagtatagcacctctgtaaacgtaacgggcatactactgcacacgccaccatccgtccatacccgaaatgccgaggtgagcacatctctctctctctctctctctcagtctgaccctatatatccccagtgatgatgaacaaaatctccataaatgaactctcgtaatatcccactgtatcaaccggatttcgcgaggctcgcatgcacacgccgcattagccaaggagtgaattcgcgattgaaaaccaatctggcattaatgtgtccgatgttttgttgccaactgctaaatgaagtgccagcagagttgccccccttccaaatcattccttcgcgagtagtagaaactggtgttctcatttgttcgaaacacacaccaccaggcagaggcagattttttctcatttcctctttgctttttttcatttcccaactcgagttcgcttcgatgatgcagcagcttcatggctccgactccgtgcaagcgcagcgccgccgcccaaggtgttcgtcatatgcatatgtgttcgcacacaaaaaaaattcctttctctttttttcccctcaagaacacggagaaaaatatctcgttttccccttttgagaattatgatccttagatctgtcgttgtggacgtgtttgatggtgatctcttcgtgcgtgtgtgcttgttttgatgcaggaatggtgacgccgccgccaaaaagcagccgtggtacatgcgggcgttgggtgggctgatcccgtcggcgcgacgtgccgccatagctgcgccgccgccgccggcggctgccgtggcgggggcggtggagaggaggccaagctggtggtgggggtcgtctctgaagacgacgtccgccgcgttcgcgagggaggtgtgcatatgcgctccgctgtgctcctacgacgggatcatgggcatccaagtcgacgccgtggcgccgacgatgatggcgaggagcagcgccgctatctctccctcgccaccgcggcgggcgtctccggccaggtcccctactgctggcgccgccggtggtggcggtcgccgctctcccgcatcgccgcggacggcgtcgtccccgaggtcgagcagggccagggcgcaccctgcgccggtgtccgtggcggcgccggcgccggctgcggcggccgtggaggggccgaggaagagggtctccttcagcggcggcgagtcgctgtggaacgacgagctggtgcggcggttcgtgcgggcgcaggaggggatgccgcgccgcggcgagatagacatggccaaccgccaccgccggaggaggtggcgggcaccggggaagagccggctccgccggatgtcactggcccatgtcgccgacgacgacgaagatggagagaccaacgctctggcctagctagctagtggcgtggctgctatgtggtgaggttggctagctatatatatagctcaggttgctcttgctcacaagtcccctttggttatacttttatgctcttgaggaacatgctctatgttgttagggttgtgatgtccgttcgatgctacttgttgcggaagaaaaccgcgaggaataataatagactatccgttactatggttgggatgtcggttcgttgtcgtttaccggaaaaggaaattgcgagtactaacggaatatctattagtaggattggtatgtcggtttcactttaattattgcagaataatgtttgcgtttaacgcactggtggttattatggttgggatatcggttttatgcgatttttattgcagaagtggtagaatgaaattttgaataatgaatgtactatccaatgttgggggttgggatgttggtttgataccaattactgcagaatggagttgtgagtaatgatacacgctatggttttttaggttgggatgttggtacctcgctgatattacaaaattgaaattgtgagtaaaaggctataatatcggttagtagagtttgggatgtcggtttagtgacaagcattgttgaacaaagttgtgaatatcacattaaggtttactgttgttggaatttcgaaagggaactgttgttgggattttggtcatggtctattattgcgcaacgaaaatatgattaattgacaattggttatttagagttgggacataggatgaattaatgtcaattactcctactttagaagaagtagccagtactatactatccattttgcattgttaaatagcagtgggatgtttggtatttttgttgctcctaagtttctatttcctagcacaagaattttgacaaagagtatatgtgccggtacaataagtagacttgtggatgaaacagtatgttgacagaagaaaaaagggctggactaactatagattttacagtatcaaatgataaatactgtatgatttagcatacttcataagctaattagatttttataagataaacatcatgaatgaatgtagaagattaaaatcaatatatatgcatcttagaaatatgaaattagatcgtgaaacctcactttctttcagccattgtaaagaaaatcatcgtggaccaccctgtcgggagtagaagttggatagagcagtaatagtacaatacagcttcccttattttgtaatgtcaaaattatgattatatttttcgtgtgaccaaatatttacgtgcacactgtagccagtttgaaaagtttttactatagattattccattataatatctagctttaacatggttttaatcttttcaatgcatgtctcgttaattcttttttttacggagaaatgtctcgttaattcagatgttgtgagtgataagttagagaaactcttgcagaaacatttcctttttcttttgcaaaattttggcatttcaaacatgccgcacggtggctctggcctgtatgctgtagcacatgcattggatatgtgcaggggaaaccgtgctagaccaccagtataaaatagaggatgccagcgatcgattcaggtgcaaaaccaatctacgcctatcattctgctatgctcttcgatgctgattaatttgcattttttttctgttaacatgcatatatagtaacataacattaagtcatttttttcatcttgattggttcaagtgtatatacccagttgtagtttttcatttctgaatatcacctaaaaggagacatagctgatattgtttcatttctcttgattaaatagtgtaaaagttgttatagcaaaattagcccccccccccccccaaaaaaaaaaaacagagagagagaagttaaaactatacaaggattagcacaacattatggcatgatagtcgactagtggagactggagagatatctatccttgctcccgccatgaccgatgtttgaatttcattctctagctaggaagacgatcgatgatggaatttgatgaatgaaacgcaacgactaaattaggggactggtgatgaaattgaaacattgcacggttacaaagaaactgtaacatttgttgtacatccatatgaacccaggttgataaatctagaagcaatctttctgagacaatgattgtgaacgacacaatgtaacattttttttgccaatgtgttcacaaattacaaaaaatacatttcttgccagattcttgtaactattatccatccatcactggctgatcactgcgtgttgagcacggtgaggatgcagctggagatgtcctgagagctgtaccccgtcagctcctgcagctccgagctccacggcagcgcacccggcgggttcagcgtccacctcgcgatggagatcgccgccgccgccaccatggacggtaggtagcccaggcagccgtagctctccagcgaccggtcggcgacgtgacacgccagccgctgcacgcgcagctcttccttccccttgctgtaccgggtgaagtgctccacgaacgtctccgcgttcgggccgcccagccgatagcccagtgccgccatcatctccctctccatcgcgagcacctcctgcgccgacgcgaactcgccgtagctggcgatctccctggcgtccagcttgaagaccgtcccctggtcctcgtacttggccgccgtgtacacggccgtggcggcgacgaggctgagctggtgcgcggtgtagctcggcagggctctcacggacaggaaccggtcgaagtaggacacggcgcggtggagcgtgccggcggcgagttcgtagcggtgggtgagcctccccatccaggcgacgagggaggcgcgcgccgccgcgctgatctgaccgccttgcaccgtgtcgaggtagtccggcgacgggcgctgggcggcgtccttctccatgtcacggaggttggcgtcgatgtcgtcgtcgtagggcgcgcacagctgcgggcgcgacgccgtggagttgtcgggggccggagcgtcgttgtcgccgttgtactgctcgctccactccagctgctgcatgaacgccctgatggcgtcgccttcgtcgacgggagcggcgtacacgggctcggctttcgctggaacggggaggggagggaaccccggcggcggaggaagacggcgagcgggcgcagcgtacacgggctcgtcggccagccctggaacgggaagcggagggaagcccggcggcggaggaagatggcgagcgggcgcagcgtacacgggctcgtcggccagccctggaacgggaagcggagggaagcccggcggcggcggaagaagggcacagggcaccttgacatccaccttcgtgtcccagtcgtagagtacgccgttggtgtcatcattcgatgccatggactccacctcggcggcggcggccaggtcggcgccgggcgccgctggatgcgccgggagcgcgccgatggcgcggaggtacgcgtcaagaaccccgacatccatttgcgccgcgccgccgtcgccgggcaagagctcgaccatcgaggccgttatgtcgtcagcgagaaggtcggcgacgtagggctccatgatcgaatccatggccgctctcgctcgctcgccggagcagtgtgggagactgggagagcggaggctagtggtggaagaagaaacttgcacacgctggtggcgactggcggcgaggcgatggtgatggtgtcgcgctgcgctcctcgcctcttatcctggctgccaccatgggtgttcgatccgattcaggccaggcttcgcgcgcaattccgaatcgggatcgtattgatctgatatatttgatttgaaccaagcgaatcggtgtgaactcgtactaggctgtaaaaaaaaaaacctggaattaggttgtgttcctttcctattttggtctccgactctgtcccgaattcctgatgggattaacggatagctgtaatttcttaatgatgattagttgattgtttatagtcctgaattagtatatcgacttacgaaagcgtttctttctttcttttttctttgggttaatttggcgtccgtgtgaatttggttacaagaaaattgggtatcaggttaatgtttccaaatcgttctggagtcatcaaaactcaaacacgagcgcaagaaaaatccatcaagatttctagcgctgtaaattaattcaccgatcaatactattttgggtaggatattactaactccattccatatacaccggaacacaccaaaaaaaaagtcaactgtgcttaaattcttaaaatacatatatttctctaaggaacacggtagagacattatatatgatgaacaaaattacttaagaatgattaattgatcagttagtcctgaatggtgccaaactgccaacaacatgattaagttttcgtctgattagagcaatttgaacgtgagtgcactcctgcagatttttactggatttgatcagagcatatagagaatgtgaattcgatcattatcaagctaaatattggtgtaaatctcatccaaaaatcaagttagagaaaatacatgggcagtttgttttgtctatctaataacgccgtagattatatgtattctattctttgagtccttttttctaaatttctttggagagctatacaattctcttttggactttatcctccacatagtatatctcatatgtttgggaattggcttgtgggtgttagtaaaaaaatcaaaaaacttattcttgttggagcttccgctatatgttgggctctttggcttagtagaaatgatatggtttttgataaaacaccatcaaaatcctatttgcaggtgcttttcagggcaatgtattggcttcagggttgggctcagttgcaaaggcatgatgaagatatcaagctaataaatgatgaatgtcgtaaacttgagacgacaattatgtatctatttgccaacttcgggtggaggttctctattagaattcagtagttagaggatctttttcttttgttggtgtctattagtttgcttagctttgtttctgctttcgtgaactttctgtgtgagttctgtaataattggctgtaactctttgagtaaacgccggaatgttacattccattatctaaaaagaaatatgtattattgggagtaagcaatatcagaaagcttggctccgaaactttgttcaatccgtataaaacacttggctccgaaagctcgactttgtacaaatatccaaaaatcgcagatgacactcatcaggtgtgagaatatagatctcgatgatgtattggagaacatactggtgatgcgtcactaccagtgaaatacctgggattacctttcaccgttggtagattgctcaaggcagacctccaaccactcttcgataaatggcaggaacgatggctgtttggtgggaaagaaacatggggctagctagacgcaccactcaagtcaagtaagtgctttccttgcagccaatctatgtcctaataacgcttaaatttaccaaggtatccctataaagtgcttgacaaccaatgaaagagcttcctatgggtgggttaggaaaacataacgagcgggaaatgcaaagtataatgtgctcgccaactgcctacggcagcctgggcgtgctaaatctagaaagctttgcactagcactacatgtcagatggctatggtatgaatggaaatccctggacaaagcatgggtcggcttggataccctgtgcgacgaaaccgataaaatactcttgtcaactacaatgataaccattggggacggagcaacatcacatttttgggacttagcctggatgcacggtcgccacccgaaggatgtcatgccacaagtgtacacaatctccaaagggaagaatagaaccttgagggataccatcacagacaatacctggtcgcaagacctaaatctctcaatcatcggagacatgtcaactaagcttctagagcaactagtgaccttgtggacaacagttcaaagcgtgcaactctccccaggtgttgtagatgaaatcatttggaggctcacaaatcatgaagaatactcggttccacctaaaaagagtagttccttgaatccactagcacaaactatgacataatcatttggaaaccatgggcacgaaacaaatgtaagttgttcgctcggcttgtgatccgtaatagggactggatattagacaaactagtgattcaaggatgtccaaacaacacttactgcctgctctgcagacacgaattggagactgctttccacctcctcgtggactgagatacatgagaagaatctggaacatgctcgcaaactagatgttgcaagggcacataaagtcagccagctggattcccgctatagtccatacctggtgtacaatcatccggaaagcgtaggcaccaaacaaatgtaagttgttcacctagcttgtgatccacaatagggactggacattagaaaattagtgattaaggatgggaaactgtttaacagctcgagtgggcgtccacccatttattgcatgtcatctaaatggttatgaaaaaaatgaaaaaatatgaacaagatagatcaatatgtaatatatcaatccacaaatatgcaagttgaaattcaacttctacaaattgtaacaaacataacaaacaaaactcaaattactatatgtatatttacaattaaatttgttatttttgttacaacttttagaagttgaatttgaacttgcatgtttatggagtgatatattacatattgatctatcttgtcaattttttgaaaatttttcgtaaccatctaaacgggtggacgtccactcaagctattaattagaatccatctccgattaaggatgtccaaacaacacttattgactgctctgcagacacgaattggagactgctttccacctcctcgtggtctgcagatacatgagaagaatctggaacatgctcgcaaactagatgtcataagagcacataaagtcagccagctggattcctgctatagtccatacctagggtatggcgttgcaacctaacctaggacatccaggaaagatgtttgcactctgctactactaacggcatgagagatatggatagagctcttgacaatatccctcgttacgaaaataaaggaggacactaaaacttgggccctagtagaagcaaaatgccttgcacatatcaatccttagtttttttagaaaatactttcccatttccttttccttttcttttgtaaatctcttcttcctatacagtttttccatcccagtatactcaacgaaattggcgcacctaaataccgatttgttaaaaaaaaaaaagctcgactaggtggttcagccgttgtgtactgcatcctagtgcaacagataccaccatctatcacgtggcaggtggcacgagaagttgtgagttcgcgaatgcatgtacatgcagtagaccagtaggaagaagagaaacggtacagatcgatcgataaagatgtacagaaaccagagtacgaaaagttagtaattttgaatttgatgaatcatacatatttcaaccaaaactcacaaatttggacttatagatcgatgtacatacgaacgctagcaacaaaattgaagccatcatgcattgcatcattgcatggttgtgcctttacagactttttttttgacataagcttttacagactctcttgttcttcctatacattggctatggatcctggaagaagtactcttgaaagggagcaaagcgaggacatgcgatttgactgtacatgtcgcagacgcagcccatcaagtcgatggcctcgtacccggtgagctcggcgagatccctgctccacggctcatgccccagcacgtgcagcctcgccaggaagatcgccgacgccgccaccacggacggcaggtagcggtggaacccgtacgtcagcagcgacccgtcggtgaaccgatgcgccgcctccttcaacagctcctcttcttttccgtcgccgtagtacctcgtgaagtgctgcacgaacgtggacgccgtcgggccgcttaggttgtagtcgagcgcggcgaggatctcggtctccatgcacgacaccatcttgtgcctggtctcgctagtgtagccgcaccgggcggcgaccatgctggcgtcgatcttcctcagggtgtactggtcctcgtacttggcggcgaggaacacggccgtggccccgacgaggcggagctgcagcacgtcgtccgactcgggtgtcaccgacaggtagcggtccaggaagtaggcggcgcgctggagcgtgccatcggcgagctcgtagaaccggctgaactcgtccatgaaggcgatcatcgaggcgcgcaccagtgcggtcatccgcccaccttgtgtcgtctccaagaagtacggggagggcctctccgcggggttcgtctccatggcacggagggtggcctcgatgtcgtcgtcgtagggcgcgcacagctgcggtcgtgtcgtcgctgagttgttggtgaccaccggctgatcagcgtgctctggcagcagtggtgcgacatcgatcgtcttcttgggtggcaccgggtgatcgccgccttctggcagcggcaaggtctcctggacgacggtgacggagagcggtggaagatcaccgtagattgggaggaagctgccgtaggtgtgaggggtacggggggagtccggtggcggcgccggtgcgagcggagctgccggtggcggtgcaagcggaggcagtgcgccgatggcgcggaggaaggtgtcggtatccaccatctgcggagtgccgccgccggagaaaggatggaacattgggagcgatgtttgatcagcaagaagttcggcgaggcagggatgatccatgatcgcgtcctccatgtagggatccaagatcaaatcccccatggtcgccggagcccggaagcgagatcgagggagagcgagaggagtcaagaggcggtggcgggaagaaacttggacggtcgcgtggtggtggccgaggaaggatggtgccgcactctcgccttttatcctcgtgccacgatccgactctgatcaggctgcgcacgcgtgaaggaatccatcaaattcaaagttcgcgcggttttccgaatcaggatcgaactaatgatgtttgattagagaggactaagcgcgtgcgtttctttcctttgtttgcatctccgactcgatctctgtcatgatgaaattcaccgatcatacgatactattatacatacactgacacacacacgcgaaaaaaaaagagcacatcatcacgcaaaaagaagtccaagcactcaaattcttaaaatccactagaatggtagattaagcatgggagatgacataccatactattatggattcatgcacattgctagagaagttacctaacagtgagcatatgctaacactctatcaaaatcttcaggatttctaagcagctgagcagaacaaaaacatggtggacgtccaatcgagtgactaaaagagaaactacctgttaatctttcggtagatttatagcatcgatttttgtagaattttcaaccaatcaatgtagctcgttttaagtgaaataacataaaaaaaagacaagcatgtaaaaaatcgtaaatataaagaaaaaaaatgttgcaaaatctaattttggtgtactgtaattgagtgtaagagctatgtaattaagtgtaactgcaagttggatatagaagagcacaaattttgatgcaaaatcctacggatgaaaaagtgaaagataggagcccaaaattatgtcgcagttgaaacaacaaatccgttaaaggagtttcctggacaatggtaaaagtgcgttaagcgagttcaggtaaatctcaggcaaaacgtaagcgtagtactacctctattctattatgtatgacgctacaagttaaactaaaacgattcaaaatgtatgacgttgcagggcaaatcatttatgtatgacacattgtgtaccgactttgcccctatcctccgatggcgccgttgaattctcctcctccgctaccattgcgcaccgcagccggttccgcctcccaggcgatgtcgtcgtcctgacctccaccatggctagatctagtggtagtcagtgtttaatctttcggtttgatcatttttagcggggtggccgtaatatcgcaattttgaaaatttcagcccgaaattatatgaatttttaaataaaatttgatacaaatttaaacaaaatgttactaaattcatgaaaagatgaaataaataaaaaatttcagccaaaataatatcatactgggagatccaatagaactgaaatttcgatccgaaattttgaaccgtggcagtacaatggctaaagtggtttctccgcagcggcgttgtacgagctctgcaagctagcggagaacatgcatcgcatcgtgtgtgcaagcgggcgggcgcccgcgctcaccgactctgcccgcgtcgcggatgtgctcatcttcttcgccaagtccagtgagagccgccacgagctgtccactgtccggtatccctagcatcgtagtcctgctcgccgcagccaacattgtcagcagtggcaacacccgtgcaatcgagcgtgcgctcgtcgtcttcgattggatttgtgccaagatcaacgaattggcattggcatgggaggcaataaatcttggtctaagagaaattcttttgaatcccaaatcatccaatctgaaatgctctatgatatttttctctgaaatggctcctgttaaattccaatgttctcaatgctgtcctgtttcgttcttgatgcttattcagatgcttgttcagagtgacaaggagcagcggtcttgatggatccaaaataaaggaggacatgtcattcccagaaacatttcatcatcttacagctcatgtataaactgaagtagaattcagaaatgaactgaacaccaaaaagctgaatcttaatcaaggaaatcgaggaaaattttgtatcttaatcaagttagtacggggccaaattcagctacaggatcacatgtcactatcagctgtgaaggaagaatatttttgttctgctttaattcaaaaaaacctgaaatggaagtaaagaaaacaccaattacaactgatgcaatatatattatgtacaaatacccagaaagaaataagattaagagtataccaatagtctggacacatatgtaattagtccttgaacacgcggcacgccccatcctcgcatgactcttccttctgggcccatgacaggattttttttttcgccaatactcgtcctcctgtcctgctcttgcaattctcacattcacttccaatgattggtttgtgatcaatggacaaatcaattgccttaagatgcaacataaatagggaaaataataagcatcaaattaatgcattagctagcactacaaaaatccgtaattttcttggcggccaaaaaccgccaagtatagtatgaaaatcgccaagattaattattccattggctgaccgccaagtctagaaagctagagatattcagattccgtggttgctaaccgtaagggaatatcttcttggcggtcgaactaccaagcaaattaagaaagttgtgaactttcaaatgcgccaagaaatgtaaccttgtccctttagaccaacaaaaatatatctttccttggctgctgagaaactgccaaaaaaattcttactcttgaccgttagaaccgctaaggacattttttatccttgacggttagtaccaccaagaaagattatccttgtcagtcagggccaccaagaataacttattgatgtccaaaactgtgtctttccctggcggccctacctaccatggcaatcaagaatatatttggggtgtaatatgagtaatttccatggcggctagaaatgctagggccgccaagaaattatctttggggtacattatgcagatacagtccaaatattggtgacacacacactatatacacacatgcagtccaatgcaacacaacatagcgaaagtaatgtgaaagtcaatatagctggccattatgtgaaagtacgccgcgagaatcgccaacatttccaacaatggtaattttatcttacctaaaggtataatattttttagtgtaaaatttagtatctttacgtactatctatctaaagataaaaaaaaattagtgtaaaatttagctatctcaaggtgttttctcaagaattgtaaaatttatcttccaacgatgatctgatttcctctgatgattaccatgtgtgacgtgtttcttttgtataacgacgctctgtaagcctgctgatcagggagcaaaaatcccaattgaagtgtaaaaacaaacaattcaacagttccatgaaagaaaaatgctacaaaaatgtgtgaaatgacaccggagaaaaataaaggcatacataaaatagaggagtagaataagagtcggattctatactaaagggatatacctattgtagcaggatggcgacatggcgacttagcatagcgagagggagcggctgccagcgacgttcggccaagggttgctgtaactctgatatatacgctgtaatatgttggatcggggatgtgtacccgttatcagtgcctcggggatataagctacgactctcaatgacgtcattgtgtttggatctcctatgacatttttcgcatttggtttctaatgatgatcttgggccagttttataaggcttttacgtgtttgtgaataaaaaaaagatgaagatgaagacaacctccgggccatgtttgcaaagactctctatcagggggccaaaaaacctcaatcaagttgcgttgcatggcaaccatgaacaatcaacagaaacatgtttacaagggatctctactcctaccgatgtcctcatcgatcaaccgatcgatcactgcgttctacatggcgaagatgcagctgacgaggtcctcgaagctgtaccccgtcagctcctgcaactccgtgctccagaccagcgcgtcgtgccggttcagcgaacacctcgcgacggagatcgacgcccgccggccgccgcctccatggacggcaggtatagtagccccgggcagccgtacgtagttcattagcgactggtcggcaacgtcgcgctccagccgctgcatgcacccgtagcttttcctctccccggctgttgtacacttgtaccgggtgaagtgctccacgaacgtgtccgcggttgggccatatgtagagacatcagagtaccaaaagctaataaatttgaatttgatgaattaatcacatatatttcaaccaaataacacgcgcaattttgagtttacagatcaatgtacaggcaacagtgcaaaatttaagccatcatattcatgctttgcatgcttgtgcttttacagactcttttgttcttcctatacatgggctatggatcctcgaagaagtactcttggaaaagagcaaagcgaggacatgcaatttgactgtacatatcgcagacgcagcccatcaagtcgatggcttgtaccccgtgagctccgcgagatcctttctccatggctcatgcccccgcacgtgcagcctcgccaggaagatcgctgacgccgccaccatggacggcaggtagcggtggaacccgtacgtcagcaacgacccgtcggcgaaccaatgcgccgcctccctcatcagcttctcttctttccccttgccgtagtaccttgtgaagtgctccacgaacgtgtacgccgtcgggccgccgaggttgtagtcgagcgcggcgaggatctcggtctccatgcacgacaccatcttgtgcctggtctcgctggtgtagccgcagcgagcggcgaccatgctggcgtcgatcttcctcagggtgtactggtcctcgtacttggccgccaagaacacggtcgttgctgagacgaggcgaggctgtagcggtccagaaagtaggcggcgcgctgaagcgtgccgtcggcaagctcgtgcaaccggttgaactcgtccatgaaggcgatcatcgaggcgcgcaccagtgcggtcatccgcccaccttgtgtcgtctccaagaagtacggggagggccgctccacggggttcgtctccatggcacggagggtggctcgatgtcgtcgtcgtagggcgcgcacagctgcggacgtgtcgtcgtcgctgagttgctggtgaccaccggctgatcggcgcgctcttgcagcagcgatgcgacctcgatcgtcttcttgggtgacaccgggtgatcgctgccttctggcagcgggcaaaggggcttcccttgggaaggggaaaccggcgccagagagcggtggaagatcaccgtagacagggaggaggctgccgtaggtgtgaggggtacggggcgagtccggtggcgccggtgcgagcggagctgccggtggcggtgcaagcggaggcagtgcgccgatggcgcggaggaaggtgtcggtatccaccatctgcggagtggcgccgccggagtaaggatggaacaatgggagagctgtttgatcagcaagaagttcggcgaggcaggaatgatccaagatcgcgtcctccatgtagggatccaagatcaaatcccccatggtctcgccggaagtgagatcgatggagagcgagaggaggcaagaggcggtggcggaagaaagttggacgctcgcgtggtggtgccggaagaaaggatggtgttgcgctctcgccttttatcctcctgccacgatccgactctgatcaggctgcgcactcgtgaaggaatccatccaattcaaaatccgcgcggttttccgaatcaggatcgaactaatgatgtttgattagaactaagcgggtgtgtttgaagttgtactagcttgcgccgtacgctcgtaaaaccgtaattaggcttctcccatctgtgtttctttccttaatttgtttgcatctccgactcgatctctgtcacgatgaaattattgtctagcttaattcaccgatcgatcatacgatattacatagactgacacacacggtcacgcgaaaaaaaaaaagagatttgctcccatccagcaggtaccatcggtactgtccggtacgaaatttgagccatccaatcagctcaatcggatgatggaaaatctgtggtacctccaggtacaaatttgcccatgaggtggtaccggaatatttggagtggtggaagggtaattttgtcttttcgcgtagaagtgtccaggggagggaaatagggttttctaccaaatctttgccattcgatccgtgagaggagtaagcggcgagcaaatctccccttcccatccgatccgatccgtgagaggagtaggcggcgtcggcgacttgcttcatcggcctggagttgatccgcgggaggcggcgggatctgtgggaggcggcggcgacttgcttcgtgggagatggcggcggcggcggcgagttgcttctgtcggcgcctacttgctttgtgggaggaggcggcgtcggctgatccgtagccggcggcggcggctgatccgttcgaggcggcggcgaggtgctccgtgggaggcaaggcggcggcgggggaggcgaggcgacggcggcggctgatctgtaggaggcggccggcggcgaagtgctccgtgggaggcggaggcggcggtggcatctaatccatttgaggcgcaggtgtcggcggcaccgggttgttcgtgccggcgaggttgtggcgggcgcagtgatgcctagcgcggcgaaggcctggtgctgcggtgctgctggtgacgggcgcgacggtggcctggtgacggccgcgttcacgaggtgacgacggcggctggtgcgtgacagccttggctgcgaggtggtggcgtgcgtgatggtgccgcccgcggtgacgaggtggtcgtcggaaccggcgttgtggcggcagcgggtttgggctttgcgcggctgcagtggcgaggtggtcgtgtagtcttcttagccggcgacgtggcagtgtatgcatcgatttttttcatctaatctaaatcattagcttctgttggttgcagcggtagatactttcattttctgggctgcatatgctcttcttcttcattgcttataggatttgtattgtacgatttattggatgttttaatgagctcagttgttgcttgttctatgtgaattttcaaatgttcaataccctcccctatcatttactgattacattgcaattcgagtgacttcaaaataaatcatggatagtaacaatgagtgactgcaaaatgataataggatagaagaaagaaattgttgatagcataacgagtggtacactgatgagttgcttgttttaatcatggatagttacaatgatgtctatatgaatcttagcctagagctagttgcctacatttgcctcggtcactaggcgtttaatatcttgctgcacttcaatcacttcgttcatagtagaattaatgaggttggctacaaccttatgtttgaaagtggtggttgtatcctgaaaagcaagttatgaaaaaatatcaattaatgtcattttatttacaaagagtactgaatgcaatttaaaattaccatttcattgaactcaggggagagttcttttccattccaatgctgtatgaatttcaatgtgtgcaagccacatgaccagctgttgcaagcatgttctttgtaagtggtaattcgttatagataatttgcgacaaaaattaactgtttgtttgacttgtcactttgctgagggactttcattgggcagaatggccaattggtaatcctggtgttcttccatttgttttcaacgccatcttctagccttgcatactggataaacttttcaattccttttatctgagttatcaaatagagtattacatatctaatgtaaaaagttagtaaggaatagtgatgaatctaaaggcacaatgtagcatactgtattattgaggtctttatctttgtcgtagtagctcttttccatgcgcatcgagtctagtatttgaattttttctttagcaccattgagaacagccacgtaccaatgagttgagtttctattgagtggtaggaaaatctacataggaaatgaaatgtaagtcatgcagttattattatgaaggatatttgagggaacattgatataacccatatcatgttgcaaatattttgctgtaacttttgctctcttgtctcgatattgcttgttgcgggttccaatttgttcaccatttgttttccaggcctggcaatgtgctgtactttctagaaatgcagtaccatgctctcttggactttcacttgcatgtctttaatcaacataatgtatgcatctatgacctgtgaaagaataaagaacaaaatttagatactgataatattacgttgtatggaagaagttaagtatttcttacactgcctttcaaccacttgcttatgatttgtgagtctttgggattgacaagtggcctaagaaattcatatgtaagttgtatgccatcaatacttgatagcaatttttcatcatcatcacattgcttcatgtaattgatggtaatctcatcctgcaagctcagttctgtagtttttggttccttacttctctttagagcacttgcaaatgttttttttgtagtataagaatggactgtctgatctgtgagttggcttgctaacccttccatgtggacgtctcagccttgcaccgattgtgtcaacctgataggatcaattatataattattactgcattgctaaataatttaatatgttgtcatggttgtaattttaattgaaataccatgtttttttcaaacaaactatcatcatcgctttcaatgatgtgtggagcttcagctatccctatatcaggaatgcatgtgattttgaatgcttgatgagaattctgaaatgttaattttggaagggattagagttgtaatagtgatatcatattacaagataagaaaatagcagcaccttatgatccatattctttccatcgttttgattatcagtttttggaatttcttttgtttgggatgagtgctgcaaaatattagtaatgcttaggtactctcatagtagtaatagaaatgtattgagatatgttaccaccttctggtccttttgatcactccacagaatggcatgtatttcacaggagttcgagtaaaaacagcacaatggtgctagtagacaaacaataaacaatgtatgctctgttcacagctgacagtaattaagacaaaagctccattcaacgatatacatgctttgttctccagcaaaagcttgtgcttttcacacaaattcattacaagaaccatgacagattgaattgttcattacaaaataactagaccacacaatataatcctctgaccaacaatacaacttcccaaacaaggcatattcaacttccaccagtgcaaagaaacacttcaaactccagattcaacttccaccagtgcaaagaaacacttcatacttctcatacatcttcttctactttgctgaaaataaaatcacagatcaaattagtaatatatagagagagtttacataaattgacatattcaaaataatcatattatatttcaccttaggaaaattggacatgttcgaacagtgtgcccatggccacgacaataaccacaacgcctaacacgcttctccatgaatcctcgtagtctttttgttggagctcctttaggcacaatttccataggatcatggaccttatcatgactctcaatgtctgtacgtaaactttgcgctagcacatgaccacataaagacaaatctgagttctttgtctcacattcatcagtttctaagtccaatttttctagcatctccatcaccattaaagtagtttccttagacaccgagcacttgaaaaacacttcggtgcccatgctacgcaacctgtgatatctctccatctggtttgaccatgtatatacttcgccatacctatcagaaggaaacatgtgtttcgctttaattgtccacctacgcactatgcatgcttcaggaatggcatcgagcttcaaatgatgcataattgcaaccatatgctcacatgggaggcattcacgatccatttttctgcatgtgcaatttatgctcttcattgttgattccacatatgtacaattcaagatttgtagcatctcagaatcacctttcatggaaataacatacttaacc

SEQ ID NO: 10902 - DNA, 2913 bp, Oryza sativa
ccatgttctgctcaatgtgccaagtgcacaaccaatgctcagaatccggcatcacagctgctattgctctacgcatggcattgtccccatctgtgatcagtgctttaggatgcttctgatacatgcaatctagaaactgcttaagaatccattcataagttgcaaccttctcatcagctacgatagcacatccaaaaataatagtggaaccatggtggttcacaccaacgaatgggataaaaggtaagttatacctattcacccggtatgtgctatcaaaaactacaacatccccaaatgcatcataatcgatacgggattgagggtccgaccaaaataaccgtttcaaacgaccagcttcatccgtctcatactcaaaaaagaactccatgtcatgtttttgcctccattgaaaatactttataacacgctctgcatcaccacctaaaatatgtttcttccttagcctagtaaaatagttgtacaggtccctactaacaaaacctgtagcatcaaaaccaccatgatgcctctccatgacatccataacttgatgctgacgcaaacccacttctttcaattccaaaatattagccttttgagcattgctaattgtgcgatgtgaccgtaagaaagctacttcatctgatttagccaacggatgattatgctttgctacatacttcacaacaaaccaatcacctttcttcttgtcaagtttaatctcaaaaagtgcattacaaccacatctagtaagagcttttggttctctacttctgttagccgcttccatatacacttctttcctatgtccttctctagagcattggtactgcctatgggttaccgcaacagtaataggatcacgtctaatgtaattcttccttacactaaaccctttttctttggcatacctgttatagaagaggaaaccttctttctctgtcttaaatctcatggcagtcattgttctgtactcctcttgttcttctaagcttataaaattgtctcccatttcatcacccatacaagttctctaaaaagaaaacacataatactcagaaatcatctaaaatcaacaaacaaactgctacctatctcttggttctaacaaaaaaaaaattagaccacaagaaaatcacatacctgagaggaaaccctaaaccggtagggggcatatgctgcttgagttgtccagggggataggggcaaaaaatacccacggcaccgtcgctccttgcgcagatggatgggcactggatgagataagaaatcggtaacggtgggggcgtgaatgaaaccgctggtgaaggagtgttggttccccccccgcggacggcagatgcggggccagcaagcgagcgcacaggcgggggcgtggatgcggggcgggcagatttggggcgagcctgcgcgcagctcaggccggcttcgcacgggcggagctgtgctcgccgaggggaggaaaaaaaagagattagatgagaaagcggcgccgcacggagggaggaaacgagaaagagcgaaaaggagaagagggggcgcgactactttctctgttttccaatcgtacccttctaacatggacggatggatttatctctgtacctcccagtaccagtacctaccggtacaagttgctggatgggagcaacgctcaaaaaaaaaattgcacgccgtcacgcaaaaatttgtccactagaatagtagattaagcatgggagatgatatatcgtactactatgtactcatgcacattgctagagaggttgcaaatacagtgagcatattcaggattacagagcagatacaaaacatggtgaagcatcgaattttgcagaattttcaacaaatggatgtagccagttttaagtgaaataacaaaaaaaattattacatgtaaaaaatcgtaaatataaaaaaatttctataacatctaaatttagtgtattgtaagtgagtgtaaatttttttagaatcacacagtacaacgcagacactcacaacgcatgtacgcacactcacccatgaacgcacgcacgcaaatcctccccctatgagcttgtgtatgtgagtgtaattaactgcattgttactacaagttagatatatagaagaacacaaattttgatgtaagatcctacaaattaaaaagtgaaagataggaactcaaaatcattcatgtatgaggacgcagtgtgtatcgtctttgcccctatcctccgatggcgctgctgcattttcctcctcctccgctaccgtcgcgcaccgcagtcgtttccgcctcccatgcaacatcaccgtcgccacctctgccatgcatgggcagatctagatgcggcacgatggctgaaatggtttctccgtagtggcgtcgtccggtggcgtggccacggcgttgtacgagctctgcaagctctagctaccggagaacatgcgtcagagatcgtgagtgccagccagggtggcgcccgcgctgatcacctacttcgccgatgccgactctgcccgcgccgcggaggtgctcgtcgtcttcgccaagtccagcgagagccgccacgagctctccagtatccctagcatcgtggtcgtgctcgccgcagacaacatcgccagcagtggcaatgcccgtgcaatcaagcgtgcgctcgtcgtcttcaattggatttgtgccaagagcaacgaattggcatgggaggcaataaaccatgagaaaattcgatccatagcacaagaaaaaacccgatatcaaaaaatagcacaacaaatttttcacttcgaccataagcacagggcaccaattttcttgcgatccatagcactcccgttacatttgtcatccaaacatgtgagttgacatgaaaaaaagacttatttgcccttcttctccaagcaagagggcaatggagctta

SEQ ID NO: 10903 - DNA, 3417 bp, Oryza sativa
tacagttgggcagaaacccaacggtcgcaaatcacgcacatcggcaatggtaactcgactgtcaataatgagcggcctcttcaagactgccacattactcgagtagcacacgaatcgggacgagccggttcgttttgcctggagatatggtgatggcacttcggtcggcgagtgcaattaacgcgcgcacgatatgttccatctcgactgccacagccgcatattcacctcatgcgccgcaagcgggcgaatgggattagtggaagcgtgggcgcgagaaacgagggagcgagatagtgggcgcgagaagcgaggagccgggcacagcgttggcaagggtataaagacaccgaggaagagatttgcttccttcctctcgccattattccccttgtcttcgccgcttgtgccctaactccttgtttcctgtgccctaccctcgccacacgcgctcgctctcaaacatctcttcttccggcgtcatggcacggggctctgctccactcgatggtagcgtgctgccgctttcccgcatcgtgagcgagaggcaggccgggctgccgcgccgcttcctgccggaatctgccaccggccaggagatagttacgctgggcgagggacgcccggcgccacgctacccggggcggaccgttttcttcctccctttcgcaatggcagggctggttccgctattttcttctttcttcatggatgttctggagttttacgatctccagatggcgcacctcacccccaacgcggtaatgacattggccatcttcgcgcacttgtgcgagatgttcatcggggtgcgcccatcccttcggttgttccggtggttcttcaccgtacagccggtgtcgccgccgtcggtggttggtggctgctacttccagccgcgggggccggtgctgaaccgctagattccctgcgtcctccgcaagaagtgggatgactggaagagcgactggttctacacccccctcgccgacgaagcgcgcctccgacttccgaaccagcccccggcgcaggcctccagctggcgggcgccggtagatctgggagatggctacgacgccgtcctcgaccgcctggcgggcctgcgatcccaggggctcacaggggccatggtgtacggcgactaccttcgtcgccggatcgcaccactccagcggcgcgcccggggtgcctgggagtacaccgggtccgaggactgtatgaggacccaccggggggtcaaatgggactgggtccctgaagacttcaaggtaatgatccaacgggtgctgaatctcagctccgcggaggcatcgctcatcccccaaggagtcctccccctctgcagcgatccagatcgcgccaccatcctgaccatcatgaaggcggtcggggcctcagaggagcaggctcctcgaggccatgatggcgcgggcgggagctgcaggggagaacaatctaccccaggagggggtcgtgcttccgggctccgtgacgggggctcggggggctgccgccctgccgacgcccgagggaagaggaagcaagagggttcctcctccccatctcctccccgagggggcggggcggcgcgtgtcagcagcaggcgcccggagggggccgcgccgacgccgcagcccgagggggagcggaagaagatacggcttcgcaagatgggggggacagaaccatcccggggaaaccttatttcccctccaaggtagtcgtttaaccgaccccctcgcaggttcgtcccacgcccattgtggctgtattcattctcccaacgcgagttttcactcacccatcttgtttgtcttcgggtctttcttctgtttcagcgagatctcgtcgcgtccctcccgccattccaagtccggccagtctgaggccgaggatacggcgaccgcggaggcccggaggcgagaatctgaccggcgagaagccgcggatcgcctacgggaagccgaggaggccgcccgggaggccgtccgggctcgccaggctgaagaagccgcttgggaggaagccagacttcgccaagccgaggcggcgacaacttccgaggcagctcgcgacgaggccgcgggcacatcgcttgggcccactccctcgggcaacactcaggacaagccaggtccgggggacgtccccgagcccggcacgtccatcggcgggccgggccgcgcggcatcctcaccgaggcggctctcccccacgccttccgttgccccattgagcgcagagccccttctgcaggccttggccgtcgcaaacaccacggtgttggacgggttaagtgcccagatggaggccctgcaagcagagcgggcggagctcgacgccgcatgggcgcgcgtcgaagaggggcgacactcggtggaggccatggtggaggtgagccgcaaggcacaccgccggcatgcctcagagctcgaagcccgtcggaaggtgctggaggagatcgccagggaggtggaggaggagcggggggctgccctcatcgccactaccgtgatgaacgaggcgcaggacgacctccgccttcaatacgggagctgggaggcggagctagggaagaagctcgacgccgcccagggggtccttgacgctgccgctgcccgagaacggcgggcggcggagaccgaggtggcatcccggcggcgcgaagaagcccttgaggcccgtgccatggcgctggaagagcgtgcctgcgtcgtggagagggacctggcggaccgcgaggccgccgttgccattcgggaggtcacactggcggcgcacgaagccgcctgtgccgaagaagagtccgcactccgcctccgcgaggatgcgctcaccgagcgggagcgagccctcgaggaggccgaggccgcagcgcaaaggctggcggagagcgcgtccctccgcgaagctgcgcaagaggaacaagcgcgtcgcaatctggaaggtgcccgcgccgagagggccgcactgaaccaacgggccgctgaactcgaggcgcaggcaagggagctggatgcaaggcgcgtagcggtggggcggccacgggcgacagcgacttagccgcccgcctcgcagctgccgaacacaccatcgcggatctgcagggcgcgctgaattcgtccaccggggaggtcgaggcccttcgtctggcaggcgagatagggcccagcatgcttcgcgacgccgtgtcccgtttagaccgcgccgggcggcaggcgggtctctggggcgggcggactgcgaagtacgccgccaaccaggggggcctcgcccagcgcctctcggagatggccgggactctccaacggctccccgaggagctcgagaggacgattaagtcatcctcgagggacctcgcccgaggagcggtggagctcgtactggcgagttaccaggccagggaccccgacttct

SEQ ID NO: 10904 - DNA, 1162 bp, Oryza sativa
aaagtgcgacggtgcgggctcattccgacggggagagtgagcggcgagtggcggaaacggaggagcggagctcggggattgattttatagcgacgggagagagagagggcggccggagagaaaggaaaccggccgcggagttctcgggctccattgaagacgccggcgacgattgcgggattcaaatcggacgaatccgagggagagagagagggaaaagagggggaatcgggagagggaatcacggggagtaattcgcccctctttatggcgcgcggggaaggcgggatgcggcggaatcggcggcggcggcggcgctagggcacgggcggcggcgggcgcggcgcggggttggggatgacaggtgggccccacccgtcagcgagggtggcgggcgggcccgcctgtcagcggcgcgcgctcggggaggagccgatgggccggaggggaggagagagagagagggagggagagaagtgggccgagccggcccaagaaggaaaaggggggggaaagaagacttttagggatttttctttttataaaccttttcaactttgtttatttcttttcaattattatttgtgctctgaaaattccactaaaatttatttacgcattttaggcttttaggaaatatacaaaaatcctccaagcctcatttgacttttatctttgcacattttaattgttggaggctttcacatgaattttaattattctttgcacaatttcgaggatgtattttagagtcgatttgggacgtgacaaacctaccccccttaaacggaatctcgaccccgagattcggaagaactggcgaagagatcgggatgggctgccttcagctcgtcttcacgctcccaagtagctttttcttcggcgtgattgctccactggaccttgcaaaaacggattacccggttcctggtcctgcgctccatggtgtccaggattttcactggcctctccacgtaggtcaaatcttcgcgaacttcaatttgctctgagtcggcctgctcggatggcactcgaaggcatttcttgagttgcgacacatggaacacatcatgcacgttgcccaaggaggcgggcagctccaactggtaagcgacttctccgcgtcgagcaatgatacggaaaggacccacataccgaggtg

SEQ ID NO: 10905 - DNA, 795 bp, Oryza sativa
ttgaacgagcgcgtcactccgcatgtaacgcagtgcagcgcgctcgtttatccggtctgtgaccggtcacagaccggtcagatcgtgggttaggtggcaacaggcggtatgacacacgcctcgccccatcccgtcaggataagagcctccaggcacttgtccctagccggagccagcgtgctagctcctggagatgacacgttggtcccggtcagatatatgccaggcttcatcccaaccgttacaagcaagacattgtatgaagaagggtgaacatgcagattgataaactgacgcgtggtggacaagaatgaccgatttgtgaccggtctgacactggtcatgtcgtcggcagacagccatgttcccacgtcgcacctgcttccggcgaaagtagaggtaggtatgggccgtcccatcagaaggtcattcggacggcaaccattacaaatctccgcccatttatgaaggaaaggcgagccaagttttagtgaaaagaggatgggtccccaccaaaaagagaaataggtagaagtggtgcatgtggtatccccttgagatataaaaggaggaccttgcccacttagggaggggatccggaccagaggaccaggggaggagagattggagactcccggaggatccaggagaagatcccacgagaggcaaaaaggaggaaaggggtttctagagtttgagctctctggttctccagctctttgtagcttcttcgtacacagatctaccagaacacaggagtagggtattacgcttctcagcggcccgaacctgtat

SEQ ID NO: 10906 - DNA, 4904 bp, Oryza sativa
gagaacgaggatgatctgtgccatggttcttttgtgtcttagctcgaacaagggctcgtgcccaggtcccagtcctcaaatggctcgggtcggggctagtgcctggggagatccacgtgtcgagactggccaggccgggagcgtggtgaccgagggttatgggtgacccggttgtgggtttttgccgatcccccccggagttaaccacgccccggggcacggctcggttctgggccccttttggcgattttagccgactcgagcccccgagggcaggatcgagcacgagtgacctatttcaagtcaagattcttcaaaaggaaacaacagcacagacacagcctttaggaaatcgaaaatgcttttattgaaatacagatagaagagaaataagaatatgcatgtgtggtagcccccggccaaccctgcacgcccgaggggggtacggggttggcccgagcccgaaacctgacacccgaaccctattaggggtagaagcgacgaaggtgttcgatgttccacgggttaggcagctctgtgccgtcgcccgcggccagccgaacggagcccggccgggggacgctgatcactcgatacggaccctcccacattggtgagagcttgctcaatccagcacgcgtttggacgcggcgtaggacgaggtcgttgacgcagagtgatcgggcccggatgcggcgctgatggtagcgccgtaggctctgctggtagcgcgcggctcggagggccgcgcgccgccttcgctcctccaagtagtcgaggtcatctctgcgaagctgatcttgatcagcctcgcagtacatggtggcccgaggggacctcagggtgagctcggatgggagaaccgcttccgcgccgtagacgaggaagaaaggcgtttccccggttgctcggcttggtgtggttcggttcgcccagagcaccgctggcaactcctcgatccacgaatcgccgtgcttcttgaggatgttgaaggtcttggttttaaggcctctgaggatttccgcattggcgcgctccacttggccattgcttctggggtgggcgggggaggcgaagcagagcttgatgcccatgtcttcgcagtgatcgccgaaaagttcactagtgaattgggtgccattatccgtaataatacggttaggcaccccaaaccgggctgtaatgcccttaatgaacttaagtgcggagtgcttatcgatcttgacgaccggataagcctcgggccacttagtgaacttgtcgatcgcgacatacagatactcaaacccgcccggggcctgcctaaacggtcccaggatatcgagcccccagacagcaaatggccatgaaagtggtatgatctgcagggcctgggccggctgatggatttgcttggcgtggaattgacacgctctgcatcgccggaccaggtcgaccgcatcattgagagctgtcggccaatagaaaccttgacgaaaggctttgccaaccaaggtgcgcgaggcggagtgggctccgcattcgccttcatggatatcggcaagaagctcgacgccttgttcccgaggaatgcacttcaggaggattccgttagccgcgcgccgatagagggtcccttctaccagcacgtagcgtttggagatgcgctggacgcgttcactcccttcgcggtcctcgggtagagtcttatctgtgaggtatgcttggatctcagcgatccaagcaatcaatctaagggagctgggagcactcccctcgggtcccgaggcctggactccgacgggcctcgggggccggtcaggcgcgtccgtctcccctaaggggtcgggtcgcgccgacggctgggcaagcctttcttcaaaggcgcccggtggggtctgggctcgcgaggaagcgagccgtgagagttcgtcggcaatcgtgttatcccgtctgggcacgtgccgaagctctatcccgtcgaaatggcgctccatacgccgtacttggcgtacgtaagcatccatctgcgggtcagagcaccggtactccatacagacctggttaacaccaggaggcggcggatccccagtccagctgccaccctaagtcccgcaaggagtccctcgtactctgccatattattggtcgcccgaaaatcgaggcgaaccaggtatctgaggatttctccgctcggcgaggtcaacgtgacccccgcaccggcgccctgaagagacagggagccgtcaaattgcatcacctagcgggcggtgtgaggcagctgcgaggggcccgagctggcctcggggagtgagacgggttcgggagccggggtccactctgccacaaaatcggcgagagcctggctcttgatagcgtgacgtggttcaaagtgcaaatcgaactcagaaagttcaattgcccatttcaccacccgtcctgtaccctctcgattatgcaagatttggccgagggggtaagacgtaaccaccgtgacccgatgcgcctggaaataatggcgcagtttcctcgaagccatcagaatagcataaagcatcttctgggcctgagggtatcgggtcttggcgtcccggagggcctcactaacaaagtagacgggccgctgcacctttcggtggggccgatcctcttcgccaggggccgcatccctggggcgctcttcgtccaagcggcctcgcggggcgcactcgtcttctgtgccgacgacctcggggtcggaggacgacaggcgcggccttcccacagtggcctcggtgccgtcctgggggtcgggggctcctggcatcgtcggacaagcgggcaaagggccaactccggtcgtcgggggccttaggccaccgttcggctcgggggcctcttctccctgctctctcccgggtcgagtcggcacagggttaacctcggggtcagagggcgataggtgcggccttcccgcagtggcccccgggccatcctgggggtcgggggcacctggcaccgtctgacaagcgggcagagggccagctccggtcgtcgggggccttgggccaccgttcggctcgggggcctctcctccctgctctctcccgggccaagccagcacagggtggggatgcgcggaatgaggattgtcctcatcgcgctccacaaccaacgccgcactaactacttgcggggtcgccgctaagtagagtagcaagggttcatctggctccggggcgatcaaaactgggggagagctgagatacgccttcaactgagtgagggcacgttcagcttcctccgtccaagtgaacggcccggagcgtttgaggagcttaaataagggtagcgccttctctcccagcctcgatatgaaccgacttagggcggccatgcaaccggtgacgcattgcacatccctaagcttgctgggggcgcatccgctctatagctcgtatcttctcggggttggcctcgatgcctcgggcagagaccaagaacccgagaagcttgcccgcaggtacaccgaacacgcacttatcagggttcagctttatgcgggcggagcggagactctcgaaagtttccgccagatctgaaagtaaagtttcttggtcgcgcgtcttcacaaccaagtcatcgacataagcctcaacattacgtcctatttggctacccaaagaaattcgagtagtacgttgaaaagtaggacctgcattctttaacccgaagggcattgtcgtataacaataagttcctatgggggtaatgaatgtagttttttcctcatcctccctagccatgcgaatctgatggtaaccagagtatgcatctagaaaacacaaaaggtcgcaccccgctgtggagtcgacaatctgatctatgcgaggcagggggtaagggtccttaggacatgccttgttaaggtcggtgtagtcgatgcacatccgaagtttgccattcgccttgggaacgaccaccgggttcgccagccactccggatggatgacctcgcggatgaatccggcctccagaagtcgcgccacctcctcgcggatgaaggcttgacgttccggggcctgccgccgcactttctgccggatcggccttgcgcccggccgtacggcgagacggtgctcaatcacctccctggggaccccgggcatatccgccggtctccatgcgaagacgtcagcgtttgcccgcaggaaggagacgagcgcgtcttcctatttgccatccagaagaccaccgattcgtgtagtcttggacgggccgtcacccagggcaacctccttgaccgggacctcgtcgcatgtgatcatcctctgcctcggggcggcgggaacggaggtgccaagcctctcgtcgccaccctcgggcttggacgcagcggcgaggtgatccgcgcgctgctccatacaagcaagcgcgactttgaggtcgccatggacagagatggggccaccggggcccggcatcttcatctgaaggtaagcgtaatggaccgccgccatgaacttcaccaacgcgggcctccctaggaccgcgttgtagggcagacttaggtccgccacatcgaagtttacccgctccgtgcggaagttgacggatccaccgaaggtgaccggtaggtcgatatgacctaacggccatgtgtgccccggcgtcacaccgataatcggctgggacggccagagcaccatccccggggccttgatggcgtcaaaggccacgggggaaaggatgttgagggctgcccccccccccccccccgtctatgaggacacgccccaacttcacgttgcaaacggtgggggaaaccaccatcgcgatctgtcctccccgggcaacacacggtgggtggtcggtctggtcgaaggtgagggcaacctccgaccaccgcgcccgacgcgtcgcctcatgagtgggggccgcggcca

SEQ ID NO: 10907 - DNA, 588 bp, Oryza sativa
gcctgcctccgtcgccgccgactggtgtccccgcctatacggtcggttggtcacaccaccgttcatgggcgtccacgacttcaccgccggcctgcctccgtcgccgcagactggtgcctccgcctacacggctggcctattatgccgccgctgttgggcgtctacgacttcaccgccggcctgcctccgtcgccgccgactggtgtcctcgcctatacggttggttggtcacaccaccgttcatgggcgtctacgacttcaccgccggctcgcctccgttgccgccgagtggtgcctccgcctacacggctggtctattatgccgccgctgttgggcgtccacgacttcaccgccggcctgcctccgttgccgccgagtggtgcctccgcctacacggctggcctattatgccgccgctgttgggcgtctacgacttcaccgccggcctgcctccgtcgccgccgactggtgtcctggcctatacggttggttggcacaccaccgttcatgggcgtctacgacttcaccgccggctcgcctccgttgccgccgagtggtgcctccgcctacacggctggtctattatg

SEQ ID NO: 10908 - DNA, 617 bp, Oryza sativa
gggcgctccccggcccacccgaaagggaaggcctgcgagcgacaaaaagaaagaggctggtactcccaccagggagcgcccagccggcaagtggtgctccgtccacaacacctccctccacgatctcgcggactgtcgcgcggtcaaaaacttggctgagcgaacgaggaagtgggaggagtacaggaggaaggaacgccgtgagggcaagtcgccggcaactccctccggtaaacggcgaagtgaggccaaacaaaaggcccccgctgttgacatcgatgacggtgatgatgacctaggtttccaagaacctggggccaccattgccactgtcgatgggggagcgtgtgctcatgtctctcgcgggagcctcaaggccatgaagcgagagcttctggccgcggcccctactcatgagacaacgccccgggcccggtggtcggaggttgccctccctttcgaccagaccgaccacccaccgtgtgtcgcccggggagggcagattgtgatggtggtttccccccccatctgcaacgtgaagttggggcgtgtcctcatagatgggggagcggccctcaacatcatttcccccgaggcttttgatgccatcaaggccc

SEQ ID NO: 10909 - DNA, 997 bp, Oryza sativa
  unsure (1)..(997): unsure at all n locations
gtgggnattgannattcgannatcgactaacacatggtacagnagctcatcagaggcgagccggcggtgaagtcgtagacgcccatgaacggtggtgtgaccaaccaaccgtataggccaggacaccagtcggcggcgacggaggcaggccggcggtgaagtcgtagacgcccaacagcggcggcataataggccagccgtgtaggcggaggcaccactcggcggcaacggaggcaggccggcggtgaagtcgtggacgcccaacagcggcggcataatagaccagccgtgtaggcggaggcaccactcggcggcaacggaggcgagccggcggtgaagtcgtagacgcccatgaacggtggtgtgaccaaccaaccgtataggcgaggacaccagtcggcggcgacggaggcaggccggcggtgaagtcgtagacgcccaacagcggcggcataataggccagccgtgtaggcggaggcaccagtctgcggcgacggaggcaggccggcggtgaagtcgtggacgcccatgaacggtggtgtgaccaaccgaccgtataggcggggacaccagtcggcggcgacggaggcaggccggcggtgaagtcgtagacgcccaacagcggcggcataataggccagccgtgtaggcggaggcaccagtctgcggcgacagaggcaggccggcggtgaagtcgtggacgcccatgaacggtggtgtgaccaaccgaccgtataggcggggacaccaatctgcggcgacggaggcaagccggcggtgtatatgacgatgcccatcaacggtggtgtgaccaaccgaccgtatatgcgaagacaccagtcngtcggcgacggaagcaggcccgcggtgtatattaccatgccatcaaccgggtgtgaccaacgaacgtattggcgggacacaattggggtgacagagcagaccgcggggttattaccatcccatcaccgtgtggccaccggaaattttgttctt

SEQ ID NO: 10910 - DNA, 2704 bp, Oryza sativa
agcatgcggttgtgccgcacacccccctgaacgcgtagatcaccgcgtgtgcagggatgcatggtatggtgttgcggacttgacagaccgctgaatgtatgagcgaagtgactcatcatcccttcgctgtactgcgtgtaagtccgcttcttcacctgggcgcggatatgtgccttgaaagttcatggtaaactgttggcacaaatcctcccaagagtggaccgacgcgggtggcaagttcattagccaaccccgcgcctgtctcttcagggccatgggaaagaaattcgccatgaccctgtcatcacccccggcggcctcgatcccggtcgtgtagacctggagaaactcggcggggttgacgctcccgtcatatttttcggcgatggtgggccggaaccttgggggccaacggacgttccgaaggctcgctacaaaggctctacagccgacaccaccaaccgggggcacggagggctgatccccgcgtccgtgttgaggtgacactccggacgaggaggcaccctccgttgcgtgggtagcacgtcgaccattacgccggcgctcgataccgatgcgggcatctggccctccacgctgatcttcccgggtcagaggtgctgacgagggagtggcagccgaacggcgagcaacagccgccgctcgccgcgccctccgccttgacgacacggagccggtggtagcagcgccagaggtcttggtggctgtcacgaccggaaataacccaacgggcattccttacgtgcgtgcatgaatccttgtcccaggaggcaaggtacaccaaaagttgatacaaatcagagtttaacaagcggaagcgtaaatagttaacttattacatgggcagcgaaggcccagcacacacagagacaaacgagaaacagcggaagactagggcgacgaccacaggcgcttgacggcaggcacgagctagacaccaaagccttcatcttcaaggagctcctcttctgggcttgggaaaaattgagcaagactgagtacaaccaccgtactcaacaagacacacccacaaatgcagaataaatgcaagggagtacaagggaattataatataaagggttagggttgcagtaaacagcatttaaagacatttagttgctcagggctattttgtaaacacgatcttagaactatacaatattattaatcaaggccgtgaacccacacgaacctgccttaacccaaggcctatgatgattcagaccgaactggcaacccgaccctgggtcccagctcgtcccaagtcaacccaggccaaccattccatattttagttgttaagcaagttttaagaattaaaacactaacttgggtacattgctcggcttgcccataaccgagggctcggctattcgaatagattatactctgatcagaggtgtacatctttacccacaagacacatcttcctcacgtgtaaccacgtgccacataccaccacggtatacggacggaagacgtgacatagtttccaacccatcctagccttagacaagagtaccgacccaatcccgcctacggccggaacccccgggacaggcaggcaggactgagcccctagcagcagggcaccaaccctctgccatatgacatctcgactaccgggccgcagctcgtgtagccttcatttgccctggagaatgtccatcgacccccgacttcatccatctccaatccgtgtacttttgtttatgactagactgagccacaaactaagccttacccactagacatgtggaagtacggtagtgctttgcaacagaggcccgaagaccggtccttatatggccgaggtgctaccatcaaaaccatgcaccccgagcccagcctaaaaccattttaggggattttgaatagagggggcggtgtgaagccaattccacaataatccaacaattccatagtgtccaggtgatatgaatatttcccaagtctaaagttataaaaccacctaatgttacctaattaaattgcgaagcatctacctaaatttaaactagggataccacgagtagagtgtccactagttgaggttttgtttactctagggtgaacaaggtaataataataacaataacaataataatatggtcataacaaaggtaaataggcatggctaaataaaacagtgataacgcgggaatttaaataaagcgataatgcaataatttaaatcaacataattttacaaactgggattcaatatgttcaaagatgatatgacttgccttgctcgctttcccaaccgatggcttcgacttccacgaagagcggatcttccgaagctgcagcgtctacacgaccaacggaaaagaaaaggcttttacactactaaactccacataacagcagaaacaaagcacaaaaatgggttcttgacttcttaaggaaaaattagagacttgaacggtccaattccgagttcaaatggccaagatatggccatttgaagtttatatgctctttaaatggatatttacgaatttcttcatttaaattttaattaaaaatctcatttattgcgtcagccgagggagagggcgcgcggaccgggtccacgggagtggggcccacgcgtcagcctctcggtccacggtggaccgggagcacgcggctggcggcggtcggcgccgtgggtcccacgcgtcagccgcacccgcgg

SEQ ID NO: 10911 - DNA, 533 bp, Oryza sativa
tttttttttcatgtatcaaggattgctgacgctgaagagaatttgggtgggattgaagtgcgtgaggcccatctagctgaatccttgtacttcataagtgtcaggcagaaggtataaatctgtatttttctatactttaccctgtggtctggttgacatagtacatgctcgaaatttagctacttcagggacaggggacctcctgtcctgttgcaggtccttggagggaagtcttagaatcaggacacttctgaattgttcacactggtatgaaagaggaggttccatctagatcatgtcaagttaaatacttaaatcaggaaaatctcgtaaatggggtcttggaaaagctaaagatttgcagtcggagtggtcaaaaaatagatttcctttgtatgcttttggtttatgctgctgcttttatgctcccactcatgcaatgatatgataaaagatcacatggtaatatggtatcgatttgctcagtcgctactttgttgtcctaggtaaattgtatgcatgcttggcgtctg

SEQ ID NO: 10912 - DNA, 584 bp, Oryza sativa
  unsure (1)..(584): unsure at all n locations
ccacgcgtgactgaatatcgtatnccnnnnnnnnnnnnnnnnnnnnnnnnnnnnnnnnnnnnnnnnnnnnnnnnnnnnnctcgtaaatggggtcttggaaaagctaaagatttgcagtcggagtggtcaaaaaatagatttcctttgtatgcttttggtttatgctgctgcttttatgctcccactcatgcaatgatatgataaaagatcacatggtaatatggtatcgatttgctcagtcgctactttgttgtcctaggtaaattgtatgcatgcttggcgtctgtatgaagtgcatgacaatgcatcgggaagcatcagctgttgccacagctattcttgatacaataagatctgggtactccaagcctaaacagacatttcctgtgttaaggaactttattagttaggtacaattttgacattaacttttgtttcaacagagctgtttcacaacatcttgaagcatatgtcagagggtctatgtgttgtttgcaacttcttgcaaattgatagcgctgcacctgatgtatgtctcatcagttcttatagaaagaaatcaggacattccaactggtttggaa

SEQ ID NO: 10913 - DNA, 736 bp, Oryza sativa
  unsure (1)..(736): unsure at all n locations
ccaaccatttatatataaaagcatgataatgcaggtaaagaacccccatggtatgtagcacaactacgacatagtagcttgttccaagggcacacggactataggatgcagataaagagcattcttcctacccacagtgatgcccatctcatctgtcatgtctagttcgttcggtgcaactcctttagggagctcccagtcgaagtggtacagaagcattgcaagcatgagctccacggtagcatgtccgaatgtcatgccagggcaaatcctcctacccgcaccaaacggtatatactcgaaatttgcacctttaaagtcgatctttccactgtgaaaccgttccggcttgaacacctcaggctcatcccagtgcgtagggtctctgttaatcgcccatacgttaacgaacacggtgggttcaaattttgaatttcaattatggctgataagctactagaggctggagcgatgtagaatgcgaactggatgggagggtgaaaatgatgagcggggattgcgatttttttacttactttttttaacttaaaatcaataatatgtggaaccgctattcagaaaggtcatatgttagtgatcacgttaaaagaaaaagtaaataatactaaaaacgtttcacaatgtaagtcattatagcatttctctcacatttatatnnnnnnnnnnnnnnnnnnnnnnnnnnnnnngtgcnttgtgcacgcacactgaagacatt

SEQ ID NO: 10914 - DNA, 680 bp, Oryza sativa
ataaatggaaaccgaacagacatggaggaaaaatagaaaaattaaattgaaagctgaaccgacgtgaggtgcatgaaggaagattgtccgtggcgtgtccatgcatataagggtaaatgtaatgattattggaaagttagcattgtgaccgagcacaagtgctacttacaaggggtggagaagtatcatcgaaacatcacttcagcttttgtggcaagtgagatgtacagcatcgttgttggtaacattggctttgaaccaaaatcaattattaggcacatcgagaacaaattcaagtacaccataagctatgcaaaggcctggagagccaaacaaaagattattgagatgaggtatggcacattcgaagcttcttatgataatttgcctggtttgttagccaccattgcccagaggaataataatacttactatgacctacatacatttacatcggttgatgatcgaacaaagagtgtgctgcaaagagcctttctctcattggatgcttgcatcaatgcttttgtgcattgtcgacctgatctatgcatagatggaacttttatgacaggtaaataccgaggtcagatattgacagcaattgggtgtgatgggaacaaccaaggtctacctatggcttttgcatttgtagagagtgaggccactgaaagctggtcttg

SEQ ID NO: 10915 - DNA, 893 bp, Oryza sativa
  unsure (1)..(893): unsure at all n locations
cggttcccnanggtaggacnnnnnnnnnnnnnnnnnnnnnnnnnnnnnnnnnnnnnnnnnnnnnccgaacgagcagctcagagcgttttgatatcatgctgctaatcgccctgatgcttcaactaacatgttggcttgcgggcgttcatgctcagaaacaagggtgggacaagcacttccaggctaacacagtcagaaattgaaacgtactctcaacagttcgcttaggcatggaagttttgcggcattctggctacacaataacaagggaagacttactcgtggctgcaaccctactagctcaaaatttattcacacatggttacgctttggggaaattatgaggggatctctcagagcttgtcggctcaggcggggcacgctaagcgcgtgcggatcggatcagagatcaggaaaaagacaaaaaaataaaagaaaaagaaaaaaaagggacttcccgcatacgcggagaaaaaaccttttcgcgtgaaaataaagggtgacaaaaaaataaactgcactgaccaagaaaaccgcacgattggcggctgaggcggggcgtgctatgcgcatgcaaataagagcagagaacggaaaaaaaagacaaaaaaaaaaggacttaccctgcgcgggaaaaatcccgttccgcgtgaagaaaaatcggcgacaaaaataatagccggacgaaccaagctaaaaccggatactctttttttttattcgatcatcataggcaaaagccgaggtaggtaaagtagactattccttccccttaagttgacaaaaaaaaaataagtttggccagctttctacagcccaattagatttgccacataaggggggtccacttctcaatctngnnggttgaagcgntgcgtcattccnngcagcgc

SEQ ID NO: 10916 - DNA, 5712 bp, Oryza sativa
aaaataataaatagaaattagagggagattagggaagttagaaaatttaaaataattagaatttaattatagatcaattatagtcgtagaattgcaaaatttaatataattatagattattttggtaatctctataggtgctcaattcacggtagatactcggattttattaataggaattttagacgtatattatatttaatcgtttagtcatagactaaattaaatcgtataatattataagataattttaggattccgtccaatatttagctcgcgatagaaatttctaacctattatatggatataatgctcgggtagattaaattaaaaacttatgataacaaaatatttatacccgcaaaaatagtttaggatgtataaatcaaaattgggttagccctagttcgcgaatagtaaagttaatataaaagaatcgacttccgcattcgacttctatttggatttatttggatttttatttgaattctaaccgaattcaaatcaattttcgcacgtaactatagagcccgagggagttgcggatccaagtgaagtccaagacccgcaagactttgagcaaggcaggtcatcactatcccttgaacatgttgatcccaattgcgaaattatttttatttacaaataagaatgcatgcaatgatgaacatcctatttatgaatatgccataccttgattattgtttacccttattcccttgtaaccatgattacgtatgagtgcctagtcggtcgaaggggaggcgaggccgagggcgaccttgccgctgcgatgccggaggagacggcgacgtcggccggcgcatgggcacggcggaaggggttgccgaaggaactccggcgaggcggagggcgagaccgagggcaggccggggtggagggcgacgcggcgacgtcgagggaggagatggtgacgtcagtcggtgtaccggtgatgaacagcagccggccggagacggaacagtggcggcaacgccactgttgccggcggggatgcacttccggaggtctccgcgggaaacagagggcaggccggcgaagaggaggcggctgcgatgctggaggaggcgacggcacggccggacggcgctcgggcgaggagggagaggcggctggaggcggccggcgcggggaaaagagaagggcgacagcggggaggggtgatacgaccacggggaggctcgggatgaggctaaaacgatagaacggaggatggggattccattttataggcgcggggagggagccgggcatgggagagggcggaacggcgacgggaaacatggccggcggccatggaacgcggccgggaatggcgcgggcgttcccgatgattgggggcacgaatcaagggggaaattagggggaattgatgaggaaggaatggggattaattccccccaatcagtttggaaagaagggcattgattcgcgtggatttagggaggaaacgacgctaggtttcacgggagagagaggatgccgggcgggaggaaggagacgaccgggtgggtgggacccaccggtcgggcgcgcagtcagcgcgcgtgcggcgcgcgtgcacccggctggctcggctcggcctggattggcccgggcggctgggccaaaagggaagaaggagggagggcggcccaaaagaagaagaaaagaagggaagtggcccgggagggaaaggggaggcccaagaggagggagagaaggagagggagagaaagagagggaggaagggaggactttggccgtaggccgagaaagagagagaggactttgggccagacttggcccaaaggaggaaggaggattattttttggtttttctttttaataaactttgatcatagttgtggttgcttaataaatatttccggtgctctaaaaattcaagtaaaatttgagggctctttgtagactaaggagaatttaacaaaaattctctggactacattcgaaattttcttgtacgcatttaaatgtttgccaatttcttttcaaattttaattaattctattattccttttagaaaatgatttttatttcgggatgaatttatcaagacgtgacaaccccagtgggacttagaaagcctatgatagtacactcacctgggggcgagataactgtgagtcatgcttgcataaacatacctattcgtcttagggatgtggtgtttccctccaaccttatggtattgataccccagaccctggatgtcatattgggtatggattggttaacaaagaacagaggggtaatcgactgtagacgtagggaagttaccctgaccacaccctagggatcggatatgagagcaaccatggatcaagatcctagactaaccgaacgtgccggaggcatatttaccatgctacccctaaaaggaatgcctgtagtgcaacgatttcctgatgtgtttccagaagatttacctaggatgccactagatcgtgacatagagttcattgttgatctgatacccggaactgctcccatatccaagagaccttatcggatgccagtcaatgagttggaggaacttaaaaagcaaatcagagagttgcaagaaaagggatttgtacgtcccagttcgtcaccttggggagccccagtgctattcgtcaagaagaaagatggtagcatgaggatgtctgtagactactgttcactgaacgaagtaactatcaagaacaagtatccactaccacggattgatgatctttttgatctactcaaaggagctaaggtgttctctaagattgaccttcgatcaggataccaccaattgaaaattaggaccggggatatactcaaaaccgcgttctcaacacactatggattgtatgagttcaccgtaatgtcgtttggtttaaccaacgccccggcatactttatgaatctcatgaacaaagtgttcatggattacttggacaaatttgtggtagtattcatcgatgatattttaatctactccaaagacgaggaagagcatgcgaaacacttgcgattggtactcgagaaacttcggaagcataagttatatgcaaaattcagcaagtgtgagttctggttaaaagaagtcgcctttctaggccacataatctcagccggtggagtagtagtggatcctgctaaagtggaggctattacggaatggaaagcacccaaatctgtgactgaaattcggagttttctaggcttggccggatactaccgaagatttattgagggattctctaagatagcccgaccaatgacacaactactcaagaaggaaaagaagtttgtgtggtcagaacagtgtcaggaaagctttgagcagctcaaagaaaagctgacctcggcgcctattttagttcttcccgacatcaggaaagactttgttatatattgtgatgcatcaaggcaaggactaggaggagtactgatgcaggacggaaaggttgtggcctatgcgtcgcgacaattgcgaccacatgaggaaaactaccctacccatgacctagaactcgcagctgtggttcatgctctaaagatttggagacactatttgattggaaaccattgcgatatctacactgacgacaagagtctgaagtatattttcacccagtcagatctcaacttgaggcaaaggcgatggctggaattaatcaaggattatgacttagaggttcactatcaccccggcaaggcaaacgttgtggccgacgctttgagtcggaagggccattgcaatcatctgagaacggaaggaatggcttctgagcttaaggaggaaatagcccaactaaacctacatatagtacctcatggacagataaacaccttggacattcaacctcttctgagaacccaaatagaagaagcccagaaggacaacgaggaaatccgagaggtgaaggaacgcctagctgcaggatttgcaaaggaattttcaaccgacgagaaggatgtcctatggtataaaaagaggatgtatgtacccgaacagagtggactgagaggattgatcttaaaggaagcccatgaatcggcatattcattgcaccccggaagtaccaaaatgtaccaggatctgaaggaaggatactggtggcccaacatgaagagagatgtggcagaatacgtagcactctgtggcgtgtgccagaaggtgaaggctgagcaccagagaccggcaggtttgctgcaaccccttaggattcccgaatggaaatgggatgagataggtatggattttattgttggattgcccaagaccgcaacagggtacgattccatctgggtgatcatggatcgactcaccaagacggcgagattcattcccgttaagacaaattatagcagtgccaaactagccgagttatacatgaccaggatagtatgtcttcatggtgtacctaagagaattatatctgatagaggcacacagtttacctcgcatttctgggagaaagtacatgaagccctaggaagttaccttgcgtttagcacagcttatcacccacaaacagatggccagaataagagaacaaaccaggtcttggaggacatgctaagagcttgtgcattggattttagcaaagattgggagagatgtttgccctatgccgaattctcctacaaaaacagctttcaagcaagcctaaagatgtcgccaaatgaggcattatttggtcgacgatgtcgtaccccactaatgtggtccgagactggagaacgggtggtatttggacctgacattgtcaaagaggccaaagaaaaggttcatctgatcacgtgaccgtttaaagatggtacaatcacgacagaagagttacgctgacacccgaagaagaaacctagaatttaaggaaggagattacgtctatttaaaggtttcttcgatgaggataacgaaaaggtttaaggtcaaaggaaaactagcgccaaggtatgtgggaccttttcaaatcatggctagacggggagaagtcatatatcagttacagctaccgaagaatatcgctgatgtgcacccagttttccatgtgtctcaattaaagaaatgcttacgagtgccggaagaacaagccccgctggaagagattcacattagcaatgatctcacgtatccagaacaaccgatccggatattggatgaagccaaaaagaggactaggagcaaagtgtggcgtatgtacaaggtacaatggagtaatcacactgaggacgaagccacctgggaaagcgaagaattcttgaggacagaatacccgcatctattcgaaaactggtaagaaatctcgggacgagatttatttaaggggggtaggtttgtaacaccctgaaaatttgaccaataaaaacaaaactctaaaaatacgggccttcgaaaacttttaaataaattgcatcatgccgatcttattcgcccactttatttggatttgatttcgaagttcattaatcgtaagtaaagaatagttaattaggaataaaccctagaagtaaattggtaaaataaatataatttaaaataaagattaggtggggatagaaatgaataaaatattatcgcgatcatatttgtattagttaaatctaaatacgacggaatgagaattaactctaattaaaatcaagtaagttatataaaaattaaatatgggtacaattaatctgatgacctactgtaccaatggttaat

SEQ ID NO: 10917 - DNA, 588 bp, Oryza sativa
agaaaagtccctcaggaattatgcaatgttgtgtttctttgcaagaaggaagacaattgctacaggacattcactctggcatttgcggaaatcacgctgccgcacgaacaatggttggcaaggcttatcgacaggattttttctggcccactgcagtatccgatgccgagagagttctgcgaacatgagaaggttgtcaattctttcccatacagattcacttaccaactcaggagttgtaaactatccctctttcctggccgttcgcggtgtgggggcttgatatggttggtcctttcaaaagggctactggtggtttcactcatctttttgtagctgtggacaaattttccaagtggatcgaagctaaaccagtcgtcacaatcactaccgacaaagctcgagattttttcatcaacatcgtgcaccggtttggggtacctaatcgtatcattatagatggtacccaattcactagtgatgtgtttaaagacttctgtgaagactttggtatcaagattgttatgcttctgtagcacattctatgaccaatagacaggtcgaatgcgccaatggtatggtagttca

SEQ ID NO: 10918 - DNA, 5895 bp, Oryza sativa
tgccactttgattttacaaaagcaatttctctctcctttttctgtttatgggctgatctgaaaccaaaaccaacaatatgtccaccttttccacaaaaagaacaagtatatttttcacgatgattagaccattggtagcattagaagatttagcaacactagcaacaacatgaggttttgcatgcacaacattggattttgaagaagatgcactcatagtagacatgataccagcagatttaaacacagttttgttagcattaggtttaaccaaaatctcaccacttctagcaccaacacctaacacaacaggaggatgtctagaattataagcataaggattaaaacctaaaccacggttatgtgtgctaacctttgattgatccaaaatcatgttgaggttctttttaccatcagaaaatcttagtaaggaatttttcaaataagaaacctctttatccaaattagcacaattttcacaatctaccatgacacatttgcttttacgacatttagggcaagaaagcacttcattgtttttcacaacatcttccatgaactcaacatgacctaaagcatctttcaatttcaacttattcaaattacatgttgagcaatccaaaatatcatgaggttgttttaactttttaacagaaatcatgttaaacatcaaactagcatgaaaagcaatttgatatttttgcaacaactttttagttaaaaataactcatccaaagtgcgtgtgtgcaaagcaaaactacaagcaagagaagatctatttttcaaatcatgtgcagcattaacatctctaatttttgaaatctcattcattaaaacctcacaattttcgtaatcatcatcattaggaataagagattttaatctagcaatttcagatttaagagattcaatgataaatttctgttttctagacatcttctcacacttcttattcttttcactcaaaatattaatagcttcctcaaaagcacttacctcattatcttcatactctgtgtcagattcaccacgcgccatgaagcaaacatcggagatgctctttcccttatcatcatctccactttcaccatctacatcacttagcgactcgaaggcggcgcaaacttgttgaaaagccttcctgagattctctagcttcctcccttgggatgaacccttcggcttgttgttgttgttgttggtattctcaccatctttgtcttctcttttgcctctcccaagcttaggacaatgcgaacgaagatgatcaattgaaccacactcaaagcaatgatttggaccacctcttttcttgttcctggcattatttatagctcaagcaattctattagcaaccaaagccaaattctcctcctcgatttgttcgagttgatcattgtatgtggcattaaaaacagcaagaaaagaaggcttagatgaagaagcatcaacatccaaagaagaagaagaagaaaccaaagcactcgacttagaatcaacttcccgagaaagaacattcatctcatgtgttttcaattttgtgtaaagtgaatccaaagtcaaagtagacatattaacagactcctgaatagatgtaactttcatctcccaaatagacatgtcaagaccattcaaaaagtgacgagaaatatcagattgtggataattagtatcataagaagaatcaacagatttaagatcactcaaaattttattaaacctagaaagatagtaatccaaagcttctccaggtttcatctcaaatttaatatactcctttttgaaaatatcacgacgaagttctttaatgttatctgttccttgatgaaagttactcaaagctttccaaatttcatgagcagttcgaaagtgcgcaacacgatcataatcagaaagagaaataccactcaaaagaatgttgcgagctttgcaattttgttcaaactcagtttttaaagcagcagtattaatctcttcaggaatcacataaggatgagaaacttttctctaaatatcataatcttcagccataatgtaagattgcatcctactacaccaatgagaaaaatccgttccatcgaaaacatgaggcttagttgaaaacctagcaggagtagccatggcaaaaactctagatcgataaaaattcaaagaagaaaacaaggctctgataccacttgtaggattgaaacacaagaactaagacaaccagaggaaggggtgaatggttggtatacccaaaaaccgaaaacttttagcggtgtcggagatatgggcccgggggtatgcgaagtgaggggaatctaccttcccatcctgccacgcgtccctacagcctagtcctgtccccgcattccgcgaaccgcaggagcggccggggggtcggggcctcggggtgccacgtcatgcccctcgggcccttgcactgctttgccccgaggctctcgcccagctgccatttggcagggggagcaagcgaggagggggcccaggctgaacttcctttaatgcgcacagcgccccaactgccccctgtcacatttaatgcagtggagcagatgtgcggcgtgctaaactgacgcgcgatggtcaagaatgaccggtctgtgaccggcctgacgccggtcacgtctgactggacggacaaccgtgctcccacgtcgcatctgctttcggcggagtggaggtaggtatgacccgtcccatcggagggtcattcgggcggcggccaccacaagtcttcacctattaatgagggaatgacagggctgtcccccatgtcaggcgagggacggcgctgggccccgctcaaggacaaactgtggtttagctttcaggcgaaggcacgggtcgagttccagtcaagttagggtgggtccccacccgaaagaagagtaggtagaggcggtgcatgtggtatccccttgaggtataaaaggaggactttgcccaccgagagagaggacgactctcagaaaacctgagcttgtggaggagggaagtaagagtgttctgccgattttaggaacccttgtaactcttagtctaaatcccatacacaggagtagggtattacgcttgatagcggcccgatcctgtataatttgattgtgtgcgagctagctaggagccttggggacggatacgcaatttctagaggcgagcttcttccctcggccgaactcatgaaagggggggtctcacgatctcccgctagagaggatcacccctcaacaagcggaaataaaagttacccggttagaccgccgaaacccggtgaaacacaaatcgaagaactctaaaagtggatgacgactttattgattctctctgtgtttacaaagtgcaccaacagcactccttacataaatttcgactaaactcgaaaccctaactcaaaactcaactcaattgctctccaaagcgataccgggaagcctcacgctccccctctatttatacatgaggcgggcagcctaaagccacgaaccaaactcatactaggagtcctaaacaccttaggaaaccctctagtacaagaaagaaactttacataaccaatcgtaccaaatttggactccttccaaattcaactccgcatcccatacgcacacaatacctccatcgtatgccatatggaatctccatcaaccacgtgcatcaactctagcctaagtattccgcatgatctctgaccaccacggacgtcgtcttatccccaagccgattcccgatccatcaccgcaaatactctcccgaggcattgagtcacctacacatgaaataaacaaagaaaccatattccgagaccaagctatctccaacttgactcattagtagcaaacagtagtattacatacgtatagtatccatctagaagtcataatcatgaaataatcacggatatccaaacaaacaacccgaaaccgaaactgacacagcgtcggccggtcagaccgcgggctgcgccggtctgaccgcgcattacacgccggtctgaccggttaccagagcccggtctgaccggtcacataaaatgacgaatcctgcgatcacctgtgaaatccaatcatctctaaaaccacttcatgaataaataccaaataacaaaaccaataatctctaatgccaattgttcatcacagaataataaccaaaaacacctgtacacatggcgagtggcgctgtgtgaccattgtacgtatacgtaaggatgacgctcttgttgatgcaacgaccgcacgtatacgtaacgctaatgcatgaagcatgtcatcagagtagctaattaaaaaattgccacgtatcctcttaattaatcgcacctcttgaccactatacaattaattaactcagctaaatatactgcttaatgtcatccactactgttgctgctggaggcatatatatccatatgcatctatacttgtatgttactgtatcaattgctaaattaatgacacatcatgattaatattgtaacatagtgattaaccaccacgtgttagtccattcacaattagatcttgtttggaagattgccggagattcttaaaaacatctagaagagatgtgtttttcagcttttacttatctattggttaaataaatttggaccatttagagaacctcgggagattttggaaaaagctattaaaggcctagaactgtgttatatttttttcagatatataggggcttagaataaaaaaattgtccctcattatcgtgtggggacacaacgcgcgagagagagaatggcgcaatttataagctagtgtgcagtgttgtattcacatccatatgggagtggagatcggaggaggagatgatcgatggattgacatattccaaagctgagcacaattaggacacgagcaagtgctctaggggatcttgtgtactcgatttgggaatgattaattcgtgggtggattagtgccacccacagctaagatagggtactctatcggtgcgtggctgcatatatggtggagggattagctatccagccatcaatcggacactgcttttttttttctattaacacataaatactcccatatttcatattataaatcattttactttttttcttaatcaaatacctttaaatttgatcaagactgtggaaaaatatactaacatttttaatacaaagcaaacatatattatcagaatatattcaatgttagattaataaaactaatttgatattgtagatgttgctaatttttatataaacttaatcaaacctaaagaacttggactaaaaaaaattaaacgacttataattatatataatatgaaacggaggaagaagtatatatacaccaccccacgagcacacgctatatatacacacacactagtatgtgcacgattaatacatgttcaagacattgagaactaacgtgatcattttacttaaattcctataaccgaagtgcacacgcgtgtataggggccctttgaaatggattggcaaacaactttagagaattcaatttcttctaaggatcttttttttcctatggaacctttgattcataggaagaagatagaaaattttctacataattgcatttctatgatctataggaatacgagtaagagattagagattagacctcttgtaaaacttacttttggcttaatttctttttgtgcaatcaaacggattctcttcttatttcatgcattttcaagtcatgcaggattggaaaaactgaaactttaatttctgtgttttttctgtggtgtttttcctatcctgctggcctaggatttaaacctagcttgtttcatgtatacactcacaacatgtaatgattgaaacaatattcacgctaaatcatttggatgataatttccagccgcccctatcctaataa

SEQ ID NO: 10919 - DNA, 2323 bp, Oryza sativa
tagagactaaatgatcccaacagggccttagtcataggtggttcttcgttagaaaaagaaaaaagttactggccccattggttcgcttattcgtggaataagccaaacaacatatttgcaagagaagagtaatttatgaataaaacttttatatatgtgttcttagcgatataaaaggaaaggttgaaaattaaactttgatgaataaccccaaaatcacttccaattttaaggttgaaaattcaaattttggctgataagcataagcataagcgaaaagatgaggccgtaacatattatcgcagctcagcaacacacttcatatgactcatattaatcatataagaaaaaaataactaatgtacttccactggtggagaaagcgtttgtagtcccggttcgtaacccccttttagtcctggtttctaaaccggaactaccaatccaggactaaagatcgagttgatctttttttttgcatggccctgttgctgcatggtttatatatatatatatatatatatatatatatatatatatatatatatatatatatatacattaaagaaaatgtgtacacatgcatatagaaaaacagacatgtattaattacaatccattatgatgtcctagctagtacgatttcgacgtagtagtagtcgttatctcagaagctaaggacctatgaattgtatttccgtcgtagtagaattcacccttgggatcaaggatttgttcgttgatgaatcccatgagttgttcttgaaccaccgcgataaattccttgtgtgtgatcaggttatccctcatgcgaataaactatatgaatgtatgaaattaattagtaattaaacaacaaatcgatacgtaatgaaattttgaatttatttgtacgtacatcgagctctcttgtggtgatgatttggtctgcaaggcagtggcaatattcgcacacgtagtagccgcacaagttagttccctgcttttgctttgcgcactataaataaatgacaaatggcgagagatctaattaatatacacttgtatgtatttgaattggagattcaatataaatgtagagcatgtgtactcacaggaaaattgaacttccgcctaagtctttctctccatttgccgcggaccaaatgacggaaccgataccaagccctacatggagtttaaagctatgattcgtagtagcaattaactataacaagattcttaattaacataggaacttatgacagtacctgtctataagttcgaaaaccttgtcaaacgtagactcttttttatccattgagtcatatacgttgacggtgcaggccttcaggtcgaagagtaaaagcacccaggggaatctgcaatgtgggttggatgcattacgtatgaaacacttagcatgttcttacgggaatgaaatttggtataggaagacagtaaaattaaactaactctatgttgtacggcaacagtatgaacgtcttgtatgctacgccatcaggagatggacgagattgtcctatgtggcttgcggatactggtcaagcattgcgacgtttactttccgagggtcgatgaatccagtatcgaaaaccctccgccgtcgggccctttgaatctccattctacaacgataaaaggaagtatatattatatatagtctacttatacacaaggacctaattaattaaaggaaacgtaataagaaatctaactgaacgatacttacaaaatccagcaactcataatagagacgtcgagggcgtccagctggtatagttcgtagatacccttgaaattgatccagagaatgtcatctccttgcaagaagtccgtgtccctgatcctcgctccgatcatctctctaccggtggtgctcatctccatgtacagttgatggaacttgtatatttgtgtgggtagggactgcagctgctcaggcttgacaagcggtttaccgagttcgtacatgtatttcgcttccgccttttcgattggtgcgcctcgtagcaattgatccacagttagcccggtgtcattaataaattcttgtattccaaaatcttcaccggtcaccaacggctcgatctcctggtttggttgctctccaagctgagggactggtttggactttccaaaaaatgctttcttgagtgttcgctcatagtccgatagctttatggcctccttggcaggtgcagacatacccctaaagaagttcttgacactcgggtctataaaatcttcttttctggacttcgaggcttcaattgtctcctgacttctgatgacacataagcgtcaagctcctcttgcgtgc

SEQ ID NO: 10920 - DNA, 5314 bp, Oryza sativa
acatatataagcagcaacttgcggaatggacaaatctaaaatcgataaactacgagcttacctttattgataagttcttgaagggaatatgcagctcacatggtgtccgctgagtgatgtcatcaacggggcaggtggtttcatcatgggtttgcatggtgtccatgctctgtgatactacctgccccgttaaggcgcaactgctacgatttccagaagggctcacaattgcaggaggaatggtcggctggggatcatgggaccgatgtgcggccatgcgttcatcaaccttccttgccacctcctcttgcatgctaagctcgtagctcaataccttgtactcaagatctgcaatcttcgcctcggtatctctcttgctcctcatccgactcctgtatgtgtggatgtcctccttgaacccaatcttccaaggaatcacccctgtcacgccgggaaattcactagtaatttccgaactaatttgtgcataaaatcctcgtccaggaatcagccgaggtacacaaactgacaatttaatatacaaatccatcttaataatgacgttacatacttacaaaagaaaagaaaacagcagcggaattaacggtctagcgatggcttcagctccactcccacaggcagctcaactggggtataagccaaacgtcttctccttctggatcctttatcttcaactgaggtttgatgattattgcaagaatgagcatatgacatactcaacaagccacacagcaaatatgcaagtgcacaaggataccaaaggatggcataatataggctcatttgcgaaagcagcatttagcaaagagttaagagtagtaaaacagtagagtaattaattaaaaattttaatcaacactgaacagcacacccatgctgtacaggcccaaccatcctgaacaaccatacccggctgtacagatctaactccaaaccaggagctaagcaaattattatcaggtattaacatccataattattgtgagaggtgtgagactaatcacgaaaaacattgctcaacccgcccataaccgcgggcacggctattcgaatagttttactctggccagaggtgtaccactgtacccacaagacacagctccacatcatgtcaccatgtgcctcagtaccaccacggtacctcggaaaggagctgtgacaataccccttgcataacacaactcaccacagtgcaccgttcctggatcataatcacccccttataaacaaggcatggactccccagcgacccccgtggacttctcgccacttcacagtctggcgcactataatgaatcatgctatacaaacgataaagccgttgcccacgctggcttgtggttggcacggtaaatgtctcacaacagtagctcgcgaaccggtccttaattgtcatgagcacgactctcaaaaccatgtgctcacaacccaccattatcaagttttagttggcaagtaattaattaaccaatcacgattaaccatcgtgaactatcattaagccatccttaaataatagtgagtcataagttatcccaatagtgtgctaatgtttctaagcatggctaagcaatcataactaatatctagctgaaccaatatataaagcccaactagtcaagttataataacccaaggtatcaaggaataaagtaatcaatgcaaattggccataacaaaggaataagttcacaccacccggtgacattcgaaaataaatgcacagttgaaataaatagagaatttaaatataggatcaacatgctcaaaggattgtgtttaggatctgtgtgacttgcattgcaataatcggtcttcaattaatcttcttgatcacttccgacgcactcacgaaccttcgcaacgacggaaacgacaagctaacacgcaaaacgaagaaaaagactaataaaaaccaaataaacaatacatataaagtaaacaaacatgtagatcatgattttagatgaatttagcaacttgaaccactcaaaaccgagttacgatgatttagttatgaatttctgaagatttaatctattagaaaaaacaggaaaaagaaaaacgatgatgacgtcatgatgacctcatcaatggccgggccaagatggcgacctcgccggagattggatggtcggctgcgactttggaggacatgaacacgtagaggacgacgagacgaacccaacggtactcaccctcgtgccaaacgacgaccgacgacggccggcgacgaggaggcgacggcggcggctcgggttgcacggggcggcggagctccgatgaccggcgacggaaaaggaagggtggccgagcttcccctcaccacggcgcacccaacggtggtgacggcgaccggcgacgacgatggagacggcggcgcggcggcaccggagatggccggcggcggcggtttgcttggcggcggtggcgacggagctacggagcacggaagaggacgggagagggggcaaacgaaagaggaggactagggggtcctatttatagccttggattgaagagatcggactcctcccgcaagaaatcgatccggaaaaatcaaaaaactcggttttggagataaactcgaaaacgagttcgattcggataagatactcaacgatttgctccgatttttgggggtaaagatagaggaggataagaggaatatttcccctcaactaaattggaaaaaggagcaacggggaggcgagatttggaaggaggaggcggcggctgcacagggcacagcacgggcggctcggctctgtccagagctggaagatgaacagtagatcagggagggaaaatagacttttccggctaggctgagaggagaggaggcggctcaggttgggccggcggaagagagaggaaggaaaggaaggaatgggctgaaaatggcccaagctgaggaggaggattttattactttcccaattaaaataatcacttaaatgatctttgaattattaaaaatacttccaatgctcaaataatttcaagaaaaatcctgaaaatacttggacactcaaagtacttaaaaaattacaattagaccatttaatgattaatttaatatgtgggtaattactgaaatgctctttgtatgattaaaattaggaattgagctccgaaaaatccgagaaaattccagagagtataattaaccatggagaatttaataaaaattaaatccatccatgctttatatttaggaaattttatttcccacatttaacttcacttgtaaattaaagaacatttaatataaattctaataataatttattaaataatttataaatcctgaaacaaaaatcaggatgtgacaacccctttccctcgtgttcgtcctggatgctctggagtctgcagggcgagtgacagctcgtccttctctctgtcgggtcggaacgtgccctaagaagaggcttccactacgtccgttagtcgatgcgcagcctcgcgtatctgatcgctgaagaccagagagccatcagctgggttgagcgttccaccgtgagcatagtaccagaactttgatcgatccggccaattagcggtggccggttcgatacccctctcaagcaagcttgcctccatctcctcccacttcggcatcgcgacgctatagccgcctgaccccaactggtgatggtacttcttcttggcggcattttctttgtttctttccatcatcgcctgcccttgttgacctgtctgatatgcaacgaactcgtcccagtgatcccttagctttgggaatgtgtcgaagttcggtgtctgccccttcaggatatatttctggtacagatctcccttgaagctctgaaattgttctgccattttctttagagtccaccttttcactttgtcctctgtacccgcgggaagggtgaatgtctcgagcattgtggtccatagcatctctttctccgaatctgggacaaagctctcatgatctccgcatgcccttgttctgcgccagtacaccatactgacaggcacgttatcccgcacaacccaaccgctgtgatgtacgtagttcttggctgcttccaccggggcactaggtcggccgtcttcgtccacttccgttatgatgtgccgaccctcaagcttcttcgcggcacctcgttgcccgcgtgccctcttctgtccagcggagggttgacttccactagcctcctcctcctggttcccctccacatccctctccacgtgcccctcctggttcccctccgcatccctctccacgttctcttcctcgttcaagtactggtttggatcctcgttcccctcttcttcgttccagtactggctgcttccctctgcgattgtatcgtacaatatctgtccctcatcgcgatcagccatctgttcatacaagaaatagttgctaagtcatgagacatttttgctttaacaatcttatatgctaacaatcatatatgctaagtctaactgtcgtacatgctaagtctaattacaaatctaataatcttatattaaaactataataatcttatattaaaactcaaatagtcatatatgctaagtctaactgtcgtatattagaaccctacacaatcttatatattgtatttcacgttcgcgttctcgttaagttcacgtttcattcacctacgttcgttcgttcacgtgcgtccacgttaacgtacgttaagtaatgttcgcgtccttgttaagttcacttttcgttaacgttcacgttcgttaacgttcgttcacgttcacgttcgttaacattcgttcgttcacgttcgttcgttcgttcgttcgttcatgttctcgttcacgtacatttcgttcgttcacgttctcgttcacgttcatgttcacgttcgttcgttcatgttcacgttcacgttcacgttcgttcgttcacgttcacgttctcgttcacgttcattcgttcacgtggcggcagcggagcggcggcggggctacgcggctgcagcttggcgcagcggcggcgtggcggcgcggcatcggcgtggcgcggcggcggcgtcgcacggctatggtgtggcggcgcggcggtgccgtgccgcggcgacgtcgtggtgtcccggcgtgtcgtgccgccgcggcgtcgtggcgcggcttcgtcggctttgcagcttcgtcgtgacgtcgtcgccgatgcatgccgcctctaggtcggggtcggcatcgtcggcgcggcggagtcgtgatcgggcgtgacgacgtcggcggcggcgtcggcaacgaggtagccggcggcggtttgggggaagagagagag

SEQ ID NO: 10921 - DNA, 2201 bp, Oryza sativa
aaccgggactaaagatatttttccgctatttctaaattctttttaaacccggttagggttaagaaccgggactactgataagcgcactgaatattaatttccattacatatgtgtttctaaaatagaaaataatgcattaaaattatttaaagtcgaaaaattaatgacaattacttcgaaaaattattgttgtctgtagtaaattaagtggataaaacgtaataagcaaatatatgatttaaaattaataaaaattctaataatcatatatacttagcatatgaatgatattaaattgttaaaaattgtaattaacatatgtatatacatacgatatgcatgttttaaaattagtaaaaattctaataatcttatataattagcatatgaatgatattaaattaattgttaaaaactctaattaacatatgtaaatacatacgacatgcatgatttaaaattaataaaaattcgaataatcatatataagtagcatatgaatgatattaaattaattgttaaaaactctaattaacatatgtaaatgccacaagcctgatttaaaacttttaaaaatcctaattatcgcatataactagcatatgcatgatttaaaattgttaaaaactctaagtaacatatgtaaatgccacatgcatgacttaaaacttttaaaaattctaattatcgcatgtaactagcaattacatgatttaaaattgttaaaacctctaataatcgtatgtaattaacatatgccatacaaaaattgatttatatggataattattacatccaaaatagtttacatcgtgtacacaataattacggcaatacatcggcggtgacggttgaccggacgtactttctcctcactattgttccctctttgtgatcgctacgtgagtaaggggtgtcttcatttgataggaggatgctagggtcaatcgtcaccgtgaaagggggttgcccatcaaactgatcgtaatcctcgtcagtcttgccatcaactccgacgatttttcttttgcctgggagaaccacgtgacgcttcggctcgtcaggccctctgcccttctttcctttgctagacatgtccttcacgtaaaagacttgcgttacatcattggtaaggacaaaatgttcgtccgagtatccaaccttgttaaggtcaaccgttgtcatctcactgtcatcaatcattacgcctccaccagtcaacctatcccattggcaccggaacagagggaccttgagaggaccatagtcaagttcccatatgtcctcgatggcaccgtaatacgtgccagttgttccatcgtgtcctatggcatcgatacgaacaacgctgttttggttcgtgctcttcatgtcttgggctctcgtgtagaatgtgtacccattgatctcatatccctggaatgtcgcgatcgacccagatggtcccctcgccaggaaggccagttgttggttgatcatctcgttacccagatggtcccctcgcctggaatgagatgttgtcgtagccacacggggaaagtatcaatgtgatgccgtgtaatccatgcatcggacttaccgatgtttctggcgcgaactagagccaagtgctcctcgatgtaaggagctaccaatgaagattgttgcaaaaccgtgaaatgggctttacggaataaattgttgtctaccgtcattattgctttcctttcaagagttcccttttcccgtatctcccttcatggcgtgattcaggtaccccgattgggcaaaggtcttcaataaattctacgcaaaattcgatgacctcctctgttccataccccttggcgatgcttgcctctggacgagcacggttacgaacatactttttcagaacgcccatgtacctctcgaaaggaaacatcttgtgtaggtacacaggcccgagaatactgatctctttgacaaggtgacaaagcagatgcgtcattatattgaaaaatgaaggtggaaatatcaactcaaaactaacaagacattgcaccacatcattctgaagggcttctaatctatctggatcgatgaccttctgcgaaattgcgttcatgaatgcacatagctttgttattgttgcccggacattgtttggaaggataccccttattacaactggtagcagttgtgtcatcacacacgtgacagtcatgagactttaggtttg

SEQ ID NO: 10922 - DNA, 2973 bp, Oryza sativa
ccgtccacgactgagctcagggagcgcattgctaggtaagcctttgaataatccttttggtctttgattcacaaggttgttttcagttatgcatcattttcatgtaattttgcatccggagctaacctaatccagagtaatgtatagcatttaaccactttatagcaattgtacatctgaaacttgttttattgactcagtattggtgctactgtcacttgatgatctttggatgtcaactagtgtttttagggttaaatctagtgcaacctttttgctaatttgtgtattacgaaggctttatgcattattttcttctactgtctcacatgctgggctaaattgtggctgatgaaatttctttccctggtccgactgaatgtggtccatattgagtgcattttgggtttagtcatcctattatccacgtaagcctcatatgaattcagaaaattgaagctgaaggaagacaacattgcttctaataattttaccaggagtaacatactaaagttgaactgttgaagcaccctatagagaaacttttgctaaaagattcctacggtaaactttattataatcctcaatatgcagacctgctgtctgctttcaaagttgtctttattgcattgaatccaggaactattcggtgtaaacagagaatgctgtcttttgtatttgtttattatacttttggttatgcttgttgcattctgattaactgctgctctgttgacatagctcaagaattttacttatttgtgctgtcaataacccggatttcttgtttatgtaatggaagcataggtttggtttgtacagaacacgatcaaatatactgaaataaatgccatcttgttacacctttgatctttgttcaatactcaactaaactctaaaacttactgccgtctaatattgctgttacaacctctttcggtgttaagctcttctttagtttaattgattgatagttagtatgcaagagttgtatcatttttcctcgctgttaaatcttgtaattaaaatttgaggacacaaataatctctaaatcaggtatttacttcaggtcaaaggaggaaagactgaatgatacaaagcaaggaggaatactggatgataatggtggtgatggtgagatattatcgtgggtgggcaagagtcgtaaacttgatgaaaaaaggcaagctgaaaaagagaaagcattacatcgtgctcgagcattggaggaacaggtgatggtttaaccatgatgtttatgtgtatacattttaaaatatgtacaactaactttcatatatcaaacttgcaggataacattttagctgaaaatgatgaggatgatgacgaggagcaacaggaggataaccgagtgggaggtaattcctgtgcaagtttattttgttatgccttttgtgtagtatatcgtctgagctatagtgttctgtgcactgttatcagaataacgtgtttcactcttttcatcttttgtccagaacacttatctggtgtgaaggttcttcacggacttgataaagttttggaaggtggcgcagttgtcatgaccctaaaagatcagagcatcctggctgatggggatatcaatcaaggtgatgggcttttacatgtttatatgtaccagctcctagggtaactattgtcttacttgagaaaaatatttgtagaggctgatatgcttgagaacattgagattggtgagcagaagcaaaggaacgaagcttacaaggccgcgaagaagaaaggaacatatgatgacaagtaagttcaccatacatatatgtgttactgctaacatgctgtgtttattggattgatgtgatataatgttcatttttctgcctgtctttaggttcaatgatgatcccttgtcaaagaaatctatactctcacaatatgatgacccaatggaagatgaggtaaagtaaaatgcgatgttcaattttgtttgctttgtatccctctgttggtagttatttttattgttgcacttatcagggagtgacacttgatgaaggtggacgcttcagtggtgaagctgaaaagaaactggaagaggtaattcaacttcatccctagaagccatggtactttttagggtccattgcaaatactttggttgcatctttgtgtggactaactatattttgattttgccagctccgcaaaagaattgaaggtggttttgtgcagaaaaagacagaagatcttacttccgcagcaaagatgtcatcagactattatactccagatgaaatgctccagtttaagaaaccaaagaaaaagaaatcccttaggaagaaagaaaagcttgatctggatgcacttgagtctgaagctattgctgctggactggggacaggtgatcttgggtccagaaaagatgcaagacgacaggctgctagggaggaagagcaaaaggctgatgctgaaaagagaaactatgcgtatcaagcagccattgcaaaggctgaagaggcatcaaaagcattgcgcccggagaaaaatatttctggtaaacacgctgaatctgaagaactagtttttggtgaagattacgaagatttgcagaaatctctggagcaagcaaggaaattagctctaaggaaacaggaagagactgctgcatctggtcctctggctgtagcagaactggctactgcaagaataggtcaaaaagatgcagatgctgccgaaggagatgcacaacaaaataaggttgttatcacagagatggaagagtttgtgtggggcctacagttgaatgaaggtgacctcttttttgttttctgtgagtaatttcaaagaaatgcataggcagtgactaattattggcttcttttggtatcttctttcagagactcgcaaaccagaagcagaagatgtttttatggatgaagatgatgacatgatcatgtcacacactgtggcaaaagatgacatgagtgggctgg

SEQ ID NO: 10923 - DNA, 7366 bp, Oryza sativa
atttgagctccgtatgtgacaaatggttggtctgcgttctttatttgctttagatgacaccgaaggaggcatttcgggatctttcacacaaattccatggcaaggcacctggtaaaatgaagcaggaacggcgccaaaaaaagtatcgggatgagttgaaaaccaagcgaatgatatcttctgacacaccattaatgtctgcggagaagatgagagaggctcaagctctcagcaaaacaccataccttgttttaagtggcaatgcaaaatcagggtatgtccacagtatacttctacatccaagttcttattttaattttccttccgatgctgctttttaaattattttgatgtcttccaaggccttaatggaagtccaaaacacttgctctggatttataggtgttaaggacttaatagttaatattgcacaacagtacttttttttcacgagatattatttttgtttagtttgtgttgagcacaattatttcatctgtattatcactgatggcttatatttaattgaggatatacaatgaaatccattttcgaatggttaatatgatagcatgtgagctcccaatgtagttggatatttatttacaatttagagggattgaggttcacatttatgcctctgtttttttcattactccatctggttgagagattgtacaaggcacgtctagattacatttgactgctggggaatttatcaaaaattgcttatagcttgtgcagttatctttgcatactatgtatgtgattcctattaatatcatagttttcctgatgaagtgcctaaaccagttctgtttaatgtgattttagtcaaacgagcgatgccagtggctttgctacagtggagaaagagcaccctgggagtctgacgcccatgcttggggccaaaaaggtatggcattccctgttccattaagtaattactttatgaataaattatttgttgggtgttaggtaatgtataagctgtacatatgtaatccaacttaccatattcagaatcctgtctttgcctttcttttggcaggtcgagcactttctgggcatcaaacgaagcgcccagggtggaggattgcctccaccacctccaaagaagccaaagaactgaacctgcagtggacttggctgagtagaaatcaggtgttttttagtgcatttgctactgtaggtttggagcagatttcgagggacctacaccagcagataccaacgacccatgaagcagccccaaatgagttaacatgtaagaacctgtgaatttttattccaagttgattatgttaacattctgacatgggcgatgtaacttttgtaaccagctgtacttacaaggctgcaccacaaatgcagtcagaactacagaggtggatttaaaatgttgtcgtgtctccacaaatctacattggttgtttaagctggacatacaagttacgattgctgagtgctgacaaactttatagtgtttttcacgtactctgtcccataaaaaacaaatctagtatatgatgtgatacattctagtaccataaatttggacatgagtattaaaatgtgtaacattctgcctcccaaaaacatgtgtaacattctgtactagatttgttttctgggacagaaggagtatgttggggaaagagggagtacgttgacaaacaagcatgtagtagtcaggtacatcaaaggaggcaaaggcaatgcacaccgtgatgtttgttagtcatgtagcacatcgaaggaggtaaggcaatgcactctacggccgaggttttcctttcatttgctgccattcttggagtgtcctgaaagatgccaaagtgtattactagcataatttgagatagctcctgcgaggctctgaatctgtgatctagtacggcagtactagagttaccaccaatgctttgacgaggcactcctgaactgcttggaaggctagtttttggcccaaaaactggtttggttggagtaaactgtaatgaatccgggctgcgatatgtttggcacggttttagctccagctccacctctcctgtagctggagtttagccaaatagtttcagctccatctaaaaaaggagtgtagctggctgaccttctcataaaatagactagcgatatggagttgggtttaggtctaaatttaagagttggagctttatcaatagataaatgtttatgttaggatcaaaaagctgcttggatgggcggtgtcatctgattaaaatctgttcgcataggtccattatacctggaaaataatagactgctttcgagccgaaaaaaataaggcatatttgttgttggtggctagattggatggccgtgtacctcaccaccttttgtacttgtatactgtgttcgagctatccttctcaccatttttctttttagattggatcgatgccactacaaatatatcatttgagataaatatcactactattcacaatatcggctatatttatgttactagaatttgaaaaaattgaaactgtgctactccatctcgttttccataaaaatctccgttagtctgaattgcacgtgaaacctagccgtcagttccatctttaccttcctcccctctcttctctttccccttcctctatccaccaccgtcataatcaccgtcatcgaccacgtccctggtgggaggcatcgagagccaccaccgtcgacgtctgcgacctcttccacaggccacatcgggtgttctgggagttggcgttgccgtcctcgactccatatgaggcgggagggctcgggagccgccgctgctgtctctatcctcgtagcggacacggggatggaggaagagatgggagagaaagaaaagggaggatggaggaagatagaactgacatatgtgttccacgtctaaggccgtgttcttttctcctctttcccagctcacttccctcgttttccgcgtgcggctttttaaactgttaaacggtatatttattacaaaagttttctatatgaaagttcctttaaaaattatattagtccatttttcaaatttttaggctaatacttaattaatttcactataatcgcgtgctttgtttttcgtatcgatcccgaatgcagacatggtctaacggaaaatgtgatgagtggcacggttttaatttccccaaatttcagtgccatgttgcccatatcatgaatagccgttgcatttatcttaaatgatatatttgtagtggtatggatccaattaaaccttttctttttggaagatccctaattcactaccgtaaattaagtttcacttggtactactagtatcaatcaattttattacaggattgaatccgaaaggctaaaaatgcaacgtatgtacgtatgtgcggctcgcaaacccttcctgcattgcagtaggtacgccgcggcggcatcgtcagcggcgccgtagccttcttcgccgtcgcaatattcctcgtcctctgtcttgatggctgggttgcggcggagagcctccgggaagaggcgcttcatgccggtggcctccatgatcctcttcccgagcggcggtcgtgcccccttcctggtgccgtacagcgcgcggcaggcccagtccagcaccccgggggcgaggcaggctaccagctgcagcggccggaacagcgacggccacgtgacgtaccagtcgccggcccggatgccgtccatggccacctcgcccagctccgccacgcggcccaccgggaacacgccgatctgctcctgcacacgtgcaactccatccgaacgaacagcgttaatttggaggctaaatctctgtaaaaggagcaatctatcctctctctgatgctgttagaatgaaacaataccacctctgttttatagaacaggtcacattgacttttttataataaatatttttaagtttgattaagtctatagaaaaatgcaacgacattttcaacacaaaataaacaccttattaaaatatattaaatattagttccaatgaaactcatttaggtttgtagacatctattaacttattaaagtaatagaaaaagaagcctccacgttcgctctcacagcctagaaattcttatattaatcggagaaaaagaaaaatagagtcaatatagaaatacaatttagaaatagttaaaattagaaattaaaaaaataaggaatatttgaagaggagactagagttctatagaaatacaattgagaaataaaagaaattcggaattaatcggaattaaaaataaggaatattataattagagtatagagtccatatagaaatacaattaagaaataatagaaatttgaaattaaaaataaggaatattagaagtagagtatagagtccatataggaatttaaaactaactaaaattcagaataaacataataaagttaaaagttgagtttagagttcgtataaaaaatacaagttacaaataactaaaattcgaaattaaaaaaaacatgggaagaagagtctaaagtcaatatagaaatacaatttagaagtaactgaaattaaaaattcaaaattaaagatattaaaagatgagtttagagtccacatagaaatacaattagaaataataaaaaatcagaactaaaaataaataatattggaagaagagcctagagtctatatagaaatacaatttacagataacaaaaattaggaattaaaaaaagaaatattgaaagacgagtctagagtctatataggaatataatttataaataactaaaatttgatattaaaaataattaataaatagcacgtatataaaatacaatatgaatattacacattagtagtttcgtaaagttagtacaaaatttaaaattatgttgtcattttaatatatttgaataatacattgagaaaacatatatgctattatacgagggaaaatataatgatgctagtcgcgtaatctgcgcgggccaccatgctagttactatataaataaaaacttggttaaatttaaagaaagtttaactataatatagaatggaagggggtatcaaagtcgtgaactttcggagctataaaaccatttttaaaattttcatttaattgatatcttacatctctggcttcctcgttgacagcgacatcgccgccgctctggatgcccttgcccttggtaatctcggattcgacgtagccaggggtgagaactgtgatcccgacctccgacccgagctcggctcgcaatgtttcgtagaacctcagttgcgccgctttggttgcctgataccgtgacgcacataaagaggtcttatgaacacatggaagaggcgaaaaaaattttagagaactgacgactcatttgtggtggtaacacgtacattgtagaagctcattcttgaagtgccgactgttcctgccgcggagcacgacacgacgagtttccctttgctggccttgaggtgtggtagggcatagtaggtcgggtacacggatccccagaagttcacgtcctgtgtaaatgtttcaaccaaaggatgaatggatagactatcaatatgcaataatagggcatgcatgtaggtgatgtatatcgtcataaacaactattttgtgttattctaacacttgtgtagctatatccatattttttttagcaaaggtgttgcatatatatgactctgtttggatccggagggcccttcggaattttgctatttaggagtattaaacgtagattactaacaaaactcattccataacctctagactattttacgagacgaatctaacgagatatattaattcatgatttgctatagtgatgctacagtaatcagctgctaatcatggattaatacacataattagattcgtctcgcaaaatagcctaagggttatggaatcgattttgtcgttaatctacgtttaattcgtcgaaatagcaaaatttcagagggatatttaatagtccagaggatccaaacaaggccataggccagtgagtgttcaccagcgtttaaattaagttggtgctcgagatcattgatgtaaaagagggccgtggtaatctgagcaacaacaaagtttaaaacacctaatccaaatttaaaaaggattggtttgaaatggttttgtgaagtagaacttcagcgatagaagagtattcaaaccgcaattcacttctctttccaagtcattattatttttctaaaatcggactgctgagtaactaaaccaccccggtctaaaccgcgggttgaaccgttggagtaaacgatttagaatctaatggtaaataatgtccacatacatgtaagtttggataaacatgatagttaaatagaatataatagacttaaactttatagttgaaaaacattcagacatatagaaaaaacatatttgaaaagatttatgaatttgttttaccatcatcttggtgaaagcggttatgttggtgacttcatcgaaggagcaagaggaccagataccggcattggcaaccagatggttcactgcacgcagcatcagcaagagacagaacaacaacaaatcgttaataatgcctcctctataattgcagacttgcagttagggagagagagagagatcggttcgcgcatgcaaggatgaaagtgcactacatttgccgaagtgcgcgactgtctcctcgacggcgcgtctcgactggtcggcgtcggagacgtcggccggcaggacgaggacgtccggcgagccgcgctccagggcggcggcggcgacgccctcgagagccttcttcctccgcgccaccagcgccaggcacgcaccttgcgctgcgtactggtaggccagttcctgcacaatgacaagagcagctagccacgttaagcaccaccacgtgtattgtcagtatagtgacacatgatagagaaaatataattcgagtaacgccacgtaaactagtataaataaaatagaaaaaatacgaattacccccaactatcgcggtcgtccgaattaccccctgaatcacaaaaccggacattcttcacctcccaattatgtaaaccggacgaattacccccctcgacccaatccgcggtggtttttagtctacgtggcatatacgtggtatcccagtcagcgttttctaataaaaaattatgggacccgcatgtaatagtcttcactttcccctctctcccactcttcctctcttctctctcactctatctcactcttcattgattcactctatcggcggcggtgggaaacacggaggagcgagcggcgggcaacggcgcacgggggcggacggcggacgacggcatcgtggcgaaggccgagcggaggcggctgcgggcgcggcgcacgggggcgggcggcggacg

SEQ ID NO: 10924 - DNA, 1076 bp, Oryza sativa
ctacacacattcttaacagggttcccagtaaatcagtccctaagacaccttttgaattatggactgggaagaaaccaaccctaaattattttcatgtgtggggttgtcctgctgaagcacaagttttcaatccaaatatgggaaaattagacctcaaaacaatcagttgtcattttatcggttatcctgataagtcaaaggcatatagattctactgcccaaatcagtttacaaagttcattgagacaagacacgctgtgttcttggaaaatgacataatcaaggggagtatgacacccagagaagttgttctggaagagaaacggaattatgttccaatgcctataattgaagaacccgttttctcaacacatactcatgttgcaccttcaatagaaagaaataatgatgcaacacctgctgaagctcctgcaactacttctagtagtgtatcaaatgatgagaataatgaggatgctcagcagccccagattatgatagatgagcaaaataacgaacccgtcagaagatcacaacgagttagaaagtcagcgattccaagtgactatgtcacttacatgaatgaagaggtgaatgaacctatgagtgaagaggtgaatgagcctatacttgataatgatcccatctcatttaaagaagcaatgaagagtgaacattcatctgaatggctaaaagctatgaaagatgaaatgaaatccatgagtacaaataaggtctgggacttagtagaaattcccgaaggagccaaaacagttggctgcaaatgggtctataagactaaacgtgaccccaagggaaatatcgaaaggttcaaatcaaggcttgtagcaaaaggatttacgcaaagagaagggattgattataatgaaacattttctccagtgtctactaaggattcattcagaattattatggcactagttgctcattatgatttggaattacaccaaatggatgttaagacggcattcctaaacggtgatctgtatgaagatgtatacatggcacaaccataaggttttgttatgaaaggaaaagaacatatgggatgtcat

SEQ ID NO: 10925 - DNA, 675 bp, Oryza sativa
ttattgcggaacggattgacaaccactgcatgtattctgaaagatgtagggaagtacatgacatatacaccccttccttctgacaagctggaaataagagaatccatagatcagtttccaaatcaaaacaaccatatatcaagtatgagtgcagtcaaggtttcaaatattggttagtaaaatacaggtaggagtaacttatgcttattctaccatacatttaggagcataaacatggattaattatcacaaataactgctaggaagagcaatcttgggacccagagagcatacaaaagaactagtatttgactctgtaataatagcgcttgaataaatgaactcaaagtacatagaatgtcaataaagaaaagaaatggacaatagtaccatagtattccagagtataaaaataacaatccattgcaaaagctagactggatactgcattacctatttacaaagttctcataaaaggttacctgtggtatagatagaaaaatgaaacggtctgttccaggtatgaacactctgcagttgtcttcatttgcaattcagcaagatcccatccatcttggatacttcgtctttttgcagacttatccactttgcacacacaaccaatttggagaatggcattgagctctggcagaattttcgtctcgtatattccct

SEQ ID NO: 10926 - DNA, 573 bp, Oryza sativa
ttcgaagtcaagcaaaacttaaccgttcgcatgctaagtgggttgaatttattgaatcttttccatatgtcatcaaacataacaagggaaaagaaaatttcattgctgatttgttctttcgtgagattgttcgcttgcatggagtgaccgccctccggcgctgccgcgacggcgcccttggcgacggcctgcacctccttgacatgctccggcagcttgatctccaacccggccgccaccacggcggacgacgacgacgccaccagtggcttcttgctccggtacgccatgtacagcgccatctgcgccacgccgaacaccaagcccagcacgttgggcagcgccacgaacacgtccttcttgagcagcccgtacaagaaccagatcaccgcgctaagcaccaggaagaaggatagcgagaatggcatgaactccacgctcttggtccggatcaccagcctctgcaaaacacaacaatcatcagaaccttgtcatcagctgctggttgatcgatcgagcgattagttagcaagacatcaagattgcattcgtttgctagcttacgatgatgct

SEQ ID NO: 10927 - DNA, 564 bp, Oryza sativa
gaccgtttccttggaatttcatccgaacataagacaggtacgaccacatgggtggaatgggacacccctggctgagtaactagcttatcgggggagccatgatgctaagagacatgtggattcgccggggtggtgtcggggaggacccctgggcttcctggcacagtatggtctgggacctaatctggtgttggtctgggacccctctcgttggcatatggtgaacctgtgtcggctttcgaaatgccttgtcatgaaagccttaaggtctctagtcgtggccattctgcacggactggatgatccgggttagtaatgtcgtgtgggtaaagtgtacccccctctgcagaggttattaaaactgtttgaacagccgtgcccacggtcatgggcggatgtgaggtgattcctagcgtagttttgtttgactactgccttgtgaaatttgctgttgtggaatgggtttgatgtttgaaaaatctgcggctgatgggatcagccaggcccgggtggccgattgaaagctgttggccgggtgccaatcttgatcaattcaaaagactg

SEQ ID NO: 10928 - DNA, 1596 bp, Oryza sativa
tgatgacccatgtacacaaccttcctacagtgcttaagatacgtaatttctggtttattccttacagggagggcaagcctttttccccttgttgaactgtccggataggttgctaagtgcaggccaatcgttgatggttacgaacagcagcgctcgtaggtaaactcctcttgtttgtcattgtcccacacggggacaccttccttcttccacaatagtttaagatcttcgaccagtggtcttaggtacacatcgatgtcgttaccaggttgcttggggccttgaataataatcggcatcattatgtacttcctcttcatgcatagccatggggggaggttgtagatacacatcgtaatgggccaagtgctatggccgctgctcatctctccaaaagggttcatgccatccgtactcaaaccaaaccgtatgtttcgtgcgtcctttgcaaagtctttaaattttctgtcgatgttccgccactgcgaaccatcggcggggtgtctcagcatcccgtcctgttgacgctcttcagcgtgccatcgcatcattctagcattccccttgttcctgaacaaacgccttaaccgtggtattatagggaaataccacatcaccttagcaggaattctcttctttgttagctgcccgtcaacttctcctggatcgtctcgtcaaatcttgtatcgtagtgctttgcaaacagggcatgcttctaggttctcgtactcctcaccgcgatataggatacaatcattcggacatgtgtgaatcttctgaacttccaatcctagagggcagactatcttcttagcctcgtacgttgtctcgggcaatttgtttccctccggaagaatggtcttgacgagtttcaataaatcgccaaatgccttgtcactaacaccattttttgcctccattgcaagaactccagagtggtatccaactttttgtgcccctgctcgcaacctgggtacaaggacgttctgtggtcctctaacatcttgtccaatttatgggcccccttttcactttcgcggtcctccttggcgtcctgcaatatctgaccaagatcatccacaacgtcgttaccatcagcatccctttcctcctcgcccgtttgatttccttcaaatccaacgtactgagcaaagtccggaatattgtcgtcttccacttcatcttcttccatttcaacaccttgctcttcgtgggatgtccaacaattatagcttggcatgaaccccgactcaaacaagtggaattaaatagtcctggatgcagaatactccttctgattcttacacttattacatggataacaaataaaacccttatgcctgttagcttcggccactctcaaaaaataatgcacgccgtcaataaactctttggaccgccggtcagcgtacatccattgccgatccatctacgtgacatgaaaaaaaatcgtacataaataattattctaacaataatgacagtcattcaataattataaaataattacaaactctttcaacagtcatacaaaaatgacatatcattattcatacaaaaattataaaatattacaccaaataattcttatttact

SEQ ID NO: 10929 - DNA, 682 bp, Oryza sativa
attctgctttttagtgactatcatcatataaagaggcaaattgagtcagagatgattcaagctggtggggtgacaccttcaaagccttttcttgacctctcaaaaccagagcatttactaaaactgaaggatcgtttgaagaagtactgccaaaaggtgatatattaaaatgcatggattaattaaacctttttggtggcttgcaattactatacttttgtcccaatgcaggcatataaaagagtagttgacaaaccaattacagaagtgaggaacgctggaatatgcatgcgtgaaaattccttctatgtagacacagtacgaaggtccgtctgatgtttattagtatattttagtgtactatgttcattggatagttcatggatatgtaacagtgatttctattttagcttccataatagctcttagtggagcaaagtgcaattttctggttgataaacatagcattgttggctaatgctttcttcaaggtgctctaaaatgtgtactttgtttgaaaattccagctttcgtgatagaaggtatgagtacaaaggtcttaacaaatcatggaaaggaaaactggcagaagcaaaagccaatggaaattctatcaaaattcaggaagcacaggttcacaatgcattattatattatacatcaagaaaattagatcaatacc

SEQ ID NO: 10930 - DNA, 617 bp, Oryza sativa
tcaccatgcctttgcaaaccctttatttcgagctttcactacatgtcaggtcacacattgtggagtaaaacacaaaagttagtgggatggcattgagttagcagtatccctacttgtggtcttcgttgatgaatagacagtgctggatatgcataagctcatcaattagagatgaaaagaatggatcgcatcaaatgcagtatcggagacttagaatgttgcagcagaatacctgtttaaaaaatccatggattaaggcaacagtccacgttgtattcttgagatggttccggatagctcgagacagaaactcgttccaaacaaacattgtctcataaacaacttgcccagtattcttgtcagttatgttcttctgaaggctgcgcatgatattgtaagagtagctgaagaagaagtctttcgagagatcgaccgagcaaaggagccgtttatatctacaaaaagtgaaaggtaaaaatataaatatccgcagacaatagaaatgagaaaaactctagatatagtatatttagaatcatactaagaagaatattagtggatcaaagaaattcgaaacaattctatatacctctgaccttatgaacaccacacacaat

SEQ ID NO: 10931 - DNA, 535 bp, Oryza sativa
tccatgcaagtgaacaccatagtgccaaacaccatgcaaaaatccttagtcatttttggagaaccttgtgggctaagttggggacgaaacttttattttctactacttgtcatccccaaactgatggacaaactaaggttgtgaatagaattttatctacaatgcttagagctattttgaaaaagaatattaaaatgtgggaagaatgtttgtctcatgttgagtttgcttataatcgttcgcaacattctactactaagaagtgccattttgagattatttatggccttctaccccgtgctcctattgatcttttgcccctcccaacttcagagagggtgaactttgatgcaaaacaatgtgatgaactgatgttaaaactgcatgagaccactaaggagaacatagagcacatgaatactaggtgtaaacttgctggaagcaaaggaaagaaacatgttccttttgaatctggtgatttagtttggctggctgttgttgcactcggcctcaaagtagggagacaaggtgaaaa
